United States Patent Application Publication US 2018/0305689 A1 - sequence listing, part 133

SEQ ID NO: 1884368 - DNA, 4001 bp, Homo sapiens
gacaggggtttcaccatgttgaccaggctggtctcaaactcctgacctcaggtgatccacccgcctggcctcccaaagtgccaggattacaggcgtgagccaccacccccagcctatccttcaattatttttttatctgctctttgggatatacataagtcaaaggttatgtaatgggatttttgctccgggacacaggacaaacaatctgcaagttgcatgtgattgttgtacaatgggttccgattataccatgactctccatagtggcctaaaaatattactaacaaaagaactgaggccacccactttatagtaagacttatcctccctactcggacacacactgttatggatcagttctaaccatccaatcacttcaaaagaaaggagaaaggtcactaactccctggggcgattctacaacacacctcttccacaaggttactcaacggacccaacagcacctcagtcattaccattcaggaaccgagggacctgaaacgtaaaagactagcaccaggtgttcagcaaatctacaaatatgcctatccacggactcagtgggacaattaaaatttaatcataatccaagcaagataaaaaccctagccaagtaacgttaactaactctaaatgaactagattaagatttttctcttcactggttaactattaaactcgacactgttacactagaggctctcccttacagctcaaagaggagcaaggttggattttcagattctctgtggctcaagctctggtaacatgcttttaatggaacggactttgacggacttcgatttttgcttaacatttttacggcgaaaaagttaggtcaggtagcccaaagacctgaccctctaactgtgggcctagttctccgtgtaatccccaattgcttagcactttctcagctaagaaaaatataacaagcaccgtgggagactgttccacaggtagctcacaagtagttcgcatgcaaaatcactcactgccatccactatcaccaaggaaccaagttaggcaggaaccttcctcctgcaaagagtagggccacgagaggcggcctaacccctcagaaaggtgggtagagaatgaaaggagttccatcaaatggcactttgaggcaagcgagaacaaggactcggaccctgcggtgcagggcggggtgctagatcaggggcgcagccggcaggttggagccgggctcggctgccagctcctcaccctgttcctcggcggccttgtcacccggcacctcggatcccggcgtctcgtccccgctccgctcctcgggttcgtcttcctccctcttgccgaggccctgctcttcgccaccatttaccccgcctgacccggccgtggcctccgccggcttctcggaagcatctggctcggccgcggcctccatggctgccgcctccgggggctccggcggcggctgcgcggcctgacccaaggcttgagcagggggtggctcctcgtcctcgtcctcaagcagcgcctcctcgtcctcctcctcctcctcttcgtcctcctcctcgtccccgcccgggccgccgcccgacgcggccacaggccgaggctccgccttgcaggccccgccgggcccggccccgccgccgccggcctcgtcctcgagcatctcggcgtccagcgcctcctgcagccgctgcgccagatccaccttgaggccgcgcgagtccaggccccgccgctgcagctccgaccgcagctcggtcactttcagccgcttcacctccatcgccgccgccgcctcctccgcctcccgccgcctcctcccctgcgaaccgtcgaccgagtccgaccgcgcaggcgccgccgccgccgcccgcctccgcctcacgcgccagcactgagcccgcgcgagcgagcgcacgcacgcaggagcggaggccgcgcacggtcccgctgcgcagtgtttgcttctccttcgtctcccctccccctttcggctcacggagcccaaaacaacgcagcagggagctgtttcccctccaggcccttggttccccagccgcgggcaggcgcgcgcggaggacgacggagttcctcccgcttcctcccgccctctggcgcccccgggccaatcgccgccggtgcttttatcgcgcagccgcagtggagtccaagacgggcaaggctggctgcagctcaagtgcctcgtagcacggaagcgtgtgcgcgccggtctttcagtacttccagccggggagttctgcgcagccgcccggagctccccgatgccatgcccctcccaccacccttacttccgtctgacttccatttgctgtggcgttttaggggtcgctagcctcttttccctactgtctgtgcttgcagcagtaacgacaaaaaaaaagtcattagagaatgtgttgcaacatgtaagcctagtagcaattgtttttctggctaggaagcaaaagggctccccagaacgaagaaatactgtaatccgggccctcctttttcctcaacgcctcaacttctacccagcaacagaggcccttgaacccgccctttttctcttattggacaacttgaatcgtcatttgccgttccgattggtcatccgtgatcgtccggatttttccaattggcgaagctgccaggggaattttttttttttttttttcccaggttggtccgctgaggaggcggggtcgtttctgcgggattatttttccggagcctcttctgattgggtggtgtggcgcaatgcgcgcgaccctcaagataccaaactgtacgcatctctgaccctttcctctccttgctcctgctggtaaaccgaagcccaggagacttccaggtttgggcatctgcagagggcgaggaactggtcacggcgccgggtgggcttgcagctgtgacgcttatgtggacacctcagtgtcgctggtggttcacctcggcttcccagtttatttattgacgtcaacaaataaatgttgaataaggaagaagagttagaattgcttgaagccctctggagttttagcactagtcccgcccactcccttctacttccaggtcgggggggggcgggtccaatagaaaggcggaagccagtgtcccaggcgttctcacgcccgcaacaattcctgagtagggccttgcttgagttcttcggaaagtctcatccacccccacatcgcctctttaggaagtcacttaatgttgggcttcattattcccacatccctttccttactacttgcctgcacttcttgagaaaaagactgcagaaaggagaggtggggctttcagtagaaacaagcaaaccgcaggtccctgtggggggactctccaggaagaagggtaatttcctgcctccttaaattggctgctactgtcagttattttgctcccaaccccagagcttcacttgctccttcacttcccagttccgcaagaaccgtgggcgacagttatggagaagcgtctgcaggaggctcagctgtacaaggaggaagggaaccagcgctaccgggaagggaagtaccgagatgctgtgagtaggtaccatcgagctctgcttcagctgcggggtctggatccgagtctgccctctccgttacctaatctcggacctcagggcccggccctcacgcctgaacaagaaaacatattgcataccacccagacagactgctataacaatctagctggtaagaacggggctaaagggtggctagagagcattaagacaggaacatgaacatctgtgaacattgggggaaaaaacgctgacttttttttttttttactgtcatccatttattctgccatgaattggaataacctgtcaatctgtgcggctgtaattaagttgccatagagcagggcttctcagacttcacctggagagtctgttaaaacacaacctcctcggccccatccccagagattcggatgggtctgacgtggggcctatcagtttgcatttctttatttttttattttattt

SEQ ID NO: 1884369 - DNA, 4001 bp, Homo sapiens; identical to SEQ ID NO: 914792

SEQ ID NO: 1884370 - DNA, 4001 bp, Homo sapiens; identical to SEQ ID NO: 914798

SEQ ID NO: 1884371 - DNA, 4001 bp, Homo sapiens; identical to SEQ ID NO: 914807

SEQ ID NO: 1884372 - DNA, 4001 bp, Homo sapiens
gacagcactgatttcttgggctccaaacaacccactgagtcatctcaaagttaagcaatatttccttcaagcacactgcacactccctatcacaaaatctgaaaattcctaagtcctaagacctaggaattctgaatcccctttctttaaaatgtacatatggacccccaagtcctccaaggactctgagcaacttccctagatctttagattcaaaaacgattttcctggagcccccaaattgcggtattgtctcccagccttccaaagcaaattgagatttttttcccttcacaaaacaattgaggtttttttttttttaatactgatttatgagtctcctgactttatggtccctgccctgggtccccctacatttagaaaatgttccatggacccccaaagcacactaaaaaatgtccctgggtcccaagaaatcccaggcatggaaaaacctgcgacctataagtttcctagctactaactaggtttccagaaatttagatatcaaatctccattgggtaatttccatgtgtcccaaaaacttgaaatgtgtttcactggggctcccccaaatgcagacgacatccaggaaaatatatagtctttttcttatttaccaaaaataagctaatggaaatcatttaaaaattagcatagaaaaataatactgattttttatttttttattttttattttgctttccccaaatgtactgatcacactccaggctcccccaaaatctagacagtgctttcttccatctctgaagggtgttaaaacctttccctgaagccacagtaattatgaaggttattttttccccggctgctgccagcgtccaggccactaacttatattcttaagatgtgaaaattaatctcagcttccccctaacacaccaagaatgtgtttggatccccaaaatgtgttccttgctttcatctgccaattttacgtaatatggctctacggcaaaattcccaatttcatatggagaattttctttaactacccctcctcacaaattggtcccccaagctagctggcccctatttgagacctctttctctatgttcccaattgcatggagcaacttctctcatcccccaaacctgtaatctatttttctggagtctcgagtttagtcattaatcacggttcccacattaacggagtccccggggtcccctcctccaggacacccattcgctaagcccgcaaggcagaaagaactctgccttgcgttccccaaaatttgggcattgttcccggctcgccggccacccactgcagcttccccaaccccgcgcacagcgggcactggtttcgggcctctctgtctcctacgaagtccccagagcaactcggatttgggaaatttctctctagcgttgcccaaacacacttgggtcggccgcgcgccctcaggacgtggacagggagggcttccccgtgtccaggaaagcgaccgggcattgcccccagtctcccccaaatttgggcattgtccccgggtcttccaacggactgggcgttgctcccggacactgaggactggccccggggtctcgctcaccttcagcagcgtccaccgcctgccacagagcgttcgatcgctcgctgcctgagctcctggtgcgcccgcggacgcagcctccagcttcgcggtgagctccccgccgcgccgatcccctccgcctctgcgcccctgaccggctctcggcccgcatctgctgctgtcccgccggtgctggcgctcgtctccggctgccgccggggaggccggcgtggggcgcgggacacggctgcggacttgcggctggcggctgcgctcgctcctgctgggcgccccgaaatccgcgccactttcgtttgctcattgcaaagatctcatttgtggggaaagcggctggagggtcccaaagtggggcgggcagggggctggggcgagggacgcggaggagaggcgctcccgccgggcggtaaagtgcctctagcccgcgggcctaggactccgccgggaggcgcgcgcggagcgcgggcgaagtgattgatggcggagcgaggggggcgaggggggccaggggggcgcgagattccgccggcggccccttccccttggctaggcttaggcggcggggggctggcggggtgcgggattttgtgcgtggtttttgacttggtaaaaatcacagtgctttcttacatcgttcaaactctccaggagatggtttccccagacccccaaattatcgtggtggcccccgagaccgaactcgcgtctatgcaagtccaacgcactgaggacggggtaaccattatccagatattttgggtgggccgcaaaggcgagctacttagacgcaccccggtgagctcggccatgcaggtaggatttgagctgtgtttcccgccctgatcctctctcctctggcggccggagcctccgtaggctccaagcctggcccagattcggcccggcgcagccggccttccgcgcgtcccgcacctggcgggggctccggggctccggcgcggcaccggggggcgctcgggatctggctgaggctccaagcgccgcgtggccggctcctcctgctggggcaggtggcggctgcgcgccccgcccgagcccaggggccccctcagccgcaacaaccagcaaggaccccccgactcagccccaagccacctgcatctgcactcagacggggcgcacccgcagtgcagcctcctggtggggcgctgggagcccgcctgcccctgcctgcccggagaccccagctcacgagcacaggccgcccgggcaccccagaaacccgggatggggcccctgaattctctagaacgggcattcagcatggccttggcgctctgcggctccctgccccccacccagcctcgcccccgcgcaccccccagcccctgcgaccgccgccccccccccggggccccagggcccccagcccgcaccccccgccccgctcttggctcgggttgcgggggcgggccgggggcggggcgagggctccgcgggcgcccattggcgcgggcgcgaggccagcgaggcccgcgcgggccctgggccgcgggctggcgcgactataagagccgggcgtgggcgcccgcagttcgcctgctctccggcggagctgcgtgaggcccggccggccccggccccccccttccggccgcccccgcctcctggcccacgcctgcccgcgctctgcccaccagcgcctccatcgggcaaggcggccccgcgtcgacgccgcccgctgcctcgctgctgactcccgtcccgggcgccgtccgcggggtcgcgctccgccgggcctgcggattccccgccgcctcctcttcatctacctcaactccccccatccccgcttcgcccgaggaggcggttccccccgcaggcagtccggctcgcaggccgccggcgttgtcacccccccccgcgctccccctccagccctccccccggcgcgcagcctcgggccgctcccctttccgcgctgcgtcccggagcggccccggtgccgccaccgcctgtccccctcccgaggcccgggctcgcgacggcagagggctccgtcggcccaaaccgagctgggcgcccgcggtccgggtgcagcctccactccgccccccagtcaccgcctcccccggcccctcgacgtggcgcccttccctccgcttctctgtgctccccgcgcccctcttggcgtctggccccggcccccgctctttctcccgcaaccttcccttcgctccctcccgtcccccccagctcctagcctccgactccctccccccctcacgcccgccctctcgccttcgccgaaccaaagtggattaattacacgctttctgtttctctccgtgctgttctctcccgctgtgcgcctgcccgcctctcgctgtcctctctccccctcgccctctcttcggcccccccctttcacgttcactctgtctctcccactatctctg

SEQ ID NO: 1884373 - DNA, 4001 bp, Homo sapiens; identical to SEQ ID NO: 914817

SEQ ID NO: 1884374 - DNA, 4001 bp, Homo sapiens; identical to SEQ ID NO: 914828

SEQ ID NO: 1884375 - DNA, 4001 bp, Homo sapiens
ccatcctccagacactcctccctgtccctacaaccaggggactgggtctgaatcacagactcctcctcctcctctctccaaccaaagtggatgggtcctcaccaggtaatcctaactactctcatggcagcaaagctaacatcctatccatattggatacaccattccaaactaaaaagaccaccaattccacttccagaaatttcctcatccccaaattattcttcctccctcacaggactgacttgctgcgcttacaaaaattccagaagttgccgatccagaaggccctggtccatgacattctctgcctccaatttcaaatcttttatctcatactttgtttcaaatctttcccagtattccctcccgtgtccctggatagaccactccagttcctcacattaatccaggagctatggctgcaggacaccttccaggatatcactcctactcaaatctccgtttttgtttttattttttctttttgtcttctttgtctgttggatactctaagtccccacccccaacctttggcagttggggcccctttgtcaacctcacacattaccttttaatcagttacacttccctctttcttccaactgttaaatttatttgtccacataaatccagcaaatcacagcccttcctgttaacctaaccacataaacctggtccaaaataaacctgcatctcacctactcagccaatccattcccaaaacctgtttataatcttgctcagctaaacacctttcccccaatccatcaaataaacccacactgtcacacactgggatgtcgccctcctttacttcatggcctctaaacgaaacatgtttcaagctggatttcataaaacacctccttaccaaccctgcccctctctgctggtgcagctctccatgtatcaaactcaagtgtgcttcctggaaaaaaaaaatgcacatgattccctcaactgcaacctttatccttctgccctgtcagaaccacaatggctattagttaccaaaacccatctctttctctctctccaaaaccaaaaagccttcacctccttccccatcaatattccctatcaggccctcacagggacaacccttgctaccaactattcaacttggaaaaacagaaagttgggacaaaatgtttattcaggattcaacccctccttctcatggctcactaccttcacttacaacttttccctgtccaccccaagtctcttctgtgtgaaacaaactcttatctctgcctactggccaattggtcaggaacaggcaccctagtatttcagtccccaaacattaacatcctaccaaacaaccagagcatccaggttcctttagcagcttctgtctcatcttcctctacatgcactaagcgggctctacatctcattcctctggtaacaggattaagcatctctgctgcacttggcactggaatagcagggatatcaccctcaactgccctatataacaaaatctctgcagttttctatgataccctagaggacatgcacacttccatgacaagcctccaaaggcagatagacgcctttgtgggagtcgtccttcaaaaccaaagggctctagacctgttaatcgctgagaagggggacatatgtgtatacttccaaaaccaatgctgtttttatgttaatgaatccagcattattcatgacgcggccctaaggctccatgacagggctgcagaaatccatcaagttactaactcttggtggcaggggtcattgtttctaaagtggatgccttggtaaccccttcttagagcccttagttttcttccctcataatactaaaaactactcctgtgtactcacctttatattctgctttatctcccaaaggctgaactcccttgtccaggcagccacctagaaacacattcataccatccttctccaccaagtccggtatcagcgcctccaggaaaacaactctgaagacgacacgcagtacttcaaaacccaaaccctgactacagtgcccctattcagcaggaagcagccacataatgaacaactctcatctttcttttatagtaaagtaggaggcaagaatgttactccaaactgtaacattttgtaagcgcccccccccccccccccccccccccgctgttttgcagaccttggccaaagtgaaacatttcaccaagattcaggctgtgagaaacatcttgcctacccacctgaccacaaggcagacaaaggcccaacggaagaaacattcttatcataccctactcggcaaaggcccaacggaagaaacattcttatcataccctactcggcaaaggctcaactaaagaaacatctctatcatattctgttgggagaaagtgcaaagaaacaccacgttctggaggaataagagccagaactgcctcatcatgggaacatcttatgaatatcctgccgggcagccagctatatggcccagatctctgccgctcagacccattaagtaccccagcctgtaagcggcggtgagctctgtctggccctaagttagttggccctcaacttccgcaggtgtctgcaatatacctgtgttgctgtttgagctgccccctctctgtgtctttttttaaccctcgtctcccttcaaaacctaacagtaagcactcaattcttacttgttgaataaatgaatgatagacaatggacgatggttaatttttgttaagaaaaatggaaattcggctgggtgcagtggctcacgcctgtaattccagcactttgggaggccgaggcaggaggatcacgaggtcagcaaatcgagaccatcctggctaacacagtgaaaccccgtctctgctaaaaatacaaaaaaaattagccaggcgtggtggtgggcgcctatagtcccagcttctcgggaggctgaggcaggagaatggcgtgaacccgggagggggagcgtgcagtgagccgagatcgcaccactgcactccagcctgggcgacagagcgagactccatctcaaaaaaaaaaaaaaagaaagaaaaaaaataaaaatggaaattcaaaggagcagaaagagcaattgcatctgtaggcaagtgctgatcctttctaagaattatgggtcagagaagccatatcagatgtaaaacacaattacagggttgaaaagggaagataaagcaagatttcaggagtttcccaaatgcaagagtaattcaggaaatgatttataaaattgagcagtgagagagtggtatgtactcttattaagtttagaaggtcatttggtcaggctggagttcactggctagtcaggacaaacaatcccactgtctccactggctctgctgctgtgtctctacaattaggttgcatcgttagatattaagtagattttctaatttctattttatgctatcctatagtatcacaaggagtatatgtgtgtgtttgggggtgggggtgggatttgaagactttagaaggttccactcctctgtttaagcaattatgatgtcagttgaagacaacactcactcctctgcctctgcaagagaaaagcccaagggcctaggtaaacaatggacagcatcctggatgatgagtgagtttacttctttaagaaaagcaacttgagggcaatggaaaggtggcttaaaagagaacaggaaccatatgtcaattatagaaagaattattaggacaaaggtggtgtactgaacctgacttcaggattagtttgaacagcataatcctagaagtgttctaaaagttccagttagtgaggttttagaattttttagcttcgggtaaaaaatctatttgataaggtccagatttttcatatcactgtgactatttggagatggtctcctgtaggtctgtttctactgagctgggaagcagcccaggtttgcttctggtgctcctggtccaaatcacctatggttccctgagagaaaaccattctttacagagagagaaggggaaactaacactgc

SEQ ID NO: 1884376 - DNA, 4001 bp, Homo sapiens; identical to SEQ ID NO: 914844

SEQ ID NO: 1884377 - DNA, 4001 bp, Homo sapiens
ttcagttttccatctgcttctttggggtcccatggagtcaggcttcaggagaagaccccagcccctgctgctctgttgggctcctcctggctcctgtgtgctcaaggtgctggggtctctccccagcctcccgtcacacctctgctgggttcactctctctgaggtggcagagtgaacagggccgaccactgaaaggggagtaatcccagaaaaatgaagggaagaatgcaggtctttaggaagccccatagaaggatgggcgcccccctcaaccgtgaggagccctccctgtcccatggagggatgcccccccgccccccgtgaggagccctctccatggaaacagggttgagggcctgacctcccccttggagccccagaaaacaaagtggggagggtagggggaaactgagttggcggtggcggcacacggaggaccaaatcctctcaagctggcgtctgggcggggtatgaggagcagaccagccacgcagccacggcggccggagtcactcgaggtcagaaatgcccaagcaggaaatgagatgcaacttgtaacagacatcaaaggaaatggaaaaacattcttctaatatgtcagggaggctagaggaaggcggggggcgctggccctttattaggagactggggagggggcgataagagatggcactggaaggctagaaataattaaaatcaaagcaccagacacctgggggtgggagtgagtgtcctccctgcagccgggagacctaaggagcatgctcagagccctccaggagtgcctggagcagcagtggcgggcaaaggcctggcctcgggcccgcctctgtctcagccagctcctccaggcccagggatgtggtccccatggggtgcctgctgcaggcagccagcacagggctggtgttggcagagccctgggaactgaacacaagccttttcctggaagagagtcccagtgggatcggggtgccagcacgtgctggtcccgagggcacagcgtggccaaatggtcttgggaccgagtcctgctccttccacacagagaggcagtgcctaaccaaaggtgcagagggaagagggcagcctcagggtccttgtctgtagccaggggccattgcctccttttctctacacaggtctgggcccgatctctggtgctcacctgaggctggccgtttaaagtaggacacttctccttgcctcttgcctcttgggaagcctttgatgggctgcaccctgacgcgacccctttccaggagtccaggcgcacccctggtggtggcatggggagttggtgctcggcagtgggtcctgaccacttcctgcccatcacagccacggcttctcccctctgaggagggattgctttctcagaagggcgagctggtgctgggcatgcacgcaagtgtccagaaagcgggaatccagggccctgagcctgcgtccctgccgactcagccccggctctgaaagggaagcagatgggagtggaggggaccccgtgcccggggcctgggaccaggccggctgggtgtggcttcaccaggatgcgccgggtttcagcctctgttctgggggctgcataagtcaactcggggcgagtcccaaactgtgctgggcttcggtttatcacagtggggctaccagacaccaggttacagccctggggtcggggggcagaggtgggttgattttcccaggccctgggggagcaagggagagcctgctgctccccaacacagcgattttccaggatccgacgctacaaacagcagcaacatccttggtggaaaagttcaagaatctggtccaaaggcagcctgagtgagccagccgggaccagaaccaggagccgcccagtggaagggtaggtgctggatgccctgcaggagggacggtggtgctggggccttggccaccggccgggcagcagcctggagcgccgactccagaggggaggctgggcgcagctcccgtcggggcgtgcgggcagctgcgcccaggcgggagggagcgcgcggcggtggcccaggcggccctgcccgactgtcggaccgagcctccccctcccggccgcggccgcgcttcccgctagcgggtccgcggggaggggcgggaaggcagctggacgcggcggcgatttatgggcctttcaggcgagcaggtgcctcctcgggccgcccattgtctcgccggcctcacaatggggctgctgcagccgcagagccggccccgccgctgctcgcggcctgcacgggcacgacggccccgggacggcgggagagcctgcggtcggcgcatctgtccgcgcgtccgtcggtgcgtccgtcggtgcatcggtcctgctgccctccgcgcgcctgtccacgggaacgggccttgggcgcccagcgtccatccctgcgcgcagcacggctccgctggccctcggggtccccgcgccccgacggtgcgcccgcgcccgctgcgctcgctcgtcctgcgcccgctcgtcctgcgccgtcgggcacccggctccgcccggctggcacggcccgcgccgctgcgtcccggtcgcacacacaggggcccattcttcctggctccgcgcaaccatatggcaaatccgcgtcgacacagcagcccccgctcattcaggcgcagaatgtcccgcaacagggaacaatcacgactctgttcgcgtctattatggatgcgaacggggcgagaaaaaaaatcatttaactccaagagatagccagctaattagcaaccatatgtgagcccggattcaaagcgatgccgaggagttcattctgcgtcgggcgactttattaggtatagaagacagatgtcccgacagcccacgcatcacagaaaatcgtgtcggggagttcttgaaatgtccgggagagctctttaaatattaaagacccagcccagctgatggactgggccggggtcctctgggatccccaggctgcaagaagaggacttagcaacagcgactctggcagacgctggcctggctggcccagggagggggtccctccgcctccctccagggccccctctggctgcccctccggtctcagactctttcactcaggtgctctggggccccaaggaggaacaaaggggcttcctgcaggcacggttggcccagttatgcttcagggtgcctccgagggtcacggtgtggctctgtgggggcgtcccagtccaggagaggaaggctgcctggggagtgtctggctcgccctgcccccagcccagctgagctggacagacagtaggtcttccttccgagtttgcagaatgagtgagtgagtgaatgaatgaatgaatggatgagccagtgtggcagccaacccaactatgaaaatccctcggggggtgggcgggagtggggacaatagtggaaggaaaacactcccgatttctttaccaagaaaacagcctctggccgtgagcctccgattctttgaggaaggaaaaggagaaagcttgttagagagagagaaaaaaatctttctctgttttccatgcaatgcaattatgttccagcttttcctccttgttattcttttaagccaaatgtctgaataaaaggattattccctgcgcccccccaggactgaccgtaccgctgtcagcaggcggggcgctgctggcgagattaactgcagcctgtggcttccgcattgcttctatgaaaataagtgaggtcagctgccattcaattgtcgcagcatatatatttgaaaatttaaatatttgaatcaaaggaaaaagggggatttgcatttctgcccaacgcgaggagcgcgttccgaatgccgcacaatggaaacgtttcaattgaaatgaattgtctcctcgcaggaggattctgtagaaaggcagccagtgctttctcttttgttttcttttgcttttgttttgtgttgtgtgtttttctttcctcttacccgcttcaatccaggagggtgttttctgaaagttggtgactgac

SEQ ID NO: 1884378 - DNA, 4001 bp, Homo sapiens
tatctggaaaacaggtgcagaaatggatcatttgagacaccatagaaatctggttaatcctgcctgcctgctttccttcaagtactgactgagtaaggctgtgtatcaggctcttggctgggtacagagcaggcagcagaaaacaaaacagagttcctcgttgggagcttttggtctagcaaaaggggcaccacagtaaagaaagaactggtaaatgcacatcaaatgtggatattatcaggaaagtttttatactttgtgataatctaagacagaactattctacctggatgaattattctctttcataaccagaacagtgctgtgggaaggcactcttactctcaattttatataaaaggctatttgacctgctcagggaccacagtggggtactgggatctgaacatagtggtggcccttcaagcctactacccagactgagacctgcatctgatcaactctcatctccaatatgaccaagagacttctaccactacctctcacctggcaggtgatcaccacccccaactcagactgcaacctttacttcgccccctaattcctgactcagaatccccacctagaggcagaacttcgacttcaattcctgactcccataccccactgagacctctaaccccaatcccaatctcttaactcagagccccccattcagaacctctacccaaagacagactccagaccctgactccagtcgccaactcggacctcccttggatctcaactcagagccatgatgcagactccagaccgggattcaggtccccaactcagactcccgatcctctgtccctaatgaggccctacctaaaaccaccatgcggactccagacccggactgactgggaccccaactactcagatcccaactcaggcaaactcccagccaggatgtggaccctagacccgaattctgatcccaactaggatacctaactcagaaccacaacggggattcccacctccgatcctaattcgggccctgactcagaaccactaagtggatttccgactccggtcccaattcgggctttgactcaaaaccacaacatggattcccaacttccatcccaatagcgcggactcagaaccacgatgcggattccagactccaatcccaattcagcccactctgaaccaccatgagaactatagacccggaatccgatccttgggacgcggccaggaactcggacctcgaccctggccacgctgtccataaggtgcagatgggagcgcactgcccaggccaggctgcactgctgacgcctgtgatctgggacggccgcggggcacacagctcacctcagcaacgccagtgatcacccgtcccgcgccgtccgcccaggtccgtgctgaccgtgttcaaaccctcccagagagatggggagggccgcgctgaggagagtctgggagaaccgcactgaggagccgccgggagagtgccgcgctgaggagcccccggggagagtgccgcgctgaggagcccccaggagagtgccgcgctgaggaggcccagggaggaccgcgcggaggagaaccatgctgaggagcccccggggagaacagaaccgcggcgagaggcccccggagagaaccgcgccgaagaacccccggggacaaccgcgccgaagaacccccggggagaaccgcgccgaaaagccccgggtgccccgaggagaacggcgccgaggagtccccggggagaactgcgccgaggagcccccagaagagcgccgcgctgaggagccccgaggagaaccgcgccgaggggcgcgccggggagaaccacgatgactgacgcaccgaggaggaccgcgctgaggggcgcaccgggagaatcgtgctgaggagccccggggaggaccacgctgagaggcaccccggcagaatcgcgctgaggggcgccctggcaggatcttgctgaggagctccctggaggtccgtgctgaggcgacgcggcgaccgttctgcctggagactgcggcagcgctccgactgcccccgccgctgccgacgtggcgaccgccccccacctgctgattgggcggcagcaggggaaggcttgcggcgggctgctgcacggattggctgggtgcggaaagtgatgtgccgtgtcctgtcattggccgaaagagtctcgttttgatgccacccgggctcagattggcccagcgggtccagcgccgcatgaggcactggctgggtgtgaggtggcgcgagccgccgccctccctgcccccacccgtcgtccctgagcaccaccgggggccggggccagcgccagcctcagcgttggcatcgccggggtgagctggagacacgggccagttctctgcgtgatgtgttcaccaccccggggtgaccgcgtgaggacagcggccgcaccccgacactgctgtgggccctcggtgtggaggcctgtgggcgtccaggccacgcccgagaccagcccctccgccggcgccgctgcagcgaccctcgaacccgggcaaggtctccaccgccgtggcaccgggtgcgggaggcgttttcccccctcccagcgggtccatgcaggggatcgggatgttctgaagcccccactgctgtgcctggaacacccgtgtctgccgctcacccctgaggacttgggacctcagggggtgagtggcaggggtggccgggacatgccaggccacccacctggcaaagggcagcgccgagggcgccccgcgcctgccagcgcccggccgggcccgccctgcccacctcccatcccccatccgggcgtgacacttgaccgcgtctgccggcccctccccttgtccgtcccctccgcgccgctggcgcgcgccttctgaatgccaagcattgccataaactccggggacaaaagcctgggtcacaaaagccccctctagaagttcacaccctgaggcttccctggcaaggctgggggccgtttggcccttccatgtggactgcaaaaacagtgttggaatgcaggactctgggtatgttctcgaaagttgttacaaccccaacccagggttgacctcaaacacaggaggaagggggaggctggagccagccaagcgagccagccgtccccccaccaaggcacgcaaggaggccattcatcttcactgcctctgccgaaaatatacgtctacgggagagccaggaatctctctccaagggtgaccgggttgggggttttgttgttcttcagcccagaagagaaagagaaaatggtgtcattttttcaggcagcaagtgattcctttcaggccttcagcaacgacgcccagatgagtccactccctgcctcctgctcagcccacaggcaatctgggcacaagtgacacatcccctgggcgcctgtcccttcgcactggcccagggagttcatgtgtctgatcagagggcgcagtccaccctcactatctagctgggaagtttttgtcatctgcctgtccgagaggcagctgtgcaaccagtgccatcactcagagccagtgctcaggtgcaccccagactcagggtttcacgctataatgtcactgtcttgaaattcttgatagttactatctttgaacttgtgttttagaagtgaagtctgaggggaaaatggagcttggaacttcagctcccaagtggctttcccaccttcctgcctcctcaggacagattatcagctgcctgtctgcctgcttcctctgtgcccagcctctctcttgacatccaaaggatcacaactcccactcagtgaccactattattctctgcccctgaccaaaaagagcagggcagggctggagtcctgaccctggcctggactctgcaatgcagagatacctgcaagtctcatttccccgcctgtaggatggaggtgatgctgacagcctcttggagccattgagataggaaacgagagagattatgtgagaagacagggtcaggaatgttgagttgagggtggcctcaggcccctg

SEQ ID NO: 1884379 - DNA, 4001 bp, Homo sapiens
cggtggcacggtctgcagtgggtgggcctctctactggaaggtgaccacctttagatactgagacagcaagtacgagtggccttcttttaccttcttttaacttatccttttttgctgtctggtcatcttcattggtcttctgcttctcggtgtcaagatcatcatcatcatcatcttcagctgcccatttgactgtagctattacaggaaagtaatcgattgtaaggatggaagttggttggaatgatgtgaggaaggggccaaggaatgcaggcaacttctaaaagctgaaaaagacaagaaaaacaatctccctgcagagcctctggaagcaaccaatccaaatgacaccttgactttactccagtgactgattttagatttctggtttacagaactgtaagagaataaatttgtgttgttttaagctactaagtttatggtaatttcttacagcagaaatagaaaattaatgcaaagtgcctttaaaacatctaagtagctgggcatggtggcgcacaactgtaatcccaatactttgggaggctgaggcaggaagatcacttgagcccaggagtttgaaaccagcatggacaatatagggagatcccatctctacacacacacacacacacgttgccacatccctgtggtcccagttactcaggaggctgaggtggggaggactgcttgagcccaggagatcgaggctgcagtgagctgtgtttgcactattgccctccagcctgggccacagaatgagaccctgtctctcaaaaacaaaacaaaaacatctacgtgaggtcaggtagccaactggagaccagggtctgaaagtgagagaagagtgctgagctagaaatctgtgaatcatattcacatgggtggcagctgaagctgtgggagggcataaactcatattagggaggtgacactgtcacctacttgctgtgcatctttcagcaagataattaactgatctgacacattattgagcatttattctgtcctggaatcatatcaagcaatttacatgcattctcatttaatcctcacaaccagtttatgaggctgaaacttttttttttttagaccaaaagcatcttggataaacaggcctgaggcttgcccaggctgaagtgcaatggcgcgatctcagctcactgcaacctccgcctcccacgttcacgcgattctctagcttcagcctcccgagtaggtggaattacaagcgcccgccaccatgcacggctaatttttttttaatttttagtagagacagggtttcaccatattggccaggctgatctcaaactcctgaactcaggtgattcgcccacctcggcctcccagtgttgggattacaggcgtgagccaccgcgtccggccagaaaccatttttatctcctattttcaaaaataaataaataaataaaaattttaaaaaaagaaactgaggtttagagtttagtttgtccaagatcatacagtaaaataatgagacaagcctaattaaattgcatgtgcctcagtcattacgcaatctgcgagtttgttgggcctactgaatcagaatccgaattattttaacatgaaccgtaggctatttgtacactaagcgttaggactagcctctaccctgcttccagaatgggttccgctcaagcaggaggtgagccaagagcctcgctcagagttctaaaaacacaatgtttctcacctctgtatctttgcacatgccattctctagctggatttaatactccggtgcaagcgtccaggttgggagcccccgcagttctctgaggtacttttatctactgtaactctagggcaacaatcctggcttctccactagtgcgtgaacgtctctagcgttaagtttttttctcacctaagtatccccaatactacacagtgatgacccagcgcaaacgaccactctttcaacgcaagcatgaactagctgataaaacttaaaagtggctacaaacgcctgcgcaggagcccttccggcccggggtgagacgcgggtctaaagaaaaggtgggcgggaggtttaaatagctgactgcagtccccggactggctgcgccgctcgccgcatgcgcgcagctagcgggcacggcttcagagggctttctccgcatgcgcgggatcccggatgtggatcaagttggtgggaagcgtgcggtgccgcagcaatggcggcgctcacaattgccacgggtactggcaattggttttcggctttggcgctcggggtgactcttctcaaatgccttctcatccccacatagtaagggactcgcacggccaggggctgggcggggaggccccgcggtcggtcagggcgggagagaaaggtgtggatatccctgggtatgaagagaaaactttaggtcgtgtttgtcgctatcctgcctttgctaagctttctgtttcgccagttgttacttgacttagccccagctggctaggttcagacctggcgctgtctgatttggaacaaatcactttaacgtttctgaacctcagggtcctcatccttaataggcagttaagaacctctgcctccaacagccattcagccagtattatcagatgcctgaggtgccaggtaccgttctaactcccgggagatgcggtggtgagcaagacattgctggtccttgccctcgaagttggtgggtggagctagacaaacaggaacttttcagattgtgataaaggaaatagagggttactaagtggctgtgcgctattcctttagaaggtgatgtttgagttgaaattcaaaaaatgaaaaagaataagtgatgtggaaagcagttcaggcataggaaagagtaagttcaaaggccctgtggcaggaaagaagtcagagcattctaggaacagaaagtgccccttgtggctgcagagcattgagggagaggagtggcacagcatggggtgcactggggacagataacacagggtttcgaagaccacagttagactgctgtgtaaaaaatggatgtagggccaagactgaaagcgtggaaaccaagaagcaaccatgaaatggtggtgtgtatacagtaggtactcagtatttattaatattggcttccgccttcccttcatccttcctcttttttctttttctccctcatcccttttctcctttccctcccacttcctagtttagggtttgttttattggtatcctttgattcaggctcttggtgatctcttgttgaatatgggagagtcatatgtatagaatgtaagtccatactgatgcgtatatgtaatcatgtaagtggaatgtatatgtagattcagtaaaatgattaactgtaggtctgtgcataagattatttcttgctttagttgcctcaggctagaaatgtatcctcagagttgttttttttgtttgttattttttttttttttgagacagtctcgtcccactctgtcacccaggctggagtacagtggcacgatctcagcttactgcaacctctgcctcccgggttcaaacgattctcctgcctcagcctccggagtagctgggattacaggcttgcaccaccgcgccaggctaatttttgtatttttagtagagatggggtttcaccatgatggcggagggctgatctcaaatctcctgacctcaagtgatccacctgcctcggcctcccataatgttgggattacaggcatgagccaccgtgcctggccagagttgttattttgaatactgctcttggtccaggttaagaatgtatatagcgctcactttggcagcacatgtacaggaatacctcattttttgtactttgctttattgcacttcacagatactgcattttcattttttttacaaattgaaggctgcggtaactctccattgagcaactctatcaatgccatttttctaacatcatgtgctcattttgtgtctgtgttacattttggtaaatcttgaaatatttcacactttttcattgct

SEQ ID NO: 1884380 - DNA, 4001 bp, Homo sapiens; identical to SEQ ID NO: 914862

SEQ ID NO: 1884381 - DNA, 4001 bp, Homo sapiens
gtggccacacaaagagtgcaggggagaaggccagcatgttcagacctctgaggttgcattacactgaaggacttggttcattaaaatgttattcaaaacgccatccagcacatgccacatgactcctaggacaaatgcagttgctttcctgtctggctgtcactccacagtgcttgagtgaccccctccagctggaagagccagggacgacatggacctgggcagccgggacttccacagaagggccagcttctgttccctgaatccatggctagggttatgccttgatctcttgttagccaggtttctgaggtcactttgttaccttgtcagagtgatacagtgggcagtatgaattgggccctttagaacatgagaaagtatgtttttcatgatgatgatgatgatgatgacatcatgttaaagatactcagtgtttaccgtgtgccaggcgtgatgctaggggttttagaggcacttaattcttactcaactatatggttgagaatactattattccaattttattaatgagtaaactaaggctcagagagattaataccttgattacagctatgaagctccaacaggtgcagggcttcatgggcgtacgctctattccagaagacttgagctgggaaggtaccacctgcccccacctttctttggccaaagcctggaaaactgaagtgacctctgcaaggccacaccactggaaaatgacagagctggtaaaggccagttcttctgaaccctgctcctttgttcttttcagactggcatactcattgtcacattgtcttgcagtttagagtgtcacagagttttatgtttaaggaacttgttgatggcttgcattgaataaagggcacaacagaactagaaaacctaaaaactagaaagcaagagggaaagttttgagcccactgaggagttagttacactgagatagatccctggaggcctaccatccttcccagggcacggcccctgatttggggatagcacccttcatccagcccactctgggaagactgcgagagttgcaagtattttgtactattccaggaatccttattcatccaggcttgaatcagaagactaagaaaggatgaagaggtaagagtagaaaaatgaccagagaagagaccatccctcttattcacctgagtatacccattgtctaggctgccggaatgtcaacgtcagtttatgcaccatgcgaggctggctgcctgagaatcacctggtgagtgattttaaaatgcagattcctgagctccacttctggaatttctgatcatgagtctgggttaggactcatctctgtatacttctaattgcttcccaagtgattctgattattagcagacttgcagccactacagagaaggctctaacagcatcagacaaatacagtgagactggagagatcaggtggcaattttggccagttaaataaaagacaatggagggttttttgtttgtttgtttttactataactgctgggccactgccaaaaatgatgctgagggtgagtctaacactgagagacaagaggaaatggacttgtgggtaagatctagtatttttatgcagatgaaattttcaataattaccagttcttgtcacacaagaatgctcaattgaaataacatcatgaatggtgtctgaattatctagatcaattctcccgtatgtgttgttttctggtagtcaacagactaagcttcaatcaagctaggtaattatctggataagtgagacaactagtaatagcaaaacccaaatctacagtaacccagacataagtgaactcactaggacaatttaggctgatgcagatggaggagatgaaggaaccagagtacagtatccaaatagtttcatgacagtcttggctcatgcgatactgttacaccaaaagaaaaaaaaaagaaagaaaagaaaaaagaattactgcctacagaggagtaaagaggtagggacaaggctaagtagaagaattctgaggtcattcctcagtgttctagctggaggcttctaaagcattatgagctgtgtggtcaagttcaatactaagaacatggccttagaatgtaaaaatgaatggccacttccaggtatggctgagaagggtgaaaatgcatgcacccacagacacacacacacaccgtggaaatgaggaaaagttacttctctctgttgtaaatttaaatgcagtccagagtagtgaaggccgtttgtaaggtctgctgagctaatggattcataatgacttttaaagcttcactcgggtaagaaatactgttcattttttaattgcatataattatactttttcataatctagggcggcatagcaaaagtaaatctactggcgtaattataaatctttttattatctggaaccctgctgaaataaaagaaaaaagaaacaactattgtttttccaatctagaaaaaaaggatatatttaaaaagatataggctcaatgttaaatgagttatgatgcttttgatgagagaacactgatttgttgcacgtttgacaatcctttgagagcaggctgtttgtggaagtgctagggcattctgacctgcctgtggtccaaactgcttcttttcttgggggagtgggcatttgatgatctgttcaatgagctaaatgagtccattttatccccagagatgggctctgggaaagcctgtagctagaagagtctgaaggttggtagagtaggatagaggaggtggtgaaaagtcagaggaggtaaagtctaatcagatttttatttgtactgggtttctcctaatgattgtcccaaggcccctgtatgaacctgtggctcactcaagttgcccagagtgaccttgggaaagaagacacacctctgagagacacaagatgataacttggcaggaagattcattacattcatggtgataagatttgctataatatcagtttcatataaagtagaaatgctgactcaatcatatagagggaaatagcagcatttgggaggaccaagggcaagtttgggtctaaacaacccagtctgaaggaaggggagatgcttgctcctcacaaaggtaccggtgtgatcctcctagttcacctgtcctttttgtcttacctcacaaatcgaagtgatgcttgcagcctaccagaggagcagcctttctcctggaaacgccacttaaggtggccaggagagtccctgctagcattggaacttgtgaaaataaggtagcctctcagcagcaccatctagaaccctacctgacagaatctgaggcctgtcttctccctagcacagagttccatgatcccttgaaaagacttctccatcagttctggatgccccatgtttaagagaaccaattacttgtctttgatgggggaggacagagcatccagaaagacaaactaattaagcgctcgaaggtggagcagcccattgggcctgatggagatagatgatgttgcccatctcagaagggagagattgcttctggtgaagagaaagcagtttgcaattaacatctacaaatttctctgaactggtttttaccaccctcctctaagtccaatccaacatgcacagacccccacagcagctcaagtctactagaaactaccaatactatccatacattgataacaacaggcatcactgcgggtccgtactatgtgtgcctggcagggcggggctcagctaggagcttccttctcacactgaagctttttccctggcaggtacctaggctgatctttaccctctacctagagactcctgtctcatcctacttgttctgggttccaggctgctgtccttaggcctggtgctgacaaaaactggtgttttaattgttacccactctctggaagaaagctgatctcacatatcctgtagagattttcgtaggtactgtgcatcttgtaatcagtgtgtgttttttctattttatttctataagatacaaaagtggttgt

SEQ ID NO: 1884382 - DNA, 4001 bp, Homo sapiens
tggtctctggaagtgtacgtagcttggagtccttattaacttacctacgactggagagtcaggttaccctgaactcccagtaggaggctgttcaaaatgtgttaaatccctggacaaaagaggtttaaccagtactggcaggatatatgaaaaacaaaaagggaatgcggtttctaatgtatctctgcaacaaatactgtgaagaggcattaaacaggcaattctctgtacatgatgactgcccatctcttaaaagagccgctccctcttcttggtgataatggtgtctcatgaacacagaatagctgtgactgtgagcctggccagcatggcagtggggaagatggagaaggataggacagtggggacactgggcccaggtgggagccctagactgttgcctgggcccaggtgggggccctagactgttgcctcatcctgcagctttcctgcagggccccaagcaagctaacctagaaggatgcatctctaatggaaaggaagagcccagacagatgccatccagggcaatttctcttattaaaatgtcagtgagatgttttataatattttcccacatacagacctgtatatacctctttccaactagaggacaaactttccaggaacaggaattctcatagttattccacatgtctttaagtatccaaaacaggcctttgaacaaaccgagggaataacacatgatagacattgggctgacagccacgaggaaggtcaggagaaagtggcggtgagctgaggtctgcagtgtgcccaaacgccagcctgctccgagcactcgacagccgtacccctcactcctgcaccgggacccagaaccttgcacatcactctcttcgtcccagatctcagaaaaccctgggggcaacacgcagcaaggcttggaagagcaggagagcagggcttggacgctttccgggggagccttgccctcctgtcacttcttggccagccagcagcagaacctggggccggccggcatcctctgtaggctcccgcctccgcgagggtctgggtcacccagctccggctcgccccgctggcggaggtggggggcgggccaggggctcacaggacccagcacttggcaccggaggcttggggagggggctggggactgatggattcggcctccggactccacgcctggcgaagaaacgctggagaggatgccacctgctggcatcccgccggcttgcacggtgggcacaagagacctggagccagcctggatgtgcagaaacccagaattcgggcggttttccaagttgctggctttcggctgtctctgtagggctgccgcctccaccgactgtccagagaccccttcccccgcgcgccgcccccggacgcgaaggcttccagcaggggcggcggtctctctcctctcccctcttgcagcgcactccgaggtctagggactctccgcgcttctccatcaggtggagccgtcggctcctcgccgcctccctcctcctccctcccccggagcgaaccgcgcgcaggcagccttgcagcgccaggaggctaaccgagcccccggaggaggtgaggccgcgggcagccgggcggagatggcggggccgccgtcgaggctggcgccagagcccgaccggctgtgggtcctgcaggtactgctcgcgttctctgccccacgtggtggctgctgaagattgccgtgggttttccggcactcaggcttgatacgcctcctggtccttttagaggcgggcagctcatcacttaatccaagcttttttttttttctttctttctgcgggagaccggaggttacagggagggagtagaggggagtggagaggggaacaggcccagctggctcgttggtgggggtgagggggatgcctggagccagtaagggggccatgaggccagtgttgggggccaatgggagagcgaaacaagatccttccaacctggatctcccaggcccccctcttctttccaagagtcagtgcgagtgtggagtgcagacacctgtacgtgtgcctgattattgcgtattgcacacttcactagccttgtgaccctggttttgtaatagttccctcgggggctgaattaagcaaatctgggccctgggccattgaggaattagcactcaaaattaaacaacagcttaaaggataaatctttagttaaaacgtcaaatgttgctacctttgatagagaatctgcattctagtatttgtcctattccctgcaagaatggcacgcagacacctgaaatttctccccaacaaccccataggcttaatgcaaagctactactaaggtgacggcgctatacatagagttattttcagtcttactgtgttatttggcatatgttatttaaaattatttttcatctcctctgtgtgtttttgatttgcctcttccatttattgcatgatctgttacaccaggctaatggactcaggctcagctgacactgcttcagtaacttgtttgttaatttagctaatgggctgcctcttttgtgtccttttagtttctgttgctcaacatttctgtttctcctcccaaagtttgcttacaaatttccctttgctgtgtttaacagcctctaagggatgcagttaaataaactattaagttaagaatagaaaagtcaacaaagcagacacctactaatttgtagatctttggtgtcaactaccagatgtcagctcctactagcacacttctatatgcccctgcttctttctttcttgttcacaaataccaagggataattttttaaagttaacatccgcatggaaacttggagttggaatgtgccttgtagtgagcagagtcctcaaaagatgtgctactactgaaagaggaaaggctaagagtttcccaaaagacctccccaaggtccagggactgaagacagtaatgactgattttagaattgaatgctaaatggcacatgtcaggggagcgtctttcattttcctctcctctctctttacctctccttctcacagtgcataacgttgaatatttttctgtgttgttttgttatgtccttagagtttgcatcttgtgtgtgtactctgcttgcacactagattatgagcttctgaaggcatggtctgtgcctattattttgcttccctccatggcctgcttataccaagcatgcctaaatgtctattaagtaaatagacccagataaattcatgttgatatcctggaggaaaccgagtttgatttgagtgtggagtgtgaatttcatgacaggtaaaaggcttgaagatccttaggacgcagttgtctatgaccttggcctctcctttgcaattggactcacagcacctcttggagaaaagacaggctcagagtgatggagcgctcattagaggagaggctctgaatgcaaagacaggctgctcccctgtcctcgttaggaaatgcacaaaccaggataatgataataaatgggtgtgtgtcacaagcctacttgccttccctttagttcctgcattttgtcttccaggagcagtgcaaagcaaactaagatccaaatgttcaggttttattacctaccccccccccccaccacaaccacccacccacccacaggaaactctcagaaatgcaaagcatgcttatctcttctccaactccgagcctcccgctgcacacattggccaagtccttccgagggaaagatgcgcacccccccttcctagttccctttcagcccagtttccagttcctttgcaaaggcagggcgtgcatgtttttgtgcacatgcatgtggatagtcatccttaacttcactgttaaacaggacatcgtgtggacaaaaagtcacagctccactccaagctcaagatgccttttggtcaataatggtgacaaaagctgaatttttccctatttagggaaaagaaagaacacagccttttcccccactgtccgttttgcatagatctcctttttccgagtgtttcctcttt

SEQ ID NO: 1884383 - DNA, 4001 bp, Homo sapiens
ttcttgattgttcggatgtggtggggagggagataatggagtcccagatgaccgccaaacctctgacttggtgttaacagaatggtggtgcccttgtctaaaggagagagcacttgagaaggagcaggtttgaggaagatgagctccatttgtttgtttgttttggacagttggcagagctagctgagattttattttgaaaaaaaaaaaaaaaaaagcaacaattgaattgttttgtagctggaagcatggccaatgggggtgccccaggcagtaaactcccccagcaggtgggctgagggctagggctgagcctcaggtgagtctcctgttcctgtgctccactgcacagcggcttcctccacgggccctggggcagccgcaggaggggcaggctggtaggggctgccatggccattcacttgggcaggacatcagaggacttggacactagcttgccatctcgcgtttccaccttcttcacaaccatggacctggagaagctggcgcggctgaaggagctggagcctccaccagtgccaaagctggagcccaggctgtagctaaggcctgttgtagagggcttgtgaggtgcccgtgggtcgagctcagcccacctgagtagccactggtggtcttcagatggacactcatgttctgtatcccagaccccagctagctctcctcgccctccagcagcttcctgtaggtggcgatcttgatgtccagggccagcttgacgttcatcagctcctggtgctccatggcacagctgctgcaccatgtcttgctcggcccgctgcagggcggcctccagctcgacagcttcgtgttggcatccttaacagccagctccccatactgctcagcatctgcgatggcagcctccagggaaaccctctggcctttgaggccctcagtctgagcctggagccggctgatgttcctattaatctcagagatctccatctttgcataacgcaggtcattcctatgcttcccaggcagtgtctgcagctcctcatacttgatctgatgcatgccctcagcctcagcccagctgccattggcgatctccttgtactgcgccttgacctcagggatgatgctgtccatgtccagggagcggctgctgtccatggacagcaccacagatgtgtccgagatctgggactgcagctcccagatttcctcttcatatagctgcctgaggaagttgatctcgtcagtcagcccttccagaagagactccagctctaccttgttcatgttagcttcagccacgttaccttcttgatgaggacaaattcattctccatctctgtacgcttattgatctcatcctcatacttgttcttggagtcctccaccagcctctgcatgttgccaagcttcagcttctcctggcccagagtgtccagctaccgccgaagtttgttgatgtggctctcgaatatgctgtccatgtcgctctgagctgtcttctgctgctgcaggaggctccacttggtctccagcatcttgttctgctgctccagggaccgcaccttctcgatgaaggaggcaaacttgttgtagagggtcttgatctgctccttctcctgggcgcacacagcctggatgttggggttcacctccagcttaagggggctcagcaggttctggctgaccatgatggctgtgatgccccccataccactggccccaccatagcctccacccagagccatgcgggtgcccaggccaccccggaagctgctgctgccgcccacttgagagaagctccaggagctgatatgggcaccaggcccgcttgtgtaggagcggctgcttaaggcctaggggccagaggtggacaccctgtaggacttctgggtcaccctgatggacatggtggaggcagtagtggaggggtgggtgggctgaaccaggcagagattcgagaaagcagagaagcttcttctaggtcatgagcttcgttttgaacatgttcaatcagagggatctagggaagatcaaggtgggatctagggaagatcaaggtggtatctagtaggcaactggatacatgggattgaaccaaggggatgaatccaggctggagattgacattatggaatcaagggaatgagtgaaccatccagagagagggtatagaaagaggactcctagaagatggtggagaaggcatttcctgagaggtaggaggaaaaccaggagtttgccacgatgacaaccaagggtaaggagagtttccaccagggagaagtagtccacatgtcagaggctgctgggggcggggggggagtcaagaaaggtgggcactgaatggtgtcccatgagtgcagagtggcacctgcttatgtgtagttcaggggcacgcatggccggccactaccaggctttcttcagcctcctcaaaggcccacaccagtgtgactgggctggctggactgcctcttcgcacccctgaggcctggttcatggcctctcagcctgtggagaggagacagggagaggaagagggagctttagcctcagtccagggacggtgtctgaggcctttctgagaagtttgtggggacctcagctgcagaatagagggcagcctgcagccagagtagagccaaccaagttcctcctgacaccaaaaacactgacatttggacacagttttcccctggagcttccccctgtggaaattcccggttgtaagccatattgactttaatctcaagtgtcaaaaaggttgcccaggagtctgggagccaacagctgaaagcacgtttgtaaggatgtcagcgcaaacaaaataggatacagaacattttttgagatctgtgccagtggtggacttttctgggaaacatgacaaaagctgacagtcttaggcaaaaaggcgctgattcttgtcattattaatttatgtccttactgaaagatcaagttagggaaaggtaaaggggaagaatagcacatgtgtgatttctttgccaggcacaagggcgctgcaggaggctccccctagagtttaatgggcagctttatgtatttatatgctttaactggagctaaagaggtctgtgccacacaatgggcagtttctagttggattttaaaagaaataactttgatcatttcaaaagcaatgaagcctgatgcagtggagagaaaagaaggcagtaatttatggctaccattaaggacacaaagacaaaggtggagagaacgtttcactaactgaagatttacaaatgtgtaaaaaccacccttatgaccagaaatagctgagtgtctctctcagcaccaaacaaaagggagtgggagggaggcgcagacagaaagagggacgcaacctgcctgccttcactgaaagggtcaaaagaaaaacaactacagaaaagttattttctcagatagctccatcaagcagctgcactagccacagcccaaagaggcaggcccccgtgggcatgttcgggggctggggtggcagacagtgggtactgagggtgcagaggctgggagctctgggctgtggataggccccaagaagacataagagtttttgtgcatgagctaggtggggattttttggtgacatctattttttttctgatctccaaaggaatggtgtgtgtgtgtgtgcgcgcgtgcgtgtgcctgcatatatacatatgtgtatgtatataatcgcaggagaaaattgaataaatacggagaagctcagtgaagaacattactatccctaagtgtgatgtttggttgcgtccggaaattgttactatatttgttcctggagtgatggtgggtgtattgggctccagccatccgtgtcaagtgtgatatgggaagaccctgtgtacctgttcccttgcaaggactgtctttcatggaaggctaggtgctaggccctgcctgtgtttgaagctagccagacctgatgtttatgagttcaggtgatcgtaaatgccacctgtactccggcaaagtcggggctg

SEQ ID NO: 1884384 - DNA, 4001 bp, Homo sapiens
cctcgccgcggccttggcgcctccccggcccctcgcaaggtcctcccgagccccagagacccccgaggcggcgtctacaggcccgggccgggactgacaccgcagccccctccctggtcgcgcctcccacccccgtccacacctgtgccgggaggcggtgcggccgccgagctgagctgagccgagccgacctggtcgggcacccaggcccctgagcccaccgcccaggccggcctctgctgggtgcaaaggcaacgtggaactaaggcggggctgcagaaaaaccaccgtcctccccagggtgccacctccctagtccgccagcctggttaggggcagaacctaacgctctcagtgcttatttgcatgaaaatggctacggggattataacaatcgccgcccagggcactctgccccccagggacagcccaggccctccaggggagccgtattcccctccaaaccgccccctgggagcctccaggagggactaaaggtcgctgcctgccacctgctccagcctggccagtagctgcccagggtataaccagagctcttaggggacaatgggcactcccaggccacaggcagatgctggccacatcccagctgggcagaagacacgcccatcgggctcacctaggcctggcagggggaacaagccaggtgaggcttccccccaggcgacagcccctctatctaacggctaacagctcccatgcctgcgggtcccaggtcctttcaggcctgtgactgcctcctcaaggacctccttcgccccctccgggtctcagcctgaatcctcctgccccctcccagggccaagcctcccccacttttcaaacccagcaaggctgcagcaggcagccctactcacctggccccgcatccgggtccggcacctccagtctcagggtccccctccagccagggcctcccttctcgcagggccctcccgctttggggcgcagccccaaccccaataacccctgggctcccttccgggacagacccactcccgccaaggcgtttgtttgtgctgtgtgccagctctgcgccaggacgcactccaccgccacccccaccccatacgggccactgccgctcccctcaggctggccagggaagggagctgcaagcgcttattaatcgccaacggtgtactcagctctgaggctggcaggaagactgagtatggaaagggggagccccaaaccccgctcagcatcccctgctgcccacagtactccccacccccagccatcaccattggcaccctgagctccgtggtcctggtgcccactgagggttctgcggtcgttgcgccagcttcattttctgtggcccttcattcaaccagcggccgaagcccccttcagagccccagggtgaccctggggggcccaggctggctgggggctcgggggcagaaggcggatccccccacgctccctctccacccggcagcggggagggggccttttagaaatgtctagggtgtctcgtgacaacccccccccgccaaaaaatcattactttcaaaggctcccaggctcctgggcaggggtctttgtccccttcctccaggacagcgaggcctcccccgccctccccctgcagcgcgagtctgacccccttgctcccgcccaacacctgccgaaggtgcaattacccgtgcgttcttcctgccccggactcgccgcgtccccgccgcacgcgcggaggtgttcccacagcggtcggcggggtgcggcccctcaacagcccgcacaggggtcgtcggggcggctttccacggaagcgggagggctgggggtcgtggggggtcggcggcgtcctggggagcccgcccccggagttcgcggatgtgtgacccgaggcagccggctcgcctctgagggtcccaggtccgcccgagtgcagggggatccggctccgtcctgcgggggtcgcggcggggcgagcacagccgctgcaggtaaaacgccgcgcctgggtctggggagggctccccggcggcggcccagcgccaacaaaggccaggagaaggggggagcggcgccggcgcctgtccgggtcggggggaggacttcgcgcccggagccgctcagctggaccgtccggggtctgtgcgacgcggccgggggcccgggtgacggggggcctgggtgacgcggggcccggggccgggagggcttcctggaggcggggtcccggacgccgcgtggtccctttaagagccggtcccggggtgagggcggaaggcggcggcggcgcgacccacccgcaccctgcaccccgccccccccccgcggcagccgcctcagcttcaccccgagcccgggctccgctgacgtcacctgcccccgagccgcgcgcgctgattggctgcaggtgacgtcaggggcttttttcgctcggcatgacctcatccccgccggcggccccgccctccgccccgggcctgtcactcgcggccgagcgcggcggccgagccggctccccccacgacgccccgccggacgccggacgcccgagcccgagcccgagcccgagcccgagccgcgccggaacctcccggccgcgcccgccgagccgcggggctgggatgcgcgccgcgagcgcgcgtgcccgcccgcagtgcgcgcgccccggcccgagcgagcgctccccgcggcgttggcggcggcgacggcggcgacggcgacgcggcccgcgcgctcccccggcccctgccccggctgcgcgggcccccgccgggcccatggacggcgcggccgagcgggcgccctgagcgcggcgcgggtccccggagcgcccccgaggcgagcgcgagcgaggtgagcggaggcgccggcggggcgggggcgggcgccggggatggggttcaccggcccgggccggggggcggagggcgccgcgtcgggggcgctggggcagcggcacccggtgggcgcccgggaggaggaggcggccccggaatgagcggccacggccgtccaggacgccagggacagggaggccccttccccgccccccgcaacgcccggcggacccgggcccagcccacgcccgcccgccgcgttgccgcccttctccccgcagctccttctttgggtgtggaatgggggggggacaaaaatccaggacccaccagggccgcctgagatccagcgcggatctgcgcgagcccccgacgtcccgaacgtcacccccgcgggggccagaaccggagcaggcggaccctggcccggagtcggtccgggaggtgtggagcctcggccgtgggagggacgcgacggcctctggcctgggacacccgggaaggggccttcccctgtcgggggggagggctgcagatccatccccccagtgtccaggccgcactgcctccccatcccggggtgcccagccggcccctgagggataaagcccccgcgcccttccgcctgctgcagaggcagccgcggcgctgggggaggggctggcacagccaggctgctgcagccacctcgctaggcccagctgcccagcctgggatgcggagcagaccaggtggggatacctaatagtctggcctggaggggagggggcaacaataggcccagccccaacagggtcaccccttctgggagaatctgcctccgtctccctgctgcggggtgtaccggcctctgctgaggggaataggggctctggtgctgcagtgatggggggcggggacactgtgggatggaggagggggtggcaggatgtagcgtggctccgcagtgctcttgctgtgcagcttggggtgggggtggggtgctgcaggccagggaagctccttttgtgccccagcggggggtctgaggggagatccaaaccccggcactctcccttgcctcccttctggcacagcccacccagagacactgttgcacctagggcggtccaggggtgaatgtagcaccccaggccccagccctccaccaggaggacagtcccatgcattcactgc

SEQ ID NO: 1884385 - DNA, 4001 bp, Homo sapiens; identical to SEQ ID NO: 914888

SEQ ID NO: 1884386 - DNA, 4001 bp, Homo sapiens
ctggaaccacagatgtgtactgccatgcctggctaatctttttgttttttgtacagagtctcactatgttgcccaggctggtctcgaacgcctgtgctcaagcgatccacccgcctcggcctcccaaaattctgggattacaggcgtgagccaccgcaccctgtcacgaagtttaaaaaaaaaaaaaagctctcttttctttccacgttgtttccagctatttaaagaaacaaaatggtagactagacgcagtggctcacatctgtaatcccagcaatttggaaggccaaggcgggagaatcacttgacgttagagtttgagaccagcctggccaacatggggaaaccccatctctactgaaaatacaaaaattagccgggcgtggtggtgcatgcctgtaatctcagctactagagaggctgaggcaggagaatcgcttgaacccgggaggcagaggttgcaatgagcccagatctcaccactgcactccagcctgggcaacagagcgagactccgtatcaaaaaacaaaacaacaaaacaaaacaaaaaacagtaaagagaatactattgagttaattttacagtttttcacgctgtgggtgttttctattctcgtcttttgcttagctgtcctgtctccctctttttctcaggcaatagtttaggatttttgtaagttatattgtcagtacttctcatttaagttccagacagtgtgctaagcaaagcactttactcggtaaagtaagagctcacttaatcttcaaaataacgtagcaaggtagatatcacgaacatagcaaggtagatatcaccgaagggaaaaccgctccccgaaggtccgaaggtccaaggtctctctgccatctagctgccctgcgtattgcctgccagtgggtagttggagctgggtatctctccaaagctgggctcttggctgccctttgtgaaggcaattttaagggacagcaggatgtggaagcctgcggttaaggagtgagctgagtcactgggtaaccagtgttgaataatgtttctcaatgtctgaaatgacactcacttcctttccagattggtagaggagaaaaaagaggcgcagtgaaagcgctctcaaggtgcggtgggtcagggtgataggcggcgcccggccgctccctgggggtcctgagggcgagaccccggcaggctcccgactccgggagccgggcgggagttcggttttcgccggcgctccacggccaggccacttcggaggcaatctgtggcggggcgggcggacgcgagggccgcctcacccccgcgcgtcttccgggacaccgggccctcgggcgcgcgggaggcgggcttagcacgggcgcaggctgccctcggcgcccgagacacccaggcacagctggaagcttcctccccgttagcacgcgggccgcagcgggggcttgaccccaatgcgaagagtcgggttttctgattggctgagagtagaaacgcaggcgagcgccgcctgagacccgctctgcgattgggttttacacgaacagcagagcacgaaataaagaggccttcagtcattgggccattatgtgaatctccttttggcttctctgcagactgaataagcgtctcaggatcttcgtcatgactcctaaatctgggcctgtcagttcgccccagcgtttctcgtctctaggcacggcatggggcttacagagtttaaccaatcatataacgtcgagatcaggttgccaggcagattatgctaataagaccccgccttttatgctgctcccactctgcggcgggaagaaccacctggaggtggcggggggggttgatttctatcacccctagggagagaggatcggggacccgctgatcttccagctcccctcacccaacgtcgtgtaagtacctaaaggattaagggaaccagataagccagggtccagactaccccatagactgggagggtgtttcgtctttgcttagtcccacccaaaatggcgcccagctctttccgcgtctcagagcccggccggggccaaccgaccgcggacccgggtggggggggaattgatggtggtggtgggggggagaaatcccggcggcaccgcccgatggtacagtccagccggggctgggacgaggcacctcactcggggtggggggtcaaaccatctgcaccttccaaggggaagagggcaaggccccctccagcaggccctcctggcgccgcgttcagcgccggcctcggcgtctcgtcgcccctgccttcgccgcgcgcagcctccccctgcgacccccgagtggctcgcacgctccgccggccgcgcgcacctctcctcccctgcccgcgttggttgggccgggacggcggttgggcggcctgcgcgctccggcggcggcggttgcgcgggcgctccgggcgcggcgggcaggtctccgccggccgggagccgagcaccgggggctgggggccgggcgccgggctgggggtggcagtgcgggcagggctccggggctggccggttgcgggcgcgtggggcggagggtcctgttcgatggggcgcccagctttgtctgcggaggccgcgccgcccacttgccatcgatggctgggcccccggcctgccttcccaagctagcgtccgggaccggggcggggggccggcccgcaggggtgtggggtggcccctgcgggtctgtcccgtggcaccgcgtcggggctggccgggcggaggcggaggccgaggccggggtcgcggccctgccccagtccgcctgcacccagggtgcagcgcagaggcagggcgaggccggtcggcgctcgggagagggctgatggtgtgcacctctccagcccctcgccagcttttgttaagcaggtttaaccctgcagctaggtgttgatactctactaagtaaaatggaatattccccgtctgccctccagccacgcgaacgcagcgctgttgaatttgtgtgcgcgcctttagccttgcttggtggatgagttggattttagtgcattttcaatcaatgtgcgtgtacacttaagcacaaggagaggtggctttgtgctgtcatcgaggattagatgtgtgatgagacccacccagctctgccctgtgccctaattctgctgctttgcctgttgaaaccttgcctgtctcgtcaccccaaattctctaaacttagcagtacttaacctttattaaaaacagcagaatcactcatgactgttttgtggcctctttttctgacctgttctctttgtttctatcactcctccatcgctgtaaggcaagaaggtgtattattacattgtattttttttgtatcttcctaccattccagcatcacaatagcttccactttgatgagcagtacttatttgttgttctagaatagagaaaacaagatttttttttaaaattaggattggttgggggcaaagcagcgtttaaacagtgtttattcaatatggggtatttagaaaggaactttgctaggtttatttaggagacagggtctctggttgcccaggctagagtgcagtggcgcgatcttggctcactgccgactcgacctcccgggctcaagggatcctcctgcttcagcctccctagtagctgggactacaggcgtgcaccaccacgcctggctaatttttctactttttgtagaaacggggtttcatcattttgcccaggatggttacgaactgctgagctcaagcaatcctaccgccgcagcatccctaagtgctgggattgcaggcatgggcccccgcgctcggcctttaggtttacttttacaataaattgaggtgaagttgacacagaatgaaccattttaaagtgaacagggacgtttagtgaaaggattacatttttgtttgttttggatcaagacaaatgtcttgtgccttctaccccgtaagctcccactctgctatgctgttcctcgttttgcaaggcaaaattgttttgctttttcaaa

SEQ ID NO: 1884387 - DNA, 4001 bp, Homo sapiens
aagtgattctcctgcctcagcctcccgagtagctgggattacaggcacgtgccaccacacccggctaatttttgtatttttaatagagatgggttttgccatgttggtaaggctggtttcgaattcctgacctcaggtgatctgcccgcctcagcctcccaaagtgctaggattacaggcgtgagccaccgcgcccggctggaatgagatttttaaaaacaccaggactgagaatccatccacccaaccaagagccaacaaagtagtagttactttaaacattcacttatccatgagactactgaagaaatccaagaggcttggtgatactgacctcactctcagttctatccacaagtagtaaagtactgccaaatacacttagcaatttcaggaaaagacacttgtctccacaacctgttactgaatgcagcatatagaatccattcgattctggaggacaacacactccaaaggatgtttcgttttggaaggagagctgtaggggaaggtacagggggatgcttagcaatgcttcctgagtgactaaatgaacgaagtggatctccctggcccttagtaataatcctatgagattccaggaagaaaattagcttatcttcatagagcaacaacaaaatgattcaatatgaatattgtggttctgaagtttgcttccttcattcttgacttttgccagttgcagaactccaccagtggacaccgaggtagtgggcggccaagagtctgtgaagccagttattcatgcatcaagatttcaaacggtccaaatggaactctggcaatgtaagaactcaggaggggaaaaatatcttgcaagaatctactcttacaaaagaagagtttttgagatttaggaagaatgactgcaggaagtggtgatcagcgctgtgcagttggggttaagctcctctccttcagccttggagcggcaggaaaaggccccaaacactctgaggctgaggcttctctgcccaggaacccaggatcatacaaccgccaggcacagtggccacagagcagcctccaccttaagggaacaattccagacacgacctcattgaatacaccatggaagatgttatcttctttaaaagtaccctcatggcagggcgcagtggctcacgcctacaatcccagcactttgggaggccaaggcgggtggatcacgaggtcaggagatcgagaccatcctggctaacacggtgaaaccccgtctctactaaaaatacaaaaaaattagccaggcatggtggcaggcgcctgtagtcccagctacttgggaggctgaggcaggagaatggcgtgaacctgggaggcagaggttgcagtgagccgagatcgcgccactgcactccagcctgggcgacagagcaagactccatctcaaaaaaaaaaaaaacccttacaaggaaaaaggcaggcaactgccatctcccagtcacgcatccccaggaacttggctgtattatatcctgcctcagagacaaactcatctattgtaggcctggcctggattgctgcctttgaaaacaaggaaaggtcagcagaatatcaaccaaggcatggaatttccagggaggtctcatttcaaaatgtcatcaacaagaaccacatggacctctgtgagagggatgattaaactagcctgagtttgaatgaaaggattatgtgtacccaacctgtaacaaacaccaaggaggtaaagtggcagagggtcttgtatgagcaacagccctttcctgataactttgtggaccggcggttcctggaagagctctggaaaaacatccatgctcggaaataccaatattgggctatggtatttgagtccagtgtggtgatcccgcagctgtgcagtgtttttgtttttctggttatctggtggtatatggatgagggtcttctggccccccaatggctttttgggactggcctggcttcttcactgattgggtatgttttgtttgatctcactgatggaggtgaagggcagaagagtgggtggacccggtgggctgacctgaagagtgccctagtcttcattactttcacttatggcttttcaccagtgctaagaccctgacagagtctgtcagcactgacaccatctatgccatgtcagtcttcatgctggtaggccacctcatcttttttaactatggtgccaatgatgcctttgtatccactgtatccagcacactatccttgaacatggccatctttgcttctggatgcttggcttccaccttccccagtccctgcatgtcttcatcatgggaacacttgccatccagatttttgtcctgtggctcatgctacagaagaaactaaaggcacggactcccaagggctatgtggtggtcacactgctttttgccttttcggtcttggaaggcctactgcctattagtgctgtgggagccgtactctttgcccttctgttgatttctatctcatgtctctgtccattttacctcattcgcctgcagctttttaaagaaaatattcagaggccttgggatgaagctgaaatcaaggaagacttgtctaggttcctcagctaaattagggacattctgatagactagcctcctaactagtataaaacttaaagacaggccgggtgtggtggctcacgactgtaatcacagcactctgggaggcccgaggcggatggatcacgaggtcaagagttcgagaccagcctggccaacatggtgaaaccccgtctctactaagaatccaaaaattagccgggcatggtggcgcgtgcctgtaatcccagctattcaggaggctgaggcaggagaatcgcttgaaaccgggagatggaggttgcagtaagctgagatcgcgccaccacactccagcctgggtgacagagcaagactccgtcttgaaaaaataaaaaatgaaccaaaggcttgggtggtgagggtgcttatcctttctgtaattctgtggatgaaaaagctttctgggaccctcttgaattattcgctgtaacaaatgaagtgatgtggtttctattaaaaaaataataatgcattcaaacaaacaaaaataaataaatatgaataaaagtaccctcacaaaatgcagccagtctgccagattacagtgacccagattctccagtctcctgcctgggacccaaaaagatacatctggctctacttttttttgttaaggagagacagggtctggctctgtcacccaggctggagtacagtggcatgatcatagttcactgcagcctcaaactcctgggcacaagtgatccttttgcctcagcctcagcttgtagctgggagtacaactgtgtgccaccacaacaggctaattttttttgtattttttgtagagacatgatctcactatgttgcctaggctggacttgaaatcctgggttcagatgatgctcctgccttggcattccaaagtactgggattatagtgtaagccaccatgcccagccctgttttttgttttgtttttttaatttatcacatcattatagattagaaccaacatcagtgctgatctgcatacatgtaatttctacctgagtttctatagccagatccaagtccttgtataaaccctgggaccatcagcaatctcaaaaatcctgaaagcagaatgtattctgactctaccaggtctgaaatccttctcatggagtatctgatttcctccccatcagtcctattggaatacctacccaactgcttcttcaagtcttccttcaaaacacaaaatcactgcacttccttacaaagaaggatcagagaaaacagctgcttgcagtaaaatgtagcccttccccctggttgtgcaggagtggctgctggccttcctggagtctttctgaaatggcttccaagtttcttttcttttttctttttttgagacagagtctcactctgttgcccaggctggaatgtagtggtgctatctcagctcactgcagcctc

SEQ ID NO: 1884388 - DNA, 4001 bp, Homo sapiens
tacacatgaacacgaagaaaggaacaatagacactaggccctacgtgatggtggatggtgggaggaggtgaagatagaaaatctacctattgggctgggcgcggtggctcactcctgtaatcccagcactttgggcgaccgaggcagggaaatcatgaggacaggagttcaagaccagcctggccaacatggtgaaaccccatctctactaagagtacaaaaaattagttgggcatggtggcaggcatctgtaatcccagctacttgggaggctgaggcaggagaatcgcttgaacccaggaggtgaggattgcagtgagctgagattgtgccactgcactccagctggggtgacagtgtgagattctgtctcaaaaaaaaaaaaaaatggaaatctacccttcaagtactatgcttattacctgggtaataaaataatctgtataccaaacccctatgacatggagtttacccatgtaacaaacctggacatgttaaaataaaagttggaaagaaaaaaaaatctttcaatggctccttgttgtcttcgggccacagtacacatttctttgtgtggcacattggagccaggtatatttggcctatgcttcttttccccacacagcactccatccattcctgaccgctgacatttccactaccatgtgatatttaagtaccttacgatttttaagtgccttcccatatacatcattgctgctgcaaaatctcacaatgtcacagtatctggctctagcaatgagtttgcacattgttggaaaacaataattgcttgcagaatcctttctatccattttgggtatcttgtgccttgagttttgcattagagattatataaacagaaactcatattttggatgataggaatggttgatttccaagaacagtgattttccaagagtttccctgattgtgtattccctttcctggctgatgtgttaccaggaaatgcatgatacattaccacattacgtataaatgggtagatttgtttatgccagtcatgaaacatgtttgggaagttcagccttagagcataggttctctggcatttattgaattagttttgggcagccttggaaggttaccccaaagacacatactgtctttctccatagcagatgaacccaaggagatagaacagacttgactgagacatgcggcaggtactaaaaagtcttgagaaagcaaacctcggtttcaatgttaaggatcaaattgaatttatacacgcagacaatatgaatttcaagaggcgattctcagaagagccacttttcacacgaggactctgtggcctgctccagaggagcagcagcagaatctacttatataatcctggttaaggattctccctactaaagctttgtaggtcagccaggaaagggaatacacacaatcagggaaactcttaagttactgttcttggaaatcaaccattcctatcatccaaaatatgagtttctgtttatatgatctctagcgcaaaacccaaggcgcatctcctaagctaaaaagaatatagaaagatggtaaaagatggaaagtaagagtcattattgccacaaccatgaccctgggatccccaattcactacactatctccatattctcctcctgtgaattagccaatttatttttacatgagaggatgctgggtgtgtcaaacaggtcacttattgaaaacacacattggaagaaaaggtattgaaagaaatacgtgaaaagtgccacagagtattaattaaggctctttccaactggaagtggtttggaaaacactgtgactatggggtcgtggggaacacctgaccctcagcaggtgctagttttattcccagcgccagtgcaaatccaaccagggatccctacactcacgcgtgggccaacagagtgtgatctggcagtcaacttcctcaatttggggcctggcagccccgggagcccggtgggcgcttcctcggtggcgcccctcaccctgcctcgcggggttctaacgtccaagagcggggctgtccgagagacccgcgcggacacctgaggcgcggtggggctcccatggctccgcggagcctgcaggctcccaagacgagggtggggtggcggctgacaacaatgctgccctttgctggctgtgtgggcatcatcctctgtccctgggcctggcacacccaggaggaagaggctgtgcttgatctgtcggcggactgatcacgtggtggccccactgctaaccccagacacacccccgcttagaagcagcatcgttgtcagaagctcgttgccacttagaatcctctgcaagatgtggtgggtacagcactgcacttaactcctttggtccttagtttattattttgtagagtggagatgatacccgctcaggtacctcatacgcttatactgcagaactttgaaaaccaaagatgttttacaaacacattccactgcgattacaaacatattccactgcaataaccgggtgcatatatgtccgtcatgctgaacctgacagtttgagttgtatattcagtgtttaacaactatcctcaacacatagtaggaataaatgaatgattgcaaggttttgtctaatttattaaagtgttagcatcagctggctaatgagtaatagatgacagtcatgtttgttgaactcttttatgtttgccgtttttatgattaatgaatttagcaaatttccactgagtgccagtatgtgctaggcattgttctcaatgctggggatactgtagtgaacaaaacagatgaaattctaataataaggaaaacaataataagattcataaggaaaatttatagcatgttaagaataatgagagctaaggagaataataaagtatgaaagggaggtggcgtcaatggaaatgtaaatgaggggagtcaggaaagtcctcattacaaaaaaaacttgcacacaaatgttcataggagcattcttatatattcctaatagccaaaaatgaaaacaacccaaatccctatcaactcatgaatgaacaaacaatatttggtatatccatataatgtattatttgataatgaaacacaacaaagttatagtttatgctacagcatgaataagccttggaatcattacggtaagtgaaagaagcaagtcacaaaagacgttcatataaaatagccctggtaggcaaatccacagagacagaaagtagaccagtgatttgctaatactgaggtaagtgggtggagaataagaattactcctaatgggtttgggtccaaaattaggtggtgttacttacacaactctgtgaatatactaaaagccactaaactatatactttaaataggtaaatttcaggctgggcacagtcgctcacgcctgtaatcccagcactttgggaggcggaggcgggcagatcacgaggtcaggagatcaagaccatcctggctctactaaaaatacaaaaaattagtcaggcatggtggcgggtgcctgtagtcccagctacttgggaggctgaggcaggagaatggtgtgaacccaggaggcatagctttcactgagctgagattgcgccactgcactccagcctgggcaacagagcgagaccccatctcaaaaacaaacaaagaaacaaaaaaacccacaaataaataggtaaattttataatatgtgaattatatctcaatgaaactgttacaaaaatgaaaggcaagatgtgtgctttatctctttacttatgaaattttgaaataatgaacaccctccaagggtgactatgattctttttctttttttttttatgggggaaggagagattggccttttaaatttttatgtatttgctttgttgaccagtgcatggtccatatagtgtcactgacttcctctccctagaatataagctccctgaaggcaggatcttgtctcttctgtttaaatctgttgccagaagcaagaattatgcctggtgcaaagtagattgt

SEQ ID NO: 1884389 - DNA, 4001 bp, Homo sapiens
tgtggctggggtttgtctcacagtggaggcaaggaattgcaacttttttctattattgtacaccttgaaggtgaggttaattaaatcctgttgtggggtttgagggccggaatttaatttttggagttttatttaatgtcaggagcagattgacattattttgagaataagacggccttttgagcttttagggtctagggctgtaaagtgtctcagggttgctgccaaacaagtcatgaactgagctggattattatatttgatgaaaaagagcctaaacgctatctgatttgggataaagaaaaaggagcattaaccttgactatgcctttagctccagccacctttttaagagtaaattgccgggcaggagggggaaggctactcacggaacgaaactgtaagctggaccaggtgtgaggagaggaggtgataaaaagattatagggtggaggagcagaggctgaggaagaattgggacctagctcggcctggcgaggagcagcctggggaggaagggagaggtcagatgggtctgtagaaaaggaagattagaaagactcagcgacgcttggtgttgggactgaggggacaggcgggagggaaagagggaagatttgggacgagttgcactgggcacagagactgggaagggactgatgtgtaaaagaatgcctggatgtcaggcacctcagaccatttgcctattttatgacaagaattatttagatcttgtaggatggaaaaagtcaaagtgccattttctggctatttggaactgctgttgagtttgtattggggtcaggcggcattgcagaagaaaataaggcatttaggttttatgtcaggtgtgagttgaagaggttttaagtttttgagaacacaggccaagggagtagaaggaggaatggagggtggaaggttgcctatagtgaaggaagcaagcctagagaagagagtagagaaacagagggaagaggtttgggggttcttaccttccagaaaagtggaaaaaggggttggggcacagagataaggggttggggcacggaaataagggatggggcacagaaataagggatggggcatggaaataagggatgaggcgtggaaataaggggtaggggcacagaaataaggggtcggggcacagaaataagggattggggtgcagagatacgaggttggggtacttgcccctcctctagaaaagtgggacttgccactaagagtgaaggagaaggggttgaagggtacttgcccctcccccagaaaagcgggacttgccgctaagggtgaaggagaaggggttgaggggtacttgcccctcccccagaaaagcagagaaggggtagagacaaggagagaaggggttggggtacttgcccctttcccagaaaagcgggacctgccgctaagggtgaaggaccaaggcaggcatccctgcatggtctgacacctttgaaacgtgggtgaataatcaggcgtccctgcaatgattaaacaccaagggaaggctgccttcccagtccgtgaccggtgctggagttttggatccacagataaaacgtgtctcctttgtctctcccagaaaatgaaaggaattgaaattaagagaagggagagattgaagagtggaaaggagaaagtggttgagggacagtgagagaggttggagaagagagtaagaagaggccgcttacctgatttaaaattggtgagatgttcgttgggctggtcggtctgaggacctgaggtcgtaggtggatctttctcacggagcaaagaacaggaggacaggggattgatctcccaagggaggacccccgatccgagtcacggcaccaaatttcatgtgtgtccgtgtgaagagaccaccaaacaggctttgtgtgagcaataaagcttttaatcacctgggtgcaggtgggctgagtctgaaaagagagtcagcaaagggagataggggtggggcaatttataggatttgggtaggtaagggaaaattacagtcaaaggggggttgttctctggcaggcaggagtgggggtcgcaaggtgctcagtgggggtgctttttgagccaggatgagccaggaaaaggactttcacaaggtaatgtcatcacttaaggcaaggactggccatttacacttcttttgtggtggaatgtcatcagttaaggtggggcagggcatattcacttcttttgtgattcttcagttacttcaggccatctgggcgtatatgtgcaagtcacaggggatgtgatggcttggcttgggctcagaggcctggcaattattagcctcatttcacatgaggacaccagggttagggggcgggctggaccaagatctatgtggagagcagagttcaacccaaaatgcatgctttttatcactatatttagagatagacacacctggtttcaatccttgaggttgccactagctatgtgatttttgaataatcattctgaatcttagtttccacatctgtaaatgaagataaaaatacctttccaattaaaaatgattttaaactaggcaacttaggcaaattattcttttccttcatgtacctgggctttcccgcctcatctaagcacacttgttctttctaatgctccctgactgtaaccaaaacctccagagcccttcatccatcctctgattgccatgaattgccaacatcagataaatagtttaaaaagtggcaagaaagtaggatttcaagtcagaagacttggatttgaatcttgcttcagctttgtattaattgttatcattctgaatcatagtttccccatctgaaaaataagatgtggagttgttattattggtggtggtctgttctaagcattaaatgaagaaatgcatgtcaaaccttctgaaaactcagacaccaaacacttggaaaggagtctgttacagtctcaccaatgcaccacaatgtagcagtctctccttgtgaggtatcacccaagaccaagagaattaaggagtatggacccaaagggtgaggtcggagtgaaagtttaataagtgaatgaagaaagctctctgttgcagaaaggggacctggaagaggattgctgtttttcacagttgaatgcaaaggcttttataggaaactgatgagggctgggcattttgtttgcataaggcatgtttttctggtagctccaccccatcctcctaaggtgcatgtgggcccttagcttgagttacccatattgctttgttgcccttattatgcatgtgtcaggggatgaaattttccactgctggcatgtctgggcaagtcacctgtgtagcctttcttatctgtgcagctgtgggcatgtcttaggcaagtcccccagtgtaagttcccttatctgtgcctgcaggctgttcttttgtttctaaaaattcaatccagggcccatcctaactgcctgcctgaccggtttctttctttttcctctctcaattcttattaaggcagaaaaattctagaatgactttttgtcctatagccttgttcccagaatgctttggaaatgtaacagccaatttatcaagacaggggaattgcaatagagaaagagtacttaatgcagagcaaagagaaaaaagataaagttcttttaaatatatatagcttggatattcatgtttaattaagcaaattttaaccatagagctcttttgtttaaagaaaatctcttttaaatctcttattaccagactctagtcaggacagccaatatttctggcctttgaattctaccccaggtaaccgcccacatgaaattagtaagttttaattaaggttataacttaaccatggatacaaaaggtgttttaaagagatggtaagcagctttttttttttaaaaacaagatttagaatatccccaaaggtagtacagtgaaaggaaaattcaagacaggaaatcagaagctatctatggggtgaaaaaaaaaaaacctcaataaatggcaaagttccaca

SEQ ID NO: 1884390 - DNA, 4001 bp, Homo sapiens
aagagccttttcttcctaggacctttgacaaattctggcagtgtccacggcactgtaaaacaaaacaagagaaaattcaagctcatgctgccagttcagtttatttcggtttctccttttctgcaggcatcaggtacattatagacaggaaaattgcatttcagaaacagcacctgtcagagctaggcaggcaacacccccagcccccgtcagcaccaaatgcttttaattaactttggacacttccgtgcctcgcactttatttctgaatgttattgaaagttgtcagaacttgtctcactttttttcttttattattaatgtgtaaatacaatgcctcaggagtgttactaaaacacagaatctaatcccaggagattaatttatgaacgcagcatagggtgaagttgcatcctggagactgcaaattgatgttggtaagagccacaagcatcggcctctccaaacccacggggatccagaaggccgaggggagtggaggcaaggagggatggtggggggagaacgactctgccgatttttgagacacccccaggaaataggaccttaggttcctcttggtggggcagatgagagtaaggctacctttctctcctgatggggcagtgtcccctgcaagtccatccattagccaagtccatgggcatttattgagcacttatgccacatcaatctatgctcggctctgtgggaatcaaaacaagcaaagcagtagttactgcttgtgatgaccttatctctgtgggggtggcggggggagtcaaacaggcatttgaaactattggagaacaaagccagactcaagcaagtatgggattgtgtgcagcagattttaagtgcacagttctggtggataggagagtcggtgtggactgcagtggtcaagttaagtctggagcagaggagttgctgggtggatatgctaatctcaagcataaggcaggggagttaaggatggggcgcccagggtcctttgtgcggagcagggcagcttggctacggtcatctttatttcctcgaaggccagacaatctgcggggaacgtggggagggctcatctgtttagaagctgtgctttaggcaagcttgagaaaacatctgtccatccttgtccaaagtgggtagctaaggacccctggcagagaatcacccatcttgggagctctgagcaccaaggaggaaagccctccgaatttgagcggtggttctcaatgggaaagagaaaaggagtttgcccatagccaaggggagaagctggagcagggttaacctgcggcttggggttcagttgagcaggctgggcgcccggcatgggaggtagaggtagggaagctgggccttcccttcgtcttttctgcgaccagggacgggtggcacctcgtggtccgcaggaatacctgtgtggagggctggggtttggctcctgccggctcctggagtatgctgggggtccaccccccgcctccctgcgtccccttctccagcctcgcctccccaatgcgcttcccgcctctgcatcgccgccggccccttcacgcctctaccttgggcgggtttggggtaagggccgcgcagaccctaagggaaggcccgaggtcgccggagctcctcctctcgcggctgagtgagggtctgggaggccagatgaagggagctgctcggctgagctgcggaccagcgcgagagcagcgggcagtggcggaccagcgccagggcagggcaggggtggacagagggctctccccacccttccctcctccagtgaaagtaccagaagagatggcggccgctccgccgagtgtcattaccgcggaagcagcagaagccggcggcaggagcgggcccgagagcccgcggccagtggcctgcgcaccccgcgcccagcgcccccgccgcgggtcatcagtgtcagcgttgaggggtcccggggagcggttgcagggcggcggcggcggccgggtcatcagaagcacagtggagccgccccctgctttgggaggagcaaaagagcctctcgcttgcctcccgctcgagctccttctcctcttccttttcctagcgcttctctccctccctcggcggggtccgcagagacagctgggcaggcggaggctgcgcgcctctcgcacctccacgcccaccctcccgccgcccccccctcggcctgaaagatctgcgtccacaccaccctgcacccagggcccgtcaggttttgcagaagtttgctgagggtcctcacagggggtctcccaggggaaggggtggagggctggaggggccgcggtgggaagaggtggcagacgccgcctggcaacggagaccctaccctttctagaaattcagaacgcagagaaaccagtgcccagccctgctcttcagcaaacggtgtatttcagcccgagtttccttccgggggtttggctgtgagtgtgtgtgacctcccagatggcggcacggttcagatcccatgctccctctgtttcacagctgccagagacagactcagggattccgggctttggaagaaggtcagaccatgacctcctatctcctgttctcttctcccctcactcatcacccgctggccaccccactctctgcaccccaccatgcatgcttactgtagacctaatcactaattagcccaagggttgactgagcgtgctggtgagagtaacaggaggcaggtggatggggaggtgtgatgctgcgcgcatagtaggtgctgaaaacatgcaagggcacgatgcacataagctagacagagcccttggtcctgctgggtgctgggggagtgagattcagagcagcagaccatcagccgggtagacagaggtcatggccccagcagctcagccccattagctaggctggtgggaggcagccagtgcttttgagggctcagacaatccctgcgattcaagggctgctctttggagctgctgccaaactaatctcaggcctgcagtcttgggcctttcctttagtctcagcccacttgctgactctgcccttcagaggaggcccactgcctcctcctggggctgaggattaacccctaaaaactgagttttgtttgcagagctatctccaaagctgagggagcctctggagtctcctgttcttgctgcttgttgactagggggatccttgaggtcagatggtgctggcagcagctcagcccctagccccagacacatattcagtctgcaaatacagcaggaaatctttctcacctggcccagccatcagtcctggcttgcccagccctgcagggcactgcctagtaggccttttcctacaagctcagccccacccagctacggagcctgccctaattgggctaggagggcactagcacctcccttttactggtaggggaagtgctgtactcagatgtctgcccacagattcaggatccagtatgtttgtggcaaacacccttcccttgatcaccactaaagtggttccattcctagtgctgggactctgccttagtttcctaattagcactacagccccctgagctccagtcccatctgactgagatactggcctcctcttgggccctttcccacccacatcccagggagtggagcctgttcctcttggcttcaggacactactgagatcatggtttgccaggctgctcattcacagccacagctgtgttgcttttctgcctttgagggtctttgctgccagccccccactaattgttggcctcccctttccccatgggtaccaactgcatgctgagtcaagctgaagatcccctgctctactaactcagtctgccccctatagcctgtcaggctccctgtactgtctctgcatcttctctggcttgatggagagcaaggaacaacagtgagctttacagttccttctctatttatgtattctgcattatagccctctagatttcgaacccctcacctgggctgagtaccttacctttcagtagccctgatagatga

SEQ ID NO: 1884391 - DNA, 4001 bp, Homo sapiens
gggattaaattagatgatgggtgcaaagtgcctagtactgtggttaatggttgacaagtgcccaataagtattagtattaaattgctttttaaaaatttcaaataaaatttgtttgtaggctagaaagtacaagtacactatattaaaaaatatttctgttaaaaaggaattaacttggtatcaaaattaggcaagaacccattttatttataactacatttaaaattctaaaactggtcgggcacagtggttcacacttgtaatcccagcactttgggagactgaggtgggtagatcactagagatcaggagttcaagaccagcctggccaacatagtgaaaccccgtctctactaaaaatacaaaaaattagccgggcgtggtggtgtgcgcctgtaatctcagctcttgtgatgctgaggcaggagaatcgcttgcacccaggagatggaggttgcagtgagccaagatcgcactactgcactccagcctgggtgacaaagtgagactctgtcaataaataaataaaattctaaaacaaagagaatccaataatcaattatctctctccccctctctctccatatgtatcataactaacagatttattccaataattctcatcaaaatttttcttttgagatggtgtcactctgttacccaggctagagtgcagtggtatgaacatagttcactacagcctcaacctcctggcctcaagagatcctcttggctcagcctcccatgtagctgggaccacaggtgtgcaccatcacacctggctaattttaaaaaagtttttatagagatgaggtttcactgtattgcccaggctggtctcgaactccttacctcaagcaatcctccctcagcctcccaaagtgctgggattacaggcatgaggcactgcatctggcctaaaataaacaaacaaacaaacaaacagtgattgatttagtaaacattatctttttctctggaaaactgagttacatggatttcacaaggttactgactttcaatgtatggctaaaattggtggtagattaatttatggacatgctagtaacaaaatagaatttaataatctgtttcatcctctaagtatttctgacattttgttgttgttgctcattagtccctggctacaaataaccacaaactccctagttaagatgatgtcaggactctcagactagggaaaaaagccacattctggttgtaaatgaaaatttaacggagaataagatatttgaaagagaaaatcattgttttgagaaaggaacaaagaagccagacaaggtataaactttaccaaatgttcaaaaaattcatttaatatcgggctttataattcatgaagtttcttttcttttggctgccaacttatctaattacaattctagattgacagcaaaaatatttaatattctctgaggaaatacccaactcaggtgagacaaggacagagcaatgaaatggaagaaaactgtgagaaaccagggagactgtattagtccgttttcacactgctataaaggactacctgagggccaggcatgttggctcacgcctgtaatctcagtactttgggaggccgaggcgggtggaccagctgagatcaggagttggagacgagcctggccaacctggtgaaatcccatctctactaaaaatacaaaaattagctgggcatagtgtcgggcgcctgtaatcccagctactcgggaggctgaggcaggagaatcacttgaactcgggaggcggcggttgcactgagccgggatcacgccattgcactccagcctgggaaacagatgagactccgtctccaaaaaaaaaaaaaaaaaaaaagaactacccgagacggagtagtttataaagaaaggaggtttaattaactcaccgttccgcatggctggggaggcctcaggaaactgcagagggtgagagggaagcaagcagtttcttcacaatgcagcaggagagagagagagagtgaggtaggaagtgccacacttttaagccgtcagatctcgtgagaactcactcatcatcacgagaacagcatggggcaaaccgcaccacgattgagtcacctcccaccaggtccctccctaacatgtggggattataattcaagataacatttgggtagggacgcagagccaaaccatatcagagacaatccacgagggccatgaggtcggctcagccctgatgtactctggaaatcctggaatcaatgtgcccatagagggatgtgtgacagggaggagggatcctagagggtcatgatatgacctggaggcaatgagatcaaattcctggtcctgctaagcccccaaatcgtaagagtttacatgctttcaggtatttctggactgtgctttttaacgtctcaaaacctttttacatacatcacctcatttgagcctgatacagactagtgagctaggtgagggctggttcttctctatctaggtgaggaaagtgacaatcgggaagagaaaggacaaaaaccactgcatgttaatggaaataaatgacaaggagaaacaaaacaaaggcaaggactccatggtgatgaaagaaaggcacattgcccaggaagggaagtggaggccatggccccacttctgctcctgaccccaaccaggagaccaccaagttgaacccaagggtgtggctgaagatgtgcctggtcttctaagatgtttgctgtccaactgctggtgttgaacctccactcctcctagttccttaatcatgtagataagtctatttacatcctccactaataccaacttttacagtggaacggggtaaagccctaaaaagtatttgttactgtaatgtaccatatagtggtaattattattataagaaagtaacttgtaaactgccaagtgctatacaaatgtccattatcattattatgatgatgattagataatgatcatgttggtttttctccaacccaaggagtgctcattcagtcccatcttttcttcttcaatttcagtagcttccctatccaaagccaaacaaattttagtgttcttaataccctcagtatggtagcttgttaatgtctcttaaaagctcaaataatttatgcttactttttaaactttcttcttataacacagcttcccctcccttccctccctgtcccccaaagccagaaactctagtgggctagagaaatctccaactggcagagcttttagaaatagagttaggcgacggggtgtggtggctcacgcctgtaatcccagcactgtggggggccaaaccgggggggggcgggtgtggatcacttgaggtcaggagttcaagactagcctggccaacatcgtgaaaccctgtctctactaaaaatataaaaattagccgggtgtggtggtgtgtacctgtagttccagctactcaggaggctgaggcaggagaatcgcttgaacccgggaagcggcggttgcagtgagccgagattgcaccgctgcactccagcctaggcgacagaatgagacttcgtctcaaaaaaaaaaaaaaaaatagaaacagagttagcctcacagagtcacagaagtggaaggacatggaagtgaacagatgacagtactcagacccacagtgatcacagtggtcacttccccaggatcacagtggggcagctgcagtcatgagtgaaagtcagcacttccagcacccggcctagcgctctttgcactgagcagggctctctgatgtgattttcctttgcctccaatgtcaaaatcccaggcttctgagattttattcttgttcatagtttccccagtatggttccacatagggggttgatcataatcctgaaagacccatcccaaatattgaaatcctgaaagatcaaaatcccaaaaatataattctggaaaaaataagaagaaattatctttaaaacatttatttacatttttaagggagatttatttgagaaccatataaaaactgacag

SEQ ID NO: 1884392 - DNA, 4001 bp, Homo sapiens
aagcggggcttgggaaggccgccgggaggcatgagctgggctgggccgaaagaggccactgggaggcaggaggagctgggcctggagaggctgccaaaaggcaggagcttcgcctgaggatgccacagtgagacaccatctgggtctggagggtccactgtgaggcagaggctgacctgtagagtccgacagtagacagaagttgggcaaaagcctgatttgaggaagttttgggcttcaagagtcagccacgaggcaggcactaggcctggaaatggcctcacagtcatgagttgggcctaaatgggccactgtgagggaggagctgtgcctgttgaggctgctggcaggcaggcagaaatttggcctggggcagctgccatgaggcaagagctgggcctggaaaaagcccctgggaggcaagagcagggcctgcagaggctgttctcaagtcaaagctgggcctgttgatgccaccgggaagcagaaggtgggcctggagagtttgacttgaggaagttttgggcctacattggccgccatgagctggacaggaactgggccaaaaaaggctgttgtgaggcagcagttgtgcctgtagacccagccaagaggaagaggtgggtctggagaagcccccatgaggcagaggttgggcctgtagacgctgacaggaggcaggagctgggcctggacaggtcaacttgaggagattttgggccttcataggccaccaggaggcagtagttgggactagagagtctgacttgagtaagttttgggcccggagatgacgtcctgggacaggagttgggcgtggagaggccaccgtgaggcataagctggatgtagagaggccagtgtgaggcaagacctgggcctgtctaggctgctgggagacaggcaggaatctggccagggaaggttgccatgagacaaaagttgggcctggaaaggcccttgtgaagcatgagcttggcctaaagaggccactgggtggcaggagctgggtgtgtagaagctgctgaaaggttgggagcttggcttggggggtccacagtgaggtagatgctgggcgtgaagaatctgctgtgaggcagacgttgggactgtagaggctgacgggaggcagaggctgggcctggaggggccaccaagatgcaggagctgggcctggagaggctgcaaagaagcatgacctgggcctggtgaggtcgacttgagaaagttcagggcctggagagaaggctgggaggcaggagctgggtctaaagaggccattgtaacgatggagctgtgcctgtggaggctgttgtgaggcagtagcctcatctgtggaggctgccgtgacgtagggtatgggcctaaataggccattgtgagtcatgatcttggtctgtagaggctgactggagaaagttctgggcctggagaggctgccgggaggtaggagctgggccaaaagatgtaagcacatttgcatttattaggcactttatttccattattacactgtaatatataataaaataatcatagaactcaccataatgtagaatcagtgggcgtgttaagcttgttttcctgcaactggatggtcccacctgagcgtgatgggagaaagtaacagatcaataggtattagattctcataaggacggcgcaaccttgatccctcacatgcacggttcacaacagggtgcgttctcctatgagaatctaacgctgctgctcatctgagaaggtggagctcaggcgggaatgtgagcaaaggggagtggctgtaaatacagacgaagcttccctcactccctcactcgacaccgctcacctcctgctgtgtggctccttgcggctccatggctcaggggttggggacccctgctcaagtgcatccaaagcgacccttcccacaccagtcttcacagtggtcaagggcagcaaccacttagctcccaaggcatgtgcctcagctggcatttcgtcacaatcaacagtaagtggtagcttgagtcactgtgaggtcacctactggaaatcaccagcatcccatttcccactggcaaagagctcagcgctgccccctgggaaaccaaacctatgcccaaatcccatctgtgtgggtgtatctcctgggacccttcctaacatattagtcagagtccaatcaggaagcataaaccactcaaaagtttaaagtggtaaaatttaatacagagaattattcattataacaggtgaacagcataatgagagattggctagcacaaagtaaagagaactctagagaatataggactagcccaggccaggcatggtggctcaggcctgaaattccagcaatttgagaagctaatgcaggaggattgcttaaggccaggagctagagaccggtctggacaacagagtgagaccctgtctctatccaaaagaagaaaaaagttagctggtggtggtagtgcacacttgcagtcccagctactcggaatgcggaagtttgagcctgggaggtcaaggctgcagtgaggcatgattatgccactacagtccagcctggtgacagagcaagaccctgtctcaaagaacaaaacaacaacaaccatttacagacagaaaagaaatagagctaataagctgaggaaagatgttgaaatgtgacaagtaaagtaacatgaggtcttttgtctatttaaaataatcaaacaaaaaatgacttactaaattataataccctgtgctggcaaaggtgcagtgaaatgggcactttcttatactatgagaggtggttaaattgtgtataagccttcccgggtaaagcctgtcaattttttaaaataatggagacagggtctcaccatactgccatactgcctcctccaactcttggcctcaagcaatcctcctctcttagcctcccaaagtgctaagattatagctgggaggcacccaaaaccctgtcaatttacatcaagggtaaggagaatgtccattcaccatgactcacagtaatcttacttctggggagacaattcagtctaaacaaaaggtcatctgtacacacacagtaaaaatctgggagtaactgaagacagagttggtaagtgaaataagaaacagttataagaaattaaactatggtatcaataggcacctggtacaaaaggtcagttgatgttggctgctacttttttgttgttttgagacagggtctcactctgtcacccaggctggagtgcagaggcctgatcatgactcactgcagtctcagcctccctgggctcaagtgatcctcccacctcagcctcccaagtagctgggactacaggaacatgccaccacactaggctaattcatgtatttttctgtagggatggtgactccccctttgtttccaaggcctatcgcaaactcttggcctcgagccatcctcctgcctcagcctcccaaagtgttgcgattaccagtgtgagccaccacacctggccagctgctacttttatcaatattattcttattccactcaattaaaaattattattttcaaggctatgcaacagtatgtatcctacagcgtaattgtaaaaacatatacagtcgtcgtccctcagtatacagaattagttccagccccccatctctgcatataccaaaatccatgcttactcacgtttcgctgtcacccctctggaatccacgtatacgaaaattccaaatattagttgggcatagtggcaagcacctgtagtctcagccacgtgggaggttgaggtgggaggatcgcttcagcctggaaggttgaggctgcagtcagctgcgatagcactactacactccagccttggacaacagagggagaccctgtctcagaacaaaaaaaaataaaaaataaaaaataaaacaggttagaaactgtgatgaggtctgctgggcaaaattccatataagcaaagtataaattaataaagcaaatcgtgataaattagtacgattgactttctgga

SEQ ID NO: 1884393 - DNA, 4001 bp, Homo sapiens
tgttgggattacaggcgtgagcccctgtgcccggtctgggtgaaaaatgttgagggtgcctttgttgcttcccaatcaatcacaaacaacatcgctccactcctctacatcacagcttaaagagaactctggcaggagcttcactcttctagatgggcactgtttgtgaggcctctttttccatggtttggagtaaatgaggcaaagatttaaaatgtatccctctgctgggcgtggtggctcacgcctgtaatcccagcactttgggaggccgaggtgggtggatcacaacgtcaagagatcaagaccatcctggccaacacggcaaaaccctatctctactaaaaatattaaaaataagctgggtatgatggcgggcgcctgtaatctcaactaatcgtgaggctgaggcaggagaatcgcttgaacccaggaggtggaggttgcagtgagccgagacatggctggcgccgctgcactccagccgacggagcgagactcggtctcaaaaaaaaaaaaaaagtatccctcgtaattggctctggaacagattctactccaaaggctatggttacacaacagtctttaaattctcttgctaaaggtgtgtgggatgatagacttgctctggatcccttactagctaaacagaggagcgtctgtgccgttgccgatgcttcttgtggcacatggaggaatgtatcaggtattagaaaggttcggttgtaggggattaacaaacaggctgcttgtttgaaatgagtagactctttatccagctaactctctgatctatttgattttcgttggtttgcttcatgggaccccacctaaggagcatgcttcacattcttggtattaaatatgatcttcctgatggtcataatactcgtctccctggcgctctgcattctctccggagttttaaatgtttgcatgcagccatctgtaggatgctaaatggtgtctctttgactggagcaacaagaactcaaagaaacacaaggccatgaggatgtcgtaacctaggtacgaatgacattctgtgaccggaagctggaagtggcggtgactgagggtggtgccaaggccctaaggcttggctacactttccactaaatgagaacctgaccaaaggcagggaatttttaaacaaaattataagaggccattgttttggactgagctcccgcaagaggccccaacggaccagaccaaacccagatggagtcacgcaagctaaacgcaacaccatcaaaccgaagctttacggaagcagataggtcctaaggcagaccagggtttgtttttctgagcacatgaaattccagcacaaggaggttcctctctatcccttacaaaaatatataacccgaggtcctcgttcccacttacgaaacccattgttctgctatttcccagtggggcttgggaccaaacaagtacatttacaatggcgacagggacaccaatgtctaaagggggaaatcgttaaattaagcttggcgtaaagctgcctcctgacatagtttatgttccgccttctccatccactgtgaactgaaacctcactggagacgtaaacagactgaagccttcccttgtgccactcaccaggtttccgctcatcaagggtgccggccattccaaccgtgttcagataaggcaagcatggagctgcagcccctctggcggtttctgtgctttgcttccgttttctgtgcctcctttcccttttctgtccaccaatcttcagccacacggcagcaccagagcctctctgaacctattttggtttgggggctgccccattagcgagtggttctttgcttaattaaactctgttaaatttaatttgtctaaggtttttcttttaacagtacagaaaaagcatttgaaaaatccaacgtcggttcctgatttgtttaaaaaacatcactcagtaaattaggaatagagggaacttccctaacctaatacaggatatctatgaaaaccccacaaccgatggcggaagactgaacagtttctcactaagaacagaaaggaggctgggatgtccgccctcatcacctccgtccaacattgacctggaggttcctgctcgtgcaattaggcccccaaaagaaataaaagccatacagacgagaaaggaaaaagaaaacaatcttatctacagataacgtgaccatctaacccgatggaatcaacaacaaaagaaaaacctgcaagaactactcagtgagattaacaaggttgtggaataacaagactgatatacaaagtccattgtgtttctataaaatggtaatcaactatcagatattgacattaaaaataccacttcctaactgtataaaaatagacaatacttagaggtcaatctgacaaaagatgtgaaagacctccaaattgaaagagtaaaaaatccttggaagaagtggaagaagacctgaataaatagggacatccaaggttcgtggattagtaagttcaatactgttaagatgtcaactctccctgcatttatagaaattcacaggtccattctaaaacacatatggaaaagcagaggaggagaagagctaaaacaatccggaaaaagaacacaattgaagagctaacattctaagaattcatataagaccagtgtaagcaaaacttgagtgatactggtgtaaaaatattcaagtagatccaaaagaaaacggtccagaaatcagcttacacacacagactgatgactttttttcaggcagggtctcactctgttgcccaggctggagtgcagtggtgcaatctctgctcgctgcagcctcaaattcccaggctctagggatcctcccacctcagccgcccaagtagctgggaccgcaggcacccaccaccatgcacagttcagacttttgacaaaggtgcaaaggcgactcggtgcacaactgtagcttcttcaagaaaccatgctgcagcaatttcatattctggaacaactggatctccatatgcaaaaagaaaaagaagaataatttgcattcgtacctcacactatacacaaacattaactcaaaaaggatcgtgggtctaaatgtaaagctggagccataaaaacacaggagaaaatctttatggctctggataaggcaaagatttctcagacatgataccaaaagcacaattcctaaaagaacaaattgacaaactgaaattcatcaaaaatgtttaaaatttgctcttcagatggttaacggtgagaggacaaggccaccaaccaggagaaaaatctttgcaaatctatttcatcaaggattgattcagaatatatacaaagaactctcacggtggctcacgcctgtaatcccagcactttgggaggctaaggcaggcggatcacttgaggtcaggaattcgagaccagcctgaacaacatggtgaaaccccacctctactaaaaatacaaaaattagcccggcgtggtggcaaatgcctgtagttccagctacctgggaggctgaggcaggagaatcgcttgaacccaggagacggaggttgcagtgggccaagatggcgccactgcactccagcctgggcaacaagagcaaaactccatctcaaaaaaaaaaagaaagaaagaactctcaaactcaacaataggaaaacaaataacccaattttacagcaacgggcaaaagatctgaacagatgcttcccccagcaagatgtatcagtggtgaagtagcacgtgcaaagctgcacggcacccctggtgccgggagacacgcaagccaaaatcacagaccgcaccctccacgtctaggaagggccaaagtcagcgagatgaaccattccaactgcaacaagaaatgagagctaggccgtttctgaacaagtttcacacacacctcccacggcatctagtcgttttatttctaggcctctccccaagagtaaaggaaatgtatgtccttctgaaaacctgtgtgtgaatgtaaatggccacatta

SEQ ID NO: 1884394 - DNA, 4001 bp, Homo sapiens
cagcccaggtttctctgctccctgcagcggaacgggcttcctagggcagttcctggggtggtgtccctagggcagcccctgagtgctggagggggtctgggccacaggccctgaaacagggaggtggtgggggcagcgttcagggggctgaacctcagggtgaggcgggcaggcggggagccacaggcccgggggccccgcagcaggtgctcagcctcggagcctcctgccgcaccccggggcgggggctgggagcccgcccgagcccctagctctgagcgacctgccaggttggaatgtgtgtttatctttggcccaacccgatttcctgctttttagaaaaggggcttagagagggttgttagacaggctccaggcaccccaacacccaaaggcactttgaaaacgcccctgcactgacttcagtgcggagaagcaaacgggctggaatttcactcccaaaccccaacatgggggtggcggggccggggtgagggttgtggctgcctgcaaaggtgccaggaaatctggggagggaggaacttccaccgttcagggagaccctgagggtgccctggcttctggccacgtcccagaccctgttaggcaccgaggtcttcacacccagaccctccacccacccaagtttctgcggcacgtttaggttgagtgaagaccaagtcatccagttagagaagaggacttgaggcgcgtgctgctgctgtggccacgctggaccctcggtgcacgcatctcctggcgagtcccctgtggctctgtgggccgtacacacccggggcacgcgacctcagctaccttgtcaccgaggacgtgcatccacagctgtgcgtctgtgcctgggagcggggtctccacttggtgggtctctgcatgctgaccagttaacccgcctttccgggctgtggagggcgtgggtcctgtccggcccggagatgctccgcggggtgtgtgtgtgatcgtggccctgtagcggggtggtgttccctggagggtggacccctgagcctggctgtgtgtggctgtgtctcagcatgaattccgtgacccaggagcacgttttcaggcagggattaggggcagctgggtgtgggaggcaggcacttggtataccaccgaatggagacagaaaatcccaactctacgaaggaagtgaagtcccttcaacagggacaaagcgatgttttgggtctgactacaatgcaccctgggaagtctcaaagaaaacagtcggggactcaaggagggcagccccctctccccgaccccgagctcccaggaagataaatgatttcctcctctctagagatgggggtgggatctgagcactcagagccaagggcgcagtgggtccgggcgggggccctcctcggccctcccaacatgggggccaggaggtcagcccctcaacctggaccccggctgggtctcagggaatggtctcccccagtggcccagcttgcttgtgttttcagatgggtgtgcacgggtgtgtgtgtgtgtgtgtgtgtgtgtgtgtgtgtgtgtgatgcctgacaagccccagagagccaaagacctgagtggagatcttgtgacttctcaaaagggggattggaaggttcgagaaggagctgtggtcagccttgctctcccttaaggctgtggtaaccacactaggcatagcataggcctgcgccccgtccctccttccctcctccgcgcctctcctttctctttctcccccctctaccccgctccctggcctgctcctggtgacaccgttggcccccttccagggctgagggaagccagcgggggccccttcctggaagcccacctgcaggccggcttgctgggaaggggctgctctcgcagaggctcccgcccgccctgcagccgtttcctggaagcagtcgctgtgggtattctgttccttgtcagcactgtgcttgcaaagaaagcagacactgtgctccttgtccttagggagccccgctccatcacccaacacctggctggacacaggcgggaggccgggtccgcggggagcggcgcggggctggggccggaccagtaaacacacacgggcgccaggcactgcaggctcctcctcctcctcctgcccagcgcctctgctcacaggcacgtgccaagcccctaggccaggaggcccagcagtgggtgcagagcaagctcctgggaagggggtgcagggcggacccccggggagaagggctggcagggctgtgggggacgctgaccgtgggccccacgttgcagaaaactggctgcctggctggaagatgggggagatgccaagcctctgaggcagcacgagcagggtgcatggaggccggggcgcggggaggctgcactgcagcatgcaccccaaagcccagagggagtggagaccaggccctggaatcgagaagtagaaaggcggcttggaggcctcggaaccggctgacctccaacagagtggggccggccctggaggcaaagaggtgcccggggtccggccctgcctgggggagctatgtgtcatgggcagccacaggatatgtagccagctctgagcatatggacccagggcagggctgcaaggcagggcaggggagacagacgggggagcaaggagcagagagggggcctcaggctctcccaggaggaacattctcccgacaggaggaagagacggcccaggggtgactgtggggagccatggtggcagctggggtcgtggcagatgggagagaggctggcgaggtgaaggtgcaggggtcagggctctggggcccacatgcctgtgggagcgggcaggcccagggctctccgccactccccactcccgcttggctcataggctgggcccaagggtggggtgggatgagcaggagatggggcccagggggcaagcagggccccaaagacatttagaaaaaccggtttatgcaggcagcattcagagcaggcggcgtgcgtggcgggggccctgggagcacagagaggcacacgtagggcccccgagggtctccccattggccggcagtgacatcacccctgtgtcaacagtgatgtctgcagctccggccagccagggtttatggagcgagacccagcccggcctgggccctcactccccaggcccacacactagcccactgttcagggtccggggtggcagcatggcctgggggtcctggcaccgctgctcctctgcccaccctaacttcccggcatggcggctgccccctctgagcgtccccaaccagtaagtgtggggccagcaggcctgccgtcctcctcctcttccctctagagagaaacgtggaggtcctggggctgggggcgctcatagccctgtgacacaggtgcatggggtcaggggtcccagaatggcccctgggaaggacctcagctgggccggcggctctaggcttcaggggtctgtctgcacaggggctagcccctcccagacctctgtgaagccagtacgggcctcccctccctgccccgtgctctgtccggtgcttcctggactgcactgcgggccactggtgagagggtggacagggaagggccgccgtggtgcctgttcctgcccacctggctgtgtggtcccctccaagtagggacaacccttctgagggcttgggggcaccctggggttgccagggcctcccagagccctgtgagcccctggggggtctggcctgatgcccccctccacgtccagggccggctgtggcccagaaccccagcttcccagcaggccggtgtgcggtggtgacccaggagaggcctcacctccactgaggggccaccgacctctgccaggccacagagacccccaaggagtctgaaggctggagacccggggctgggaccaggtgggactttcccacggagccgcccccaggcccagctggggacacgtcccccttctctccagacacaccctgcctgccaccacgacacaccggcctgttgggggtctcttt

SEQ ID NO: 1884395 - DNA, 4001 bp, Homo sapiens
ttctcctgtctccctcccttgagttcaggataccaacccaatcactgaatcttccccaggaacgagcctggggccagggtgagaaaggggcttcccggaagtgctgagttaaatcggcactggatgcagccacggacaaggggacatggtggttgtccctctctctgccaagttgtaggtcaggagacctggttcaagcccaggctttgccacttggaagactgtatggtctgaaatcattcttctcagtgcctcagtttctgcatctgtgaaacggtgaggaacaaaccaattaatacacataaagcccttagtgcccttgatgcctagaacatgtaagtatttaataaatatcaacatttttattaacattgttattgttactgttattcccttccaaagtcttgcaagaagtaaatgggatgacagatgtgaaaacacattataagctatagaggtaagaaatgaccactcatgtatgctgagaaggtaacaggaaaaagggcttggccttagataatgtcattgaacagcctcaaactttcaacagaaagcacagaaatattccaaaaagagtactccaataatttgaaaccaggccaccgagtccaagttcttgccacagttccagggccgaggctgtttcccaagagccctgtaattgctttcaacctgtgcctcacccaaacaccacggctggcgcaggtggacaccttccgtctcttctccttccaggctgggccccagaaagaaatactccaataattcaccttgtggttttcaactttagaccagattgtttgttatgtatataactgtttgcatttcacttacttatcctcaatcgtcacatacctgggagggaaggaggctgcacagagcccccggagccccagccccacgtggttacacctgcccacgcttctggtctaagtagtccttgggtgccttagtgtgaacggagcatacaattaagctctgtctctctttctcagctaactcaggtgcaatccttcttgacagtctggaggaaccaggcaggctggccaccaagtgaggggaagttgctgctagctcattaatggttgaaagcccaatagtaccacccctcactgtcttgtagcaaagacccttggctcatgtttagaatgttagccaaataggagtcaccgagtgcaactttatggcagcactcagctggaaacagtggggcatctaggggaagtgtccgtgctcggtccctgcccttacacggatcagtctggctgatggaatgagacgaatgaaatggaaacaatgagcaaatcataaaaggcagtactgtcatgaagagtttgattttatggcacagaatgcaattgttagagttagagtagggagagatggccaagagctagagtgggcagggaaggttcctgtgggaagaggttagctgggcctttcaggtatgcaggagttgaactggtgggagggagagtggcattccaagttggggaagctatgtgagagaatctaggagacagaaaagaacaagggctgtttatagagcagaggccaaactggcatgactagagtagaaggagggcatcctaattcccagccttatccaccgctttgcaagaaccaggaaaatgaattcctgttggccataaaactagttgcaggtgatgtaacccatcctattcggcctcccatatttacagctatacaggaacaactctctgaaactcagtctcctcacccgtaaaatgggatggtaatacgtgcccctgggagccagcgagaattaaaagggataagatgcactggctcccaggggcaagcactagcagacaaggaatagggcagtcctcccttcacactccacagagaagaaatgtcctccaactctcccaggaggcagagcccagctctccttccaaacagccttggagttgcttggcctctccacttcttcaacgaagttgtgggcagaagacaaatgcagagttctcttgtacctgacaaggagagagaagcagaccctgtgtgagtctcttgctgttgacgttgatccacagggggtgcaggatgggactgaggcaggcccacctgcctggaaagcctgcctgtaccctgaccccatggggccctaacacacaccctcccagccacaggggctctgcagagctaagccagctgtcctatggaggtggggaccctcctcctgccctgccactctctctttctcctggagaggacaggcaggtgggcatggccacaggagaacttctcgaaggtgctaactggcccagagaaagaaaggtggcctggtagggagttgtctaccagagattgagagagcatgggagaagttgagagggaggaggaaagtgcacgccatcctgcgcgcagcctcgccttagggaaagcatgtgtgagaagtggtggtaggcggttgctagccttggaaacaaacaaacagccaaccaaaaggcttcggaaggaaggagtgtctaattaatcagccccgagggacaggtccgcactgcctgactgtgctcctcagcctggtttcaggccaccgagtccaagtttctgccacagttccagggccgaggctgtttccaaagagccctgtaattgttttccacctgtgtctcacccaaacaccaaggctggcgcaggtggacaccttcccacttttctccctccaggctgggccccagaaatcagtagaggagggaggaatcagtcagcgtggccatgcctgggaggagaggcccgtgtgggtctgtggggctaagaggcaaaggcgggtggcggatgtgggccagcgggagcctggaggggttgacaccgcctgctccaccgcaagcccctggaggaagagccccgctgtgcccgagagcgagcgcgggcaggtgtaactacccggggctggggctccgggggctccgcgcagcctccttccctcccagggacaccgcccagctgcgccccgcgccccgccgactgcgcgggccttgagacgctggtggctgcctcggggttggcctgctcctcgcgcacatgttcagggtcatccgcgctgcgcctctgcttcaggtgcttggctagagaaagggcggcaagacggggcagtgcgtgtgcgcgcgcgggcaagtgcatgtgagtgcacacttatgtgagcgcatgtgtgtctgcgcttgtgcgtgtccaggggaaccacagggagcaccctcattctaagcctccagaggactgcctgaagccgctagatagaaactcccctagaatgtaagctccgggggggagggagctttgtttgatggctgctgtattcccagtgcccattgaagtactggggacacattagatgcttaataaacagctgttgagttaatcaacggactctaggaatggaggcagaccggcccttctggaactggagaaaggacaaggccacatttcaccgtctcctctgttcttggtaccagccctggcgtccccggcaacgccaatccttctcacatccagcttgtgccaagttttcctccctgctcgtgtttacaccttctcccctttgtctctgtttcctgctggcccctgtgtgtaagcaccccagcagtcagagtgagaggaagacgaaagaagcagaattctggaaatagagagctaccagggtggcctcttccttctggaaggacacggaaagatggggtgagactggcgctcttcttcagctcctccctttgggaattgggactttgagcttcagtttcctcactttgaaatagcagctattccacctgcctcgcaggattgttgcaagaagtcaggcaggaggctgaaaagttctggagcacatgataggtgctacagaaacgttcgtttcgtctcctgactagcatccaacagtctgggagtgccccaggtgtggctgagggtggttatggtttgataaccaccaccagaacacccctccttttttcacaaaatgccttgaggagaatttaatg

SEQ ID NO: 1884396 - DNA, 4001 bp, Homo sapiens
cagggccagcacacgtggacaccacacggccccttcctgaggacagggcggaggccaaacctagctccccgtcagtccttactcaggccctgccttgtgaggacctcagaacatcatcccccaactcacagatgagaaaatgggccacagagagggtgagcgtcatggcagacaggatttccacccttgttcccgcgagtgatttttcgagggccctggtggcctgcagccctcacggggctccctctccttcccatgccgtcccaccctgtccagctggctctcctgggctttccaggcccctctctcctcccatcctccgctctcctcctccctcccgctactctcttctgtgccagctccaagcaccgcacccaagccttggggacacagtgtggcctccagcattcctgccctgttttcatttaggggacacccccaaaatactccgcctgcgggaggcggcagccgccccaggccacctgggaatgcgcttgcaagccttggctgggccgcgctggcaggggcagggaatgcagaggcggcagagtaggaggggccaggaccccccagcacggcttttcgggttaacgcgaaagaggaggccgtgcagctctgggcccggaggggacctcaggaatgtggtggttcagagctgacatccacatttccctgtctgcctggatccagttcggggacagtggggcagggccaggagcagggccagcaacacagccaggcagccgtcctggggctggctgggagttcaaagccctgccacagagccccagccctgccacccatcgcgggggcttatggagctcctcagatgggctgggccttcctggaagatgacccctgggactgggagaggctcctcccctgtccccataggctgtcccctctctcctcatcctcagtctctgagcagaaggcacctccctcaggaagaccccccaggacagcgaggggagggcgactgctcctccagcttccctggccctgcgtgtcttctctggagcaagctcagttctgagcgttcctgggcccacgggccccttgcggcagagacacggcttttgcgccttcacctggttttggaatcacaagccaagctcaggcaacacctggggagatgaacctggaggccccagtgggcaggtggacctcgtggtgctgaccaaactctagccaagtttcgaggcccggttctcagatgctcccccagatggcccacagctagctaatatctagggctgagatggtccgagtggggcagggcacagacccctccacgggcaggatttcttcccaaagctgtgccatccctcaagtccctggggatgctagtgacagtgcagaccccaggcccggcagtggggctgcagtgacccacagttatcatggaaactccatacctgaggtaagagcttggaccttgtcctgggaggtcccgggctgcatcactctgggcctcagtttccccttctgtcatgcaggaagacatcgctgtcctgcctgtctgtggttaagaaagggtccccatttgagatgcctccaggatctcagacagcaccaccctgacacaagagtgcctagggggcctcggcgagaggtactcaccgcacacctgcctggcaggctccctgctgcagctaaggatgcagcagaggctaaacaagggggtcctgctacctcgcccctgcaggcaggaccacgggagccctggcggagcacctgaactgggcctcctggcttcaggaagcagagtggcagcagaaggcctggaggagaaccccattggccctgtcgtctgcccacagatgctgtacttgcctcctgacctcaaatattggctagggcaggcagaggggtcagcattgctggccaggcagcaggcgccagtcagtctgctgctgagtgacacagacaatgtcctggctggggccagccccatcccccacctgtgctccccttgccagacaaaaggcacctctgcagcaagccagagcctatggccaatgcctgctcttctagctcacgcccccaagagagggtcccacctcatccgcagtgttgcctgcgcctaggcaggcacctggggctaggggtggagcttcccctggttcttctggtgtctgggacaaatatttgttgaatgaatgttaagtccagtgaggtcagtggcatcatcaaccctgactccaagaactcctgagcccccagcacatttattctcccctccagctgacctcgactgagaggggatgagaagaccttggaaccttaagggtctgggtccaactcctggctccatcatgttcctgggggaaaaccctttgcctctcctactctctggatcctcatctgtggcctgggcactacatcacccaattgctaggaggtcaagtaagatttagcctgcaaagcacctgacctggaggatctggccatgaactccaccccgccccccacttcccatacgcagtgacatgctgagctcaggacaaggtgtggggtgagtggtggtggcggggggttgggtggttcagagattttagcacagcccacttgtgtcaaactactggtcagcagtagcagataagaccaggacacaaaccattgtaaatcacatgcactagaagattctctgccttcagagaaaacaaaggagccagtgaagactctggtgctgtggacggcttcagggaggaggtgacctgcagacggtcctgagcccagggtttgacccagcaggaggaggacaatgcaaagcacagactgaagacgaggccccaggagtgcagggaacctgcccacggccacccatcgctgattgctgcccaacagcagggctcagcagctgcgtgggccagcgcgacacagggccggcccacttggcagagtcagaggggtgtcctcttctccttccagaaactgctgggccttttctagtgcctgaaacattcccgtttcacactagaggtccttaaaagctgtgcctttgtgaggtgtcctttgtgaaaacacctctgtaagtgtccttgggaggcaggggagtcacctgaagttgtgacatctcagggctcccttgggacatcattcaacaaggatgtgcagaaggcaacacccttctggaggtggacaagaagcaggtgcatggggctctgggcccacagcaggggtgcaggcccagtggccattagaagaccctcctgccaggttctgtgtgtactcatgccgggactgtccctcccttctcccacagagcctctgtgtcctctcaccgggcagcgctgactctccttctcccatgacctcctgtctggaggccatgccctggcctgtctgtttcttggctgagtgttctgaggtcgctctctatctcgaagctgcagaacgcaggttctaaggagtgagggggcaccccaagagcaccctcccttccctggagctgacacagggctcacagcaggtacctagggccctagttcccctttacttcgcagctgggaacctgaggcctggagagcgggagctgcccgtgtgaggtcgtggagtgagtcgggcatcacccagagccccagcccgcctgcccctgcggggcccttggctcggctgccttagacaaaggctcttctttgaagcgcctgagacagagcccctggtttccggccccagcccaccgggaggcacccgcctcggcagctgtcttcatttgctgcccgccagccgggccggcccgggccttggtttattgtcagcttccttgccagaaatatgctccaacaaatgctgtaaacaaaagggacaattgcagaccatcacgcctgcatttctctctcatatgcataaaatggggtgcggctggggctgcctggccagcagcctctgctaagcaaaagccccctctggacgtgggcctgaccacagcagcctcttcccctcctctgagcccacagccctctgagcccgggtcacagacaagtcccgacgctgtt

SEQ ID NO: 1884397 - DNA, 4001 bp, Homo sapiens
tcttttctgccattcatcttatttttcaggtatacttgtcatgttcctttttaactggaaatatggctggcatacactccttttaataactgttagttctgcatgtctgaacctaaatatcaaacatgattggaaagagataaggtgatgatattggaaaaacctatctaaaaggtatgagtcatgtttccaaaataaggcagcaaattcactcttcctgttagtttattatttcatccagtagaatatgtaccttttgtttgttaattgcaagtcttgatgccctgcaaggacctctttgcattttgtaggtaatgccgaaaaaaaaaaaaaaaaattcctacagttagcatccagtatagtttattgctgtctgcattctgacatttaacaatgatctcactctcaccagcaataggtaattgaagtaaaatacatactaaacccaaccaagatgttatttttctcctttaatgcagctcctttaagtacttgtctctctggtattttaatctcttgcaggaaaagaattattttatgatacaaattaacccttataaatatgttgatttctatttgtctttctataattcttgatatattaatattcattttttgtcattattagcaaaaaatttgaaatatatctagtgggttgaacagtgctccctaaaacatatgtccaagtcctcatttacggtagctgtgaatgtgatcttatttggaaatatggtctttgcatgtgtaattaagctaaataatttgagatgaaatcatcttggatttagagtaggccctaaattattattattattattattattattattattatcattcttcttcttcctcttcttcttcttcttcctcttcctcttcctcctcctcctcctcctcctcctcttcttcttcttcttattttgagatggagtctcgctctgttgccaggctggagtgcagtggtgtgacctcggctcactgcaacctctgcctcctgggttcaagtgattctcctgcttcagcctcccgagtagctgggactacaggtggcatgtgccaccacacccagctaatttttgtatttttagtaaagacggggtttcaccatgttggccaggatggtctcaatctcttgactttgtgatttgcctgtctcggcctcccaaggtgctgagattacaggcgtgagccaccatgcctagccttcttcctattattaaaaacatattctcagaacttttcaatgtctcattgaaactcagtgcataacatgcacatgaaatttatttttctttcttttaaactcttcttaatttgagaacaataattaccaagtcaatcacttatctcaaagtgaggcttcagttgaagtcttttcttatagtaagacaattatgcagataaagatgtttcttagagccactatttcttgcatctgattttgattatgcttgagagatgatataattataaagattaattagtagtcagcagaataaagtcatatttcctcacattagcaatatgtcagtactaaaatgctgaagctttcagagaaatgtgataaaaaatgttcagtgcttgttaggtcaggcaagtcaatgaaactgtatttttgtgtgcatgctgatttgcaaaaatgcaacagagatagtcagatgaagggaatgaagattcattaagtttgtaaaaactctttaattgctaattagatgggagcacatcacattcaaattggaaacatttagctctttttctccttaccaattaataataagagagagaagatatttaaagaaacaaataatatttaggaggtctcttttgggcagacctgggcatcacgtatttctttccataaaagtaatttaacaacatcagcagtaacaatatcaatatcaatatcaatagataggatgtttacccctgaaaggcattaattcatctgtcttgccagcactaatgaaggatatgtactttctatgtagtccaacactgcatgttgacctgtgctttacctctttgcctcctcctaagctgagattcttgagagcatgggctgtgaacactgtgctgagtcacactggagcctgacacaaaaagagtaaatcagtcatactcaccttctatttatgtaatattttacatttacgtttatattttgtaaaaatactgcatttaaccattaattatattgagtacgattttattttgttggtgcttccttactgctacgttctagaagaggacttacctgtcttttcttaatcctggtccttgtgattctcatttatgtggcccagtgcctggcacaaggtcccccacataactggtgcttaaggaaacagcttatgattcaacaagtcctttataagaattgtgatgcagctctttcaaacagaacttaaaatgcccaatgaggacttaaaacaatcctatgaaatagaaactgggagttgttagcaaatgataacaggctcagcaagttaaagcaaattacccctcgggctaacatacagtcagatgccctctatgctatttattttcaaacatatcatgttaaaaacaaaatgcttcctgaagcaggtattgattttttgcctttattatttgttagaatacaatatatttaacacttcctatgagtagctaataacatcaatattagagcattgtatattctaaaggctaaatttggataaatttcagtgtaaatattataaaataaccatgagcagcaagatagaaaaaatcttaaatttctttatttaattttatatttaaatcaaaattcaataacatttgaaatgctttatgccagtttggggtcccctattatttgctgtatacattttgttcatatgaaaacttgttgactatgccaatcaataaatttgccttaaattgaatcagaggatcttaatcaatgggagtccaaaattatgtttggcctagagaaaagatgggcactgtataagacagtagagtatcatatgcctgttgaaaaattagtctgtccaacagactaattgtaagtgtccaacacttactcattctaatctaacttagctatggtaaatttcttaaaagttttctctgtccatgcaatgaaaaaaagcaaacttactggaaaaatatgatttgagatttgcatttctatggtgcactacagatggcacattacattaaaatatatattgaatactaaaaatggtaaatcccacgtcagctactgctgatgtctttcagaccatcatacctaacgtcttttctccaaattcagttctgagttctaggctctttattggcctcatataggtcagaaaaactaaagatgaaaaaagtgaaatcatataatctgtaagtacttgatattaatgaatttactcagtcaaaaattttgggaaaactctctctgctagtatagacctccccaaaatggatataacatagttataagcaaactttctgaatataaagtggtgaagagagggaaagggagagtgattatagtattatataaaaagtaacaatcagttgtttttcttgaataaaggagtatcttctaaatgattcttgccttagaatctcatctcttaatctcagaagtcgagtttgttatataaactttcaatcagagagaaacccgagctcaaaataaattaaaaattctaagcaatggctgcaagtgattttccaaaatgcatatggagaagggtttgcttttcttgaataagttctgcatgaatctgtccaggtaacaaaagagataaagatagctatgaatacaataatataaatgtagttgtcctttaaactctgaactttgtccagctctaagagactgaggactttttataattttcacgctgattctgggtctagaaagtgcaggccaaactaggctgtggattaatacagtaggaagcagaacagtactcctcggataaaagaatggggtccagacacaaagatgtgaattttacctgagggctttactg

SEQ ID NO: 1884398 - DNA, 4001 bp, Homo sapiens
actccctttgagaagaagcagaatttttctaaactaatgaaaaacttttaaaattagatttatatcagctcaaagaatgtagcaaaagtaattgttcctttatggaaatcactcttctattgatgtcttcttaggcaattttttctgcttccactgaattgcagtcaattactccctggtctctgagcactgctaataggtagggaaaaactgaagaatggatataaggaggaaactgaagtcataaatatgccaactgaatgtaagcagcattaattacaggcactcgtagatgacagaatattaaaactccaagctgctagagttttaacctacattcacttttgcattaaaatatttcaccatgtactttggcaagatctgtatcaccttactctgaaggtatctagagttggaatatcagacttgagagtccgactctcaaccctctcatatattgtgttctgttgggaggtttccatttctcacacagtctgctcaccaaatggcaagagatggttaaactgatattttcttaagcttttacgttctcctggaagtggtcattatagatttatatcatactgcacttacggtataaaacatatagaacgaatgatttgtttcacctaagtcaaactttaggtgggtagtcctcattgtataagaattcttgaggatgacataattcagagggtagagggagtagaaatcacatgagcttgattgatattcagaaagacaagagctttgtcgtttgtcattgtatgaaaacgtcagattcctcacctgtagaattgagatactgtctccctcacaggattgtcatcagaattaaaaaatagagtaaatgtattgagcattgaggccagccctaagagctcaataaatgttaattttctcctcagcttttctaaaattttgcattaattcacagaattttacaactataaagctgaaaagaactttggacatctttgtaacacttattactggtgtggaaatagggtaggagatattgagttggtcatgttcatatagaagatggcttaaagccccacttcttattccttcctaatattcagctaaagactgatggctttctgcttttcttcttgttgtttaataaaagggtaagtctgtgctacctctgtgatatcaaggaattgtctttttctggaggattttaaaatctataatttgctgttcattatatttgtttgccttgtcattatctccagccacttgtctgtacttttcctatctctgtactgtccttgtcatgctgcttggtacttcaaagataaacctctaaccctcacctcaccccaggtacaaaggaagtgcggaagttaaacctctccccaacacacaggcagtaaaagaccttctgtactagggacacaaacaaaaccaacagaaaacaacaaacaaacaacaacaacaacaaaaaaaaaaaaacagaggaagagaagactccacaaaaggttagactttccagatttatgggagaaacggtctttcattttctaggaggacgcaagtgagctttttatctaacggaagctcaggaaaccgaatagctggaaaatgaagatcattaataatttcttcttttaagaggtgtgattataaaattaaagaatgagtcattctactgtttagtctatgaaagtaggaactggtttttcttttgtttctttttctcctcccctccccagaggaacacacagatgatttaagcagccttcgattacaacatacctaaaataataaagcaattgaagagggaaaaaaatcagccgaaggtgtataccccctccacgctgggtgactgtggtatatttcatcttcgcattctaaatcaatgctaagcaaagcacagaaatgtttacctttgtctgatctctaattccctaaatttatgtggaatcatgcacagatgcgctggaaaccagcctggaaaagcctggcattttaattgatcccagagcttcttgcctcacggctcctgctgtgatgaagtctgctacttgttccaaagattctccgcctggttgcctagccacggcagctggccaatcaaggtgttcgtatgcagcgaaggaagtaaccaatcaattttttaatttccttctgtaaacgggagtgaatcggggtggatttgaaatctcattagtcaaaagtaagacgtgtagtgtgcattttaacatatgtattagttgaatacatttggcattgagtcataaattctgaagaatatttgaaagcccatttcagacaagcttgaaccttgaaccttgaattactaactttttaaaaatgttttatatttttactagtgcactccatgtataaaatttaaatagacttctccccctcctaatttaacacccgcctccttgaacaccagtttcttattaaaatttccttttaaagacattttattctgtcaatttggctggatttatcctctctcatgagcaatactctggtgtaaggcccagatttcttcccatttggatgctgaaacagccccctgatcctagttcctccaatcccttctagaagccatactcaattgtcttatagcttctccaatctatcgtataaggcatgatcaattgtcgttacttcagtcctcttctggaaaacttctactcaaatgcaggcagtcatggcttgaagtgagcacttactgattgacatatttcagtaaattgtctggtatctctgagcctcagtttcctcatcagtaaatatggaagtaattaggtcaaaggagataatgtctgtaaagcacttaatcagggtcatcttatatttgtacatataaatataagtatcttctattgtttcttactattatttcttctattatttcttacttatatttgtatatgtatcttctattatttatatcttctattattgcttactattatttaatgtctccttttttgttaatctttttattatatcttcaaagttttttataatcttgccttgattccatccatctgtccattcttatttctaataatccttcccatatctcatttctcatcaccgtgtgttcatcactctgatcagacagtctcctcatagagcctcagattcttcatgttatactggtgtcattccgtaacttctactgatccttcagcagatattcaaactcatgtatcactttctagtggaagattacttcgttataagctttcacaaaatcatgttaaattacttccatagatttttctcagttcgtaattatacattgcttgtacagctatttaactaattgatgttacctccctgacaatgcagggacaactgtgagaacaggaacagtacaagtttttgtttttcactctattcctagagcctaatatgtaagtatgttatgaatatttgttgagagaatattgtcaaattcttatctactgaaatgggctctaatcttgccccttttccagatctgaaaaatcttatcttttgaaactctatattaattccgttggagggaatcaatatttaaacaaacatttactgaacacattctgcgtgccctatattataatgggtaatatagacgaattattttcctaaacttcatggagaaatactggataaatagataaaatttacttaaagcaagtgcttaactctgtgtgtgcatgtgtgtgtgcgcacgtgtgtgtgtgttggtggagtaggaatgaagcagtgtggtccagtagaaagaaacaggggactgagaaatctggcctttgatactcgatcctgaacaaacttgggtaaatcacttctcctttctaggcttctgtttccttgtctgtaacctcagcagattgaatcagtatttctttaagatgccttcaaactttgtgggttgaaataaaacatgttaaggtattaacatatcagcaagatttttttaaaaaatccttttatttaaggtttatacgggtaaataaatgtatttagtaatatataattag

SEQ ID NO: 1884399 - DNA, 4001 bp, Homo sapiens
cgggttcaagcaattttcctgcctcagcctcctgagtagctgggattacaagtatgtgccaccatgcccggctaattttgtgttttcaatagagatggggtttctccatgttggtcaggctggtctcaaactccagacctcaggtgatccatccgcctcggcctcccaaagtgctgggattacaggcgtgagccactgtgcccggccttaaatcctttttaaataaacttccactcctgctctgaaacttgcctcggtctcattttctgctttatgcccctccgtcaaagtctttcttctgaggaggcaagaagttgctgtggacccatgcagattcaccactggtaacttggggtaactcagatacctatcaccagtaacaaggccatgatggaaaaggggagtcggacatgcctcattatactctcctgtcttttggaattcaggcacagatgaccagcattaacactgaaatagatgtgaagactgataaagtagactctttgaagcaataaaacaccaaattctagcctgactctagcatagcatcaaatgccagatagcaggccctgaaagaaattgaagtattttaccccaaattatatttttctgacatatattgaaatggcctggcaaagctgtctcttgtgagaaaaatctacattctatagagaatccccattagttcattgctttcttttccctgatccaggagagtcaactctgatacgaaacattgacaatctattttctctgaagcctgctacctggaggcttcctctgcataatgggaatcttggtctctgcaactccttatcttaacccaaacattcccctctattgattctacatctttagacaataacttacctctttcaaccaattaccagtcaaaatctttgaatctctccgtgaactggaaacacccctcacttagagttgtccttcctttccagactgaactggtgtacattttacattttacatgtattgattgatgtcttatgtctccctaaaatttataaaaccaagctgtagtctgaccaccttgggcatgtattctaggaatcttttaaggctggtcactcatatttggctcataataaatctcttcttttttctttttatggagactgagtctcgttctgtcgcccaggcagtggtgcaatctcagctcactgcaagctccacctcccgggttcaagtgatcctcctgcctcagcctcccgagtagctgggactacagatctgtgccaccaaacccagctaatttttgtatttttagtagagacagggtttcagtatgttggccaggatggtctcgatctcttgacctcgtgatccttccgcctcggcctcctaaaatgctgagattacaggtgtcagccaccacgcccagcctaaatctcttcaaatattttgcagagtttgactctttccattgataccatatacctaagagaacttacgacaagacattgtactcatgtctttttggcagtgtcaactgtgaactccttaagggtttcctacctctggtccctttgtcccaggccccactgacaatctccaggttactatgttgcagccacaagataagcatgtgttaactctttgttaagtaaatgaataaattaaaggatgaggtgaatattaggagataaatgagactgagggagtatgtgcagcaagtatattttcatcagcataaatcagatgttcaataaaagtaaatctccttatgttctcttgctgctgtcttctaattagagttctctcctcagataatgtcaagaatttaaagttgtcaattaaaagataatgtcatctcttctgagctaaaagagtctcctttgtttatatgcttagttttatggttttttttctcccattccctccccttttgcttccatttgagtagatggttcttacaaggagaaaatccagaaactatcaattggctaccttgatgtgatcctcttcatgaggaagcttggacttctccctgcttcacagatgggttacgagatagtccagagaagctgcattctaagaagcattatgacctgtcttcttagaaacaacacggcatcacttttaccacattcttttggtcacaaggagagggaattacacatcacctgattttggatgcatgtgtgaggtaaggcttaaaattaagtcccaagctgatgtggaactgtagcataataaatatatttggtctttgttgctggtttgtggtacagagttcttgaaactctaggaatttcctgaatgataggaatgtcttttgttattcatatggtggcctacttaatgacactttattttatgctagtgaattgccttaagatggggtccccagatagcatcaggatgggggtggtcaccagaaacaccaagaaatcaaagcgttggaacattaagttctacccacataactttagagaagaatgtagggagaggagttgaagattaagctctataaagaaatgtgtaaacaatgagccttgatgagcttccaggttggtgaatacattcatgtgaaggggagagaggagagtcactcctaccctaactcaacagagaggttcctgggctcaggacacctccagaccttgccctatgtatcccttcatctggctatttatgtgtattttttattgtattctttctaataaactggtagacatgaataaagtgtttccctgagttctatgagcaattgtagtaaattatcgaacctgagggagggttgttggaacccccaatttaatgccagtcggtcagaaatagcatagcgaagatgtgaacttgtaattggaatctgaaattacaggagtcttgcgagactgagcccttaatttgtgggatctgatgataactctaggtagagagtatcaaaattaaattgaattataggacactctcctggtgtcggagaattggtcagtgttggaaaaaaagcagtatacatctgatgtcagaaatagtgtagaaaaaaataaataacctttgttttctgaaatgtcttggtatctggtgaaattcagaaatccttgaatagagtaattacaagtttctctcagtactctgcttccacgcataaggtcttcaaaccaaacaaccctccttatcaagaagactaggcagtttctgctgagcaaagtgtttcagttgcccactagcctgcagaattatttaaacaagcgaatcacatcctcctgaaggaactgagatcacatcatcttcttggtactacaaagactgcctttcaaagcccctcatttttcactctgttcccaagggcaacccccatttggcagcgcatggcatgtggtatcctccttccccaggctgtgagttcatgtgtctaataaattgctattgatttcatgtgtccagtgttacgtgttgtatgttcagacatctccataaccagtaggtagaaatcccagattaaccctagggggtgattgagacagcattgcaaaatcacactgtgcacaccatgttagatgtaggaggaaatatattgttgcagtcatctttggaaaataaaatccccattgatattattccctcttcaaaacgggataggagaacctctctaatataccctcagtgaatttagaggccatcaagaaaattacgttactcagcattaagtcttatctttatcactaaactgctttggatggataatctctattccaaagcaccatttttggcactatagtacccatcttgaaagatgaagagtgtgggagatttatttataatttatgtacttatttattttttattttttattttgagacagagtctcactctgtcacccaggatggggtacagtggtacaatcttggctcactgcaacctccgcctcctgtttaagcagttctctgcctcagccttccgagtagctgggattacaggcgcctgccaccatgcccggctaatttttgtatttttagaagagacagggtttcaccatc

SEQ ID NO: 1884400 - DNA, 4001 bp, Homo sapiens
taatcctttatctttaaactgaacattcctttctatggatcccaggtctttagacaaactcaaacaattgtcaaccagaaaatgtttaaatttacctatagcctggaagccccccgctttgagttgttctgcctttctgaaccaaatcaatgtatttcttatatgtatttgattgatgtctcataccttcctaaaatacataaaaccaagatgtatcccgaccaccttgggcacatgttctcaggacctcctgagggctgtgtcacaggccacggtcactcatatttggctcagaataaatctcttaaaatattttacaggctgggtgcagtggctcacgcttgtaatcccaacactttgggaggcggaggtgggtggatcacatgaggtcaggagttcaagaccagcctgaccaacatgacgaaaacccagtctctactaaaaaatacaaaaattagtcgaccgtggtggcaggtgcctataatcccagctacttgggaggctgaggcagggaggattgcttgaacccgggaggcggaggttgcagtgagccgagatcgcgccactgcactccagcctgggtgacagagtgagactccatctaaagaaaaaaaaaatttttttttacagagtttgactctccatcaacagaatgctgcacctatatgaccctctcacactcacaaacacagaggcattctcatgctgacacatgcacacacacacatgctcattctttgacacacaggcatgtttacctgcagactccatacagcatataccctgtacagtacacacccatacagactcattctttgacacacaggcatgtttacctgcagactccatacagcctataccctgtacagtacacatccatacagactcctcagggaaaatggaaactgtttcttggaggcctccagcctgtatagctgttctctgaacagaactgaggcccatcagttctaccttagtgagatccctggaggtggtacctgcctgatgagcggtctccctctgcagaacggtccctgggaaggcagagccagccttgcgtgtgaacagggataggcagaaatgatgcttccctcaccccttctctgtgcaggaaataactactagagagcattgcaaggcttggtgctgtgctggtgagggcggacgtcatgacagggagtgaacccagaccatgaagggggcttcctggaggagggtgaggtgaggcaggtcttggagtttggatgaggaggacgggaaaggacttgaggacattgcagatagaccaggaaggcaggctgggaggtgaggaggtgcaggaggctgtgcttctcggggctcagtctccttgagacaggggtgggactgaggggtggattggttgggggtgtgctgaggaaggatggtgagtagatgctattttcataaccttggttgcagtctcttgggagggtgccaagtccaggcaggtgaaggagttgaaggtctcctccgagcaggagctaagccctccccctctagtcttagtttttctgtccataaactgggatgatgaaccccgctggaggtggtgagggtcgggggcagagcagagcagccattatgctcaagacaggctctggactgcacctggggagagaagggagaatcagggttggggcaggaatgaaggaaggggcatgggaaatcaggggaggaggcagcatgggtggtgtgggaggatcaaggatgtcagggcaggcctcttacctgactgaggtttgcactcctgggttccctgtcctgaaacacaaagcaagagttgtccccatacagcgaatccctgctcttcagcactctttgcaatgcctctgggctttcctttctatcctggcaggatgagtgttgggattcctcactggtcttagttttcctgtccattaacttgaaggatgaacccactggaggctttcaggatacagaagatgttctgagaggaaggctgccctgtgtctgggcagctgtgtgggaatgaagtctgatagacggcacagccagatttttctctgagggaataccaagatcagtccatacaggaaacaaagcacaacatcaagtttggggactggtgggtcagatgtgagaatgggaggtgtggcaacatcctgccaagatggctgccactctcaatccctaaatcacccctgggagaactacagaactgattgggatgcataggattctaggaaaagacaacagtgttatagcccaacaagttcttcttgcctgctgcccagaaagactaatgcactgagaacagcaggtgctgcagcaaagaaagagtttaataatcacagggccagccaaggacaggagatgtttctcaaatctgccgtcctgagaatttggagggtagggtttattaagtatagtttggtgggcaggggactaggaaatggggaatgttgaagaataaatcacagggagttgaagctgtcttcttgcactgagtcagttcctgggtgggggtcacaggactggttgagtcagtttcctgacttaggttactggtctgggtggtaacatctggttcctcagaatgcaaggtctgaaaaatatctcaaataccggtcttaggttttacaatagtggtgttatctataggagcaattggggaggttacaaatcttgtgacctttggcttcataacttctaagccataattctaaacttatggacaatttgttagttttataaagttttataaaggcagttttggtccccttgcaaaaagggggttagtttcaggaagaggctatcatcatttgttgttgttgttgttgttgtttgagacggagtcttgctctgtcgcccaggctggagtgcagtggcacgatctcggctcactgcaagctctgtctcccgggttcatgccattctcctgcctcagcctcctgagtagctgggactacaggtgcccgtcaccatgcccagctaattttttgtatttttagcagagatggggtttcaccgtgttagccagggtggtctcaatctcctgacctcatgatctgcctgcctcggcctcccaaagtgctgggattacaggtgtcagccaccgcacccagcctcatttttgttttaaaattaaactataaactaaattcctcccatagttggcttggcctgtgcccaggaatgagcagacgatgtgcttgtgaggttagaaggaagatgcagtcagctgtgacagatttctctcactatcattctcagtttctcacttaatttttccacggcagcctggggtgcgctgggagcagggagagataaaagtgagaactgggttggagaggagtgcttggacagtcactgcctcccatttcacctgtgcacaaactcctgatgtgagttgattcagtgaggaggggccagccaggtccccgtgggcatcatcctagcactttctctccccagtccctaggatgggtggctcacaatccagggagatgcctagggctgcttcttttctagatattccagtcagaggaggctccagcagaagggagtgtccagctgtggctgtggggtgcctgggcctcacatcttgtcctcgccttggtcaggacccagcacagattaggatgctgccttcagctcatccccagcacatattaccaatccgagtcatgctgccctgagggaaacattggtccacaggtcaaaagaatacaactaaaagaaagaaaacaggtcaggcactgtggctcactcctgtaatcccagcactttgggaggccgaggtgggcggatcacgaggtcaggagatcgagaccaccctggctaacacggtgaaaccccgtctctactaaaaatacaaaaaaaaattagccgggtgtggtggcgggcgcctgtagtcccagctactcaggaggctgaggcgggagaatggcgtgaacccaggaggcggagcttgcagtgagcagagatggtgccactgcactccagcctaggcgacagag

SEQ ID NO: 1884401 - DNA, 4001 bp, Homo sapiens; identical to SEQ ID NO: 914900

SEQ ID NO: 1884402 - DNA, 4001 bp, Homo sapiens
ctcgcggccaagcgcggccccagagtttcggcggcggccagagtttaggccacaccctctttgcagtgagacccgcggccgctgattggcgcaccgtggaccaatgggcgcgccggggcggccccggctgtcagcgcgcgccgcagcagcgccggcagcagcctgtcctcccctgcgctgagccccgcagccagcgcagccttcccgggaagcgcggcggccgctcccgagcgcagccctgcccggcccgccagccgcgcgtcccggcgcccgcgccccacggccacagccttgcctctatctagctcacggagcatgtgcagacccgcaggcgctaaggtgctctcagtccgggggccttctgggcagcggtgactgtcaccccaagagagacctttcgggggctcttgccgcacctctgctgcgtcgcgggtgacactgcggtgctcgcgagcagggtggcagctgcctctcggtggagacgtcttgggacccttgcgcccttcttctctccttccttcgctgctgtctcctttccttccttggctgctcgctctttctctcgccggctcagacccgtagcctccggaacgggactcgtgggtcgccgccgcctctgtctcttccaaaggggcctcctcacttcggagatgcagtgacaagttaatatgggcgtccaagcctctgtttcccaggaggaaatttgcaagaggcggcagcccctgagcgcccagagctcttgaaaggccacccaggagaggtgtgagacccggcggcagcatccgtccaggtgggacccgctgagcgccgtggccagtcccccattcccatcccggcaccccaaaggcgcgctcgcccgattgcttcgagttccccgacctggggattttttttttagccgctggtggtgggcgcctcgtgggctaaggcccggcgcctgctctgctacccgcgctgcctttagcggtcgcccccgccgccgctgccagggacgtgctgggaaagcccaagccccgggagaagatgccggccatcctggtcgcctccaaaatgaagtcgggactgcccaaacccgtgcacagcgccgcgcccatcctgcacgtgcccccggcccgggcgggcccccagccctgctacctgaagttgggaagcaaggtggaggtgagcaagaccacctatcctagccagatccccctgaaatcgcaggtgctgcaggggctgcaggagccagcgggggaggggctcccgctgcggaagagcggctcggtggaaaacgggttcgatacccaggtgagagatgccgtttgccggggtactgttctggaaggatggatgaatagttctttcgggatggtgtgggagaaagggctggatgggagaagggtctaccatgtggccagggaagggaaccattccccttaggccggcaggttgggggatgcgcgaggagagtgggccggccggtgggtgtggcccgggtgccggaggtttgccttaagagctcttcgagacctgggatggcgggcacgtctgcagcatcttcctggggaggaggaaaggtcgggatgttctcaaaaaacgtgtgcatcgctggaaatgtgaggtcctgcatgttgaggtcttggccccaagaagccagtatccgcagcagcagctgtgtgtctgtctggcggttccgcagagattctgttccggacaaggaatgatctaaggccccattgggttcgacgccccctagcctggctgtaagatccaggaagaaaaggggatcgcgggtggcagtgaacctgctcttcccttggcttgaagatgacctgtccctgccccatcctgcggggtgacgggattccgggcaaggtgctgggactgcggtactagtgcaccagctgaggccggcagctggagactcctagcgccttggctggctgttgcggtgggggtgggggtggaggtggctgcctcagaatggcggccgaagctaagcccctccttcctgggtggtagatcctggtgttggtagcccgagtgacggggcgtggggatgggagatggcttgaagagaattggtgactcctacctttccagacagagcctgcatccagacaagccctggccgtgcaatctcttttacagaaattagcaagggccaatcaggttctcttggtcctccccgctccatttcccccttcttctggtaggagggggctatattttcttggcagtcagtcagcagggacttttggggacaggccgacctgacggatgtgactgtccggttaggagaggcgggaagccagaggggaggtggtttggggctggtgtcaggaaaatggcaacagaccagctgacctttttggcacatacttccctgctgacaccatctccaccttctcctggagctttctctgatcagaggctagagctcaacacgttcctaggctttctgatgcgggaactggagctgaagctaattgtaagcagacttttggaactctgggctggagaaggccctcaaagcagattaagctcccacaccaggctgataagcatgccccttgctgctgcacttgctaaacatttttggaagctgacaggtttgagtgatggtgtgtgggaggaaggcaagatttcctccagtgctccgggggcctgcctctgtgagggttttgtgctctgctcttcttctgttgttacgtacaggatttgtccagtgggctctgccatgggggtgagcaccagggtacacttctgcatggggtttcccttcatccatggacttggggtttatgaggtgtagtgggcagtcggtgggaggtcagtacagtgactcgggactggaggtgacacataccctcgagcctgatgaggagcacccgaggaatgagagggaaagtccatgctgggattgttcatatccaggcagctgttctgcctttgcccgtttgacccttcatttaacaaacattgtcagaggactggcagtgcataggctctggaaaggtgattcatcaccctgtccgtgaaaaaaaatgttcttcagcttctctctgaggggctggaacagtccacttccctcaagactttgcttccctcttttgcccttggtccataatccccccatttcacctctctcgccctcaatgggcccttgtgtactgatggtgaacatagtttggatggactgctaaggaaattggccacttccagtggactaccctgatttttacctgcctgccctcgtttgccagtgcccaggggttctgggggctcttccctgtggcagatccctgtctgcacagctgacatcaaagtgattttggccaatgggattttaccttctttgccagggcttctcccacagtctgcctgatagggtacccattccccctccaaaacagtctcttggttatggcatgaggactgtgtctgactggccatctggtagtttccaggtcccaaatttggtatatattattagaagatactcaggaaacaatgaattaaatggcaaatgctctcttggggcccctgactccccttttattcaggggatttttggcaggagattgggttgtgtagtggctgataacatagcttttaaagtcagatgggtatcgctggtgtcttgcgtctgtcatatactagctaggtgaccaccttgattaatttctttgggctttagtgttctcatctattaaaaaatgagcatgaacaaccattagagttgtgagcattaagaaaaataacgtaaagtgttcagtgcagtgtctggcaaataaggaacacttaataaaagtagctatttatattgctaacctaagagatggggcatgctgaatcaacattaatagcccgtaaatgagaaaagatatggcttattctctcaagcccctggaaaggtatcaatctgttccaaggatctgtagaacatctatcacctttctagtacagtaccaggcagaacgggaagatgagggaagggcatgtccactttctgagtg

SEQ ID NO: 1884403 - DNA, 4001 bp, Homo sapiens
ccaggaagccgtggccaagagggagctgggtagacagggcccagaagtcagagcagtcaggggtggagcgtgcaaactctgcaaagctctagcctggctccaccccttgcctgcctgaagctcaaaaggatgacatcacccagactgagggctccagcctagatgggcttcattagcagggaaagccggcacctgcagggctcaaggacttcccgggtttgcgggaggcggtcctctgctcctcttgtgaatccggttcagctttaggggtctctgctctgagtcttggagacagcacgtggctattcgggcttccaagtctggggctatgtttcttctaccagagaccaatctctcgggcaccagcataagcactctttccttccaccctgccaaacgctgcttttccttgccagcaccggctgcagctccatgtttctgaggctccgtggagaggattagatcactgattctaaccaggcagagtcagcccacagcaaacctaatgtccccctccctgtgggctcatgtaccctccccagcccccaaaccctactgggtgcttgtgttgcctgcttgcaaagcatatgcttggctgcttgcttggtgtctgctgtttatctgtctcttcctactgaacttctgtttcttcttggcccatctggctcctgtggtgcccgtcttttgctcggattgcgcctgcaatcgacactgtcctccccacccgcttcccctctaccctcttccctcccagggcttgcctcttgtgcactttgggccactggcaggcacccctgaccttgggtgtgggaccagcgaggactgccccaggcacagtggggagcctgatgtcggggtgtccctgtagtgttctgacgatgtcctttgtggaggggcttgagggggtgtggagggcagtgtgggagttgcctttggactggggcgaaggctaggtcctggtggaaacctccctctccctggcccttctgagcttcttggggtgggggcaccactcacaccagactattgtagagtgatgggaaaatggcctgtgggtagcagctggagagaatgaggtcaaggaagccccaaggctcctctgacccaaaaaccagggtccactcagatcctttccgctcagaggttatggcagtctggtggcttgggtggcggcaaggagctgcagatgctcacatccaggcagccaggggtggagagggctctgggcgtggcagctgtgccagcagtgctgccggggatctgtccccaccccgcctcgtcccagcctcttggcgctagttcccgtgcagcccagacgtttctccccctctcgcccctcccacagcgtgcacacccctgcacatgctcccacccgaggaagagctaagcacactgcagcggttcacactcacccctccaacgcagcccgcttccttccgggcgtgatgtggcagctcatggcttccctgggattcacgaggccctgggaggcagacggagcaggtgggcggagcctggaggaggatggaggagaagaaccggagcccccacggggcagggctgccattcgtctgcctctctggaccagggttgctcctccaggctaaggccggctgccgaggaggctgtgctgggcctggagtcaacaaggatgcacgtgctgggggccatcagctgctgctcccatacaagcatctgctcccaccaaacccacagggcttggctgccaggccttgctgtgtgcccactctgtggctctgttctttgtctctgttgttccatctgcctgctccaccggctgcctggctcagctcctctcggcctctttatttctctcggaatcttcttcctgttcctcatttctccccatccttctccccgtctctgtgcaaccacattcatgccctggtctccgagaccttctttcctcctctgcccttatcagtcatgcctctgtgtgcttctctgcgtctcccccatgttcattctcctgctctctctcttgctgcctctcatgcatattcagcagctccttgaaaacccacctagcttattctgcgtgttaaatgcctagatctgcttcaggcatgagacttcttagcctctagctctaggacgccacctcagatcacagtctgtactaattgtgtagaggatgttggtgagcccacctaccttccacccaagcatggctcactctacaagttctcctcttctgacctgaaacaaggcagccccaaggtgtgtcaggcccacagcaaaagccatggtgcacaggaggacgaggacaaggacgagcacaaggacgtctcctcttaaagaaacccgagggcttcagtcctggaaataaacgtaggatccaaagtgtcttcatcctttggtgcttttacagtccgttttcatccgctctattatccccttacaactccgtgggaggggtatcaatgaagcagctgtggagttcagactagagggcactccaccagtgcggcccagcatttgaggaacagagctggcatcagaaacttggcttctgaatttttagcccttgtctgtggcaggtgaatggacagaaagagtctggaaaaacgcagaaagtggcaactgagggacaagaggactcagaagcagagcagaacctgggctcagcccccaggggagggtacagagatgagggagacgggggaaggcaggagagggcatgagtggcaggcatccggcaccttctaccccctgtttccaccagcctttaggaagagaggactggggtgcttgccctcacaggtgacccacatgtcacgtcactccccgagcccctgtggcttctccgtctcctttctctgccctgttatctggcctcatggtttcttctctgctcccatcttctctctccttcccacctgcagatcacctgcctgcctttccccttcatcctgggggcccagccctttcctctgccccagtcccctcccgtctttctcatccaccgacctctctatgctccccaccgtcctcctcctaagccccacctggcatttgtcttctcactgccaaatgagccagcgtgggctcgaggtagccaggagcagggtggtcgcagttctccacagctcctgaccctggcctgagcccccagggagctcccacgcacctcttccttatgaacactgggggcgctggaggctcagcccccgccccacgcatacctggggcaggcttgctttccagcccttgcagactcacgaggggcctcattctgggacacgttggcagctgtggggtcgacacacctcttctgcagggagggctcccgacacttccgtcctctacctgcacagccggcctccattaaacacacgcctcagccggcctggagactccatttctatctccctggcgtggcttttcctccaccaccagctgcttcctagtttttacttgaggctcctgggacattgtcctaattttttcttcatttttctttgtatttgtctaggaaaaaaaaaatcaaccctaagaaacccttgaaaccacactatgtgttttaaacccttgaccccaccacagaggactctaacgttggcctgggccactttgcctggtccccaggtcgggagtgagcagcaggtgcccttggctctcttttatctcttttattccccttcttctgtggaaccccctcttgttgtgtctggagctctgggctctgtgcagtataaggagtccaggagagagcttgagatgtgagcttcccagaacaccaggtgcaggggatgtgacacgttaggggaggagagaactcagtggggagaagcagtttctccctctaatttcatatagaagccgaaagagctcggttaagtccagcttagttcagctgggtccagctgtgaggctttgggcccctcactaaatctccctgagcttcaggttcttatctgtaaagaaggagcaataataaccctgtcccgcaggatggttgagaagattaaatgagaaac

SEQ ID NO: 1884404 - DNA, 4001 bp, Homo sapiens
ctgatcccagtttgtctctttataccaccagctggaaaccttgaagcaagaggcagccactcttgctgcaaacaacacacagctccaagccagggtagagatgctggagactgagcgaggccagcaggaagccaagctgcttgctgagcggggccacttcgaagaagaaaagcagcagctgtctagcctgatcactgacctgcagagctccatctccaacctcagccaggccaaggaagagctggagcaggcctcccaggctcatggggcccggttgactgcccaggtggcctctctgacctctgagctcaccacactcaatgccaccatccagcaacaggatcaagaactggctggcctgaagcagcaggccaaagagaagcaggcccagctagcacagaccctccaacagcaagaacaggcctcccagggcctccgccaccaggtggagcagctaagcagtagcctgaagcagaaggagcagcagttgaaggaggtagcggagaagcaggaggcaactaggcaggaccatgcccagcaactggccactgctgcagaggagcgagaggcctccttaagggagcgggatgcggctctcaagcagctggaggcactggagaaggagaaggctgccaagctggagattctgcagcagcaacttcaggtggctaatgaagcccgggacagtgcccagacctcagtgacacaggcccagcgggagaaggcagagctgagccggaaggtggaggaactccaggcctgtgttgagacagcccgccaggaacagcatgaggcccaggcccaggttgcagagctagagttgcagctgcggtctgagcagcaaaaagcaactgagaaagaaagggtggcccaggagaaggaccagctccaggagcagctccaggccctcaaagagtccttgaaggtcaccaagggcagccttgaagaggagaagcgcagggctgcagatgccctggaagagcagcagcgttgtatctctgagctgaaggcagagacccgaagcctggtggagcagcataagcgggaacgaaaggagctggaagaagagagggctgggcgcaaggggctggaggctcgattacagcagcttggggaggcccatcaggctgagactgaagtcctgcggcgggagctggcagaggccatggctgcccagcacacagctgagagtgagtgtgagcagctcgtcaaagaagtagctgcctggcgtgagcggtatgaggatagccagcaagaggaggcacagtatggcgccatgttccaggaacagctgatgactttgaaggaggaatgtgagaaggcccgccaggagctgcaggaggcaaaggagaaggtggcaggcatagaatcccacagcgagctccagataagccggcagcagaacgaactagctgagctccatgccaacctggccagagcactccagcaggtccaagagaaggaagtcagggcccagaagcttgcagatgacctctccactctgcaggaaaagatggctgccaccagcaaagaggtggcccgcttggagaccttggtgcgcaaggcaggtgagcagcaggaaacagcctcccgggagttagtcaaggagcctgcgagggcaggagacagacagcccgagtggctggaagagcaacagggacgccagttctgcagcacacaggcagcgctgcaggctatggagcgggaggcagagcagatgggcaatgagctggaacggctgcgggccgcgctgatggagagccaggggcagcagcaggaggagcgtgggcagcaggaaagggaggtggcgcggctgacccaggagcggggccgtgcccaggctgaccttgccctggagaaggcggccagagcagagcttgagatgcggctgcagaacgccctcaacgagcagcgtgtggagttcgctaccctgcaagaggcactggctcatgccctgacggaaaaggaaggcaaggaccaggagttggccaagcttcgtggtctggaggcagcccagataaaagagctggaggaacttcggcaaaccgtgaagcaactgaaggaacagctggctaagaaagaaaaggagcacgcatctggctcaggagcccaatctgaggctgctggcaggacagagccaacaggccccaagctggaggcactgcgggcagaggtgagcaagctggaacagcaatgccagaagcagcaggagcaggctgacagcctggaacgcagcctcgaggctgagcgggcctcccgggctgagcgggacagtgctctggagactctgcagggccagttagaggagaaggcccaggagctagggcacagtcagagtgccttagcctcggcccaacgggagttggctgccttccgcaccaaggtacaagaccacagcaaggctgaagatgagtggaaggcccaggtggcccggggccggcaagaggctgagaggaaaaatagcctcatcagcagcttggaggaggaggtgtccatcctgaatcgccaggtcctggagaaggagggggagagcaaggagttgaagcggctggtgatggccgagtcagagaagagccagaagctggaggagaggctgcgcctgctgcaggcagagacagccagcaacagtgccagagctgcagaacgcagctctgctctgcgggaggaggtgcagagcctccgggaggaggctgagaaacagcgggtggcttcagagaacctgcggcaggagctgacctcacaggctgagcgtgcggaggagctgggccaagaattgaaggcgtggcaggagaagttcttccagaaagagcaggccctctccaccctgcagctcgagcacaccagcacacaggccctggtgagtgagctgctgccagctaagcacctctgccagcagctgcaggccgagcaggccgctgccgagaaacgccaccgtgaggagctggagcagagcaagcaggccgctgggggactgcgggcagagctgctgcgggcccagcgggagcttggggagctgattcctctgcggcagaaggtggcagagcaggagcgaacagctcagcagctgcgggcagagaaggccagctatgcagagcagctgagcatgctgaagaaggcgcatggcctgctggcagaggagaaccgggggctgggtgagcgggccaaccttggccggcagtttctggaagtggagttggaccaggcccgggagaagtatgtccaagagttggcagccgtacgtgctgatgctgagacccgtctggctgaggtgcagcgagaagcacagagcactgcccgggagctggaggtgatgactgccaagtatgagggtgccaaggtcaaggtcctggaggagaggcagcggttccaggaagagaggcagaaactcactgcccaggtaaggtactcagcccaaccaccctcccaaagatcaggagctgagagcgcggggacatcgatcctctgtgtccagggcctctagctcctacactggagtgtcttgcctttcctcattcactgggtggcagaaaaggagaggtggctggtggagttcaagtctgttgcccctgtcatcctaaagaaaatgtcagtggcctcccctcccctgaaggctctgtcactagagagtcaagttgtgatgaccaccagcctgttcagaggcacacctgcactggatgcctcaggagccactggggattagaatcagcctaactggcatttttaaacttactgtcaatctagctccttaggggaaagtatcagagcctcagtgaggtcagcctggcagcagggctggtgcttctttggcctcatctcactctgtctctgttgctcctcccccatgtacaggtggagcagctagaggtatttcagagagagcaaactaagcaggtaatgcctgaggtcctcgctaaatgctggctgcttaaacggtgaccagtcttggtgcatgagcccggctgcagcttgcctccgccagctcctgttgtgaactgtttgtg

SEQ ID NO: 1884405 - DNA, 4001 bp, Homo sapiens
cctgacttaccattttaagctttagaagaggtaggtttgtcccaatagttttaaacgacaatttgttctctgaaccttcctttctgagcagggcgctgtgctctgcatgtatccgaacagctgcctcaggaaggtcttttgggtgagaaaacaagcccctttggccttttagtgctggacaagtaaatgaacttacatctctaagataactgctagaaggtgcttcacaaacaagaggaaaccgctaaaccagaggttttgtgtctctcccctcaaactcgattacttgcgtaaatatatatataactcagacatttatcccctatccgcctcccaagcctcaagtaactgaaatctttgcaaaacaaggttcacaataaatgatgcgtaaagttctttgagatccctggatacaaagtactacataactgcagtcttctttacagctaaagttagattttggtggagagaaagcctaaccactgccctgaaggaaggaacatttaatcctcccactcccctccccctttctcgagagatcaggaaatatttagctcaatcttagactctctagcgagctctagctcccaactatttatctcattctcctcaccacttctgcagggacctagagaagggggcgtagcttatcttgggggtggggcttggagggcagtatatttgcatatgacacaccctcgtcctcttattggcagaggagagcaaactgttccctgctaccctactacttagctaaccgccacctcccttcagttccgagcctcggagataaacttaacttgcccggagattcaaggcttcctcggcccctgcgattggccggcgcgactcccagtcgggctctcgttgctcattggctgcgggctagcgccctgggggcgtagccggagctgtccgattggcgggaggggcggtaccggagcgtggaggtggtgaaggtggtggggcggcggaggcggggccgcactgaggcgctgcggcggcggtggtggcggtggcagcggtggcggctgctcgtcctagcctggcgggggcgggggtctggaagatgggggcgggtggaacaacgggccggtgaggagcagccgccgccgtctccgccgtcgctggggcagctgccgcggtggtcgcctctggcagtgccgctagctttcaggcagtcgcctctcctcccgacatcccgccttgaggaggctgaggcggaatcgcggctggcggcggggggacggaccggccctgcagtggccgcagtgacagcccggacccggccctccgcccgctctcgcctcggcgcccgcagccacgatgaaccggggcggcggcagcccgtcggccgccgccaactacctgctctgtaccaactgccggaaagtgctgcggaaggtacgggttcggcccggggtcctgccggcgagggtcgcttcctgccggccggggctcgggcggctcgtccccgggcgcgcactgggggaggctgagagggatccccgggcaccgtccctccgcagggactgagaaagggggcgtgggttgagggcaggagggtttggactactgcggctttttatttccgccgggacagacccaagtctggaggggttgggatattttttcttcccttgttccttttatttggtgcctttgctctcctttacggctcatttccctaccttgctaccccgggtcggctccttgggcggagggcgggagggatccgttcgatcctcctccctgtgcagtttagctgttgatggaggtcggtgtgaaatcagagcagctgggtcggatcccgaggaacctggcccctctttgctgtggctaactcttgcgagtgttgtttttgtttattcggttgcttctgccttgcgcgccttgctcaacaacccccgttttcaaattgtttggatggtagtcctgtgtctgtagttcagtctcgaaaggaaccagtaaagcatcttgaactttatgcccatgggaaatgcaattcgacctggccagttcctgaggctggggttgggggaggagaagactgaggtggatgtgggttattcctccttagcacccccctgcccccgtgttgatccagaaaaatgaggcgcaccatcagtttattgctgcttcctagagtgactgatagaaagtttactccagtattgtttagcttacttggcttaatcgccccgcggggaagggcgagagggatggggaagggaatgaaaaaaaggtctctagactttttgatcagattttaacagctgccccaaagtaatattataatcagtttattcgtattcaaactctatttttacattttattaagtggaaacgttaggtgagatgcttctgtttgttcactacaaatgaattaaaattgctgagctgtgcaaatgcatcgggactgaaagcggagatgaatatggtaccgtttttagtcaacatctctaaatacggttcactttgggattgttctttctacatttttttttaaaaaaggaagaaagaaaaaagcacataagtaagcaagctcaaatatttgcgctctttgtccaaaaactgtttttcttcctctgtgggtcaggccaagtgccaatcaaagttgtttttcaagcctcttttccctgcagtagggctgctgcttttttttttcttcctattttatttgagagcgtgagagcaaagggattgcagatttgaggttaattgaacagttaaatatgccttaaattgtgtttattggatatgtttctcttgaaacagatttttattaaatgtgcatgttgagtatgtgcagttatttttttccataaactctaggatcaaattacagttgatacttgctcagctcattgtagggtagcttgtgagaaatgtaatggatcagaagtgcagatcagcttagttggatgttaactctttcactgcagggccagatgtcatctgaacttagctttcaaaaaaatttatttcttaatttttaaatttatgttatgtctttgacatgaaaaaatgtgtcatttaagacatgtttgattaaagtgcagcctggttaaaatgacagcaagttatgctttttaattgaataaggaaaaagagcactgtattgactttgataaaaaaattttttaatggctctggcaatttgttaggctaataaaatgtttggaggtaatattaggcttcaaaatgtatttcatttttcttttgagagagctatggctatggatccatgacactttgctagcatttaagatattacatctttcctttagcttttaggaaactatttctgtttacctagaaagaacatcctcatttctagccattattaaaagaaacgtggaaaaagagtattcacattttcgtattttataattgctgagcacatctctgccagtattccagtttttagtaactccaaggtatttaatattgattcatgcagtggcatgaaataacttaatggaaataggattctttgagccagttataacatgacttggcaacatttgcagctttttaaagagtgccactttgaagtgctcttaagagaatcagtatgtagcattttaaatgtttcatcattcttaaaataacaatgaaaagtttatttctaataaagacatgtttttcttgttgatataactctaagttaaaagtcatctataactctcaaaatgtgattcttagagtttatcttgttttccatttaataaagtgttcagtaatgtagccaagtgagtcatagtattttgaatgtttgttcagtctaattcataatggaagaatgaaactcatgctcatccagtgtgaattacttttgcttttatatttctatataatgatggaagaagggtcacctttatatgggacagaaagtgttattctctcagtaggtggcttaatttgttgcagtgtgttgaattttaggggaacttcacaaggaatggaattcaccttcaaatgaaataatatggtttaac

SEQ ID NO: 1884406 - DNA, 4001 bp, Homo sapiens
ccaggcatggtggcgtgtgcctgtaatctcagctacttgagaggctgaggcaggagaatcgcttgaacccaggaggcagagggtgcagtgagccgagatcacaccactgccctccagcctgaaagacaaagtgagacaagactccgtctcaaaaaaaaaaaaaaaatttcacggaatatagcttccatataaagatgtttgttggacgaatgaaggcttgttcgtgaaattattggatgttcccagatttttaaaatacttttttcattaatttaaaactccttgttacaattttctcaattaacacaaagcttgaactcaatgcaagcagcatagaattcttacgcattctttataaccatgaaagtaaccagtcttatgtaaatacataattctatattcagctgtttttgcatcataagtactcacatcctctatgaatcttaagtatccaccctactatgtggcattaagcctgcatcctccctaaatgctgtgtggtaacgctataattcagcctacagctgaagggaggcaatacactggccttgagcatccaaccttgggtgaaaagactcaagtttccccatcaaaatcagcctataaaaccatcctgcctagccaggtgtggtggctcacgcctgtaatcccaacaatttgggaggccgaggcgggcagatctcttgaggccaggagtttgagaccagcctggccaacatggtgaaaccccatctctaacaaaaaatacaaaaattagccgggagcgatggcacacgcctgtagtcccagctactcaggaggctgaggcacgataatcgcttgaacccaggaggaggaggttgcagtaagcagagatcacgccaccgcaccccagcctgggtgacagtgagaccctgtctcaaaataaacaaacgaacaaaaagcaaaaaaccgccctgcttaggagaatgaacttgcccagaaataaagtgaattcaaaaattaagaaaaggtcttatggtggctagggactattgtagaaattatcagaaacgatagttgggacctgggatagcagttcctctatgcagtccctgggctaaaaacttacatgcgtcatctcatttaatcctcaaaaacctgaggtagtattaacattatccccaatcttgcaaatgaagaagctgagtctcaagagatgtcctaactttgcccaaagtcacaaacccaagtttctctgactctagatcccaagctgagagtcttgctcagatcatcccaggtccccttctttcttcttgcacttggggtgcaataaggggcaatggggccagcagtgtgtaacatactgcaccgtaggaagagacgttaggatcatcggtctcagcctccgtattttacagaggaaggaactcgtaggtcacacagagccagggggctgctctgcaacagaatctcaatggacactagaattccagtccaagccccattttacagagcgtgggaactgaagcccaccgggcctgggggcctcccgggttccgaatccaccagcggctgagccagatccagccccgggcgcactcactgccctgtctgattctacctccgcgttcacctgcgccgcgaaccctccccgtgggctgccagcgcccgggagtacctgtcggccgcgcgcaggccctcggctcggggtgacaagacgctggcgcgggcaagcggggcttcgcgggccacagccagatctcggcctcgaggacccgggtcgccacgccagcccctttcctcagaacgccgaggcctcaggagcgtgtgcgcgccgggacgccccagagaatttggaagcgctggtcccggaggcaaggccggcttggtctcctctcctcaatcccccgacgccatcccctggaccttctgcagaccgggtcccagccccagcgcacctcaggaagaaacaacaccttcgcgcttagctgagtcaagcggccaggactctagaaggggcgaggttcccatggcaacgagggaaactctttgcgcctgcgcagaggcgctcggcacgctgggaaatgtggtttccgggttgtccctggaggctaagggaatggacacaaggtggcgcgcgaacgttgcggtcgatgtggctaagcccgggtccccagctgccgggcgctgcgggcgcaggagaggccgcgaaggtctgaaaggtagtttctctgaggcgtctgggatgcggagtgaagagaaggaggcacagtctcttcagcgcggttgattttgccgtttgaaaacttggcctaacaagcggcagccctggctagggcgagggcagttgcttccgaggccccgccccagcctgggctgagccgggagcggccgagggagggggctgtgacggtgggagctggttccggagggaagcgcgcgacggtcgtgctgcaagcgttccaggtccaggctgggcgacccctcgcgctgctgagaggctcctatgcccggtgggagttgaagtcgggctccgggagcagcagtcatcctgatcctcccacccgcgagctccaagcacttctggatccaggtcccgccttgggcggaaatgtgcagtcagttgactgcccaggagccaccttccccgctcccgcgttagtctcttggaatgagaatctagaaacctaggatctgattccggctctgttagagattagtagttacttctctgagcctcagtttcctcatttctagaaaacgatggtattggggcaggcgcggtggctcacgtctgtaatcccaggactttgggagacggagggggtggatcacctgaggtcaggagttagagaccagcctgggcaacatggcgagaccccctcttctactaaaaatatgaaaattagccagcgtcgtggcacaaaaaaaaaaaaagaaaagatttttttttttggagatggagtctctctctgtcgcccaggctggagtgcagtggcactatctcggctcactgcaagctccgcctcccgggttcacgccattctcccgagtagctgggactacaggcgcccgccaccatgcccggctaatttttttgtatttttagtagaaacggggtttcaccgtgttagccaggatggtctcgatctcctgacctcgttatccacccgccttggcctcccgaagtgctgggattacaggcgtgagccaccccgcccggccacaaaagtgctttataaagcattacctggaatgggggcgggggggagccctcagacaacctaaatgttcatcaataaatgaccacttaactgatggattccataaaatagaacatgtgtggttattttttaaatgaggcaaatcttttatgtactatttggggggaaaactcaaatggcgtttttcctctgctctcacaccatcacaattatcaacacgtaagactttggtgaccaaagatattgggttggccaggcgcaatggctcacgcctgtaatcctagcgttttgggaggccgaaacgggtggatcacctgaggtcaggagttcgagaccagcctcgccagcatggtgaaacccccatctctactaaaaataccaaaaaaaattagccaggcatggtggtgggcacctgtaatcctagctactcgggaggctgcggcaggagaatcgcttcaacctggaaggtggtggttgcagtgagccaagattgcgccattgcactctagcctgggtggacaagagtgagaatccatctcaaaaaaaaaaaaaaaaggtgtggggtttttctccccacacaccaagcaacagaccagctgggtggcctccaattcaattccaactctgtctaccgggagatagtgtcggatcgcacaggttgaggctcagcccccaagactgcatctccctcccctcagatcccagtcaaaagtccaggcctccagaacttctgcctgaccagcttcaagttggggttcccacgatcccctctttcggtttgattaatttgctggagcagctcacagaactcaa

SEQ ID NO: 1884407 - DNA, 4001 bp, Homo sapiens
atatcattataaattatataaatcattctattatacaatgatgtgtgctacaagaagcatcaacaggagggtaaagggaagcagtttgggaaaatcagaaaaaaacttctccaaaaaggtgattaagttgttttgaaagtggatgtactaggtacatataaagatacatacatattgcagcactattcacaatagcaaagacatggaatcaacccaaatgcccatcagtgatagactggataaagaaaatgtggtacatatacaccatggaatactatgcagccataaaaaagaatgagatcatgtcctttgcagggttggggatggagctggaagccattatcctcagcaaactaacacaggaacagaaaatcaaacaccacatgttctcacttacaagtgagggtgaacaatgtcaacacatggacacaaggaggggaacaacacccaatggagcctgtcaaggggagggcagagggagggagaacatcaggaaatacaactaatgcatgctgggcttattacctaggtgatgggttgataggtgcagcaaaccaccatggcacacgttcacctatgtaacaaacctgcacatcctgcacatgtaccctggaacgtaaaatgaaattttaaaaagtcaggggtgatattttgctcattatagctttaccttaaacccctgtatagtttcatctgcctttagaatatgctggcagaaatatactttattatctgatacccaagttactactgcaacagggaaactaatttctacctcaccctaggctccaaatttcacccccactgcactgagggtaaacactgaagccaaatgggccttgatttgggacctttgtgttcctttgctctcccatcaccatctgaccccaccgcacgcctcatatccacccatcccagaaggaagctgcctctaaggactaagtagtaaatctctcaaagttatttgtggaaagtcctaaggacacaaatcagcaacaaaatccgttgggttttttcccacctctcttaaaacaatctatagttgcatattttccttatttgttcatctcaacttcagcaaaagccttacaggttagtccaacccactcacctaagaaaatttgaaacaaaatgttactctcctcacttttcagtacaaaatgaaatgaagtggaaccatttgcctgaggtgaatgagtcaggggtaggggactggaatgcaggacttgattcctcggtgtcctaactctaaccacattccctctattctgcgatatttaagttgtttattgtactgtgaggagcaggaataggtaagggagatggttgactttttatgtttttattcagaaacttgcatctgaactctaacccgcatgtaagacactccattttaactttagcaggagtaagtgaagattcgtaacatataatttgccttggagacagtgacttttcctgggccttaagcaagactattggctatatattgacagagagagctcttactaaagaagagaataaggcaaataggtgttaatacctaatcctaaacattttaaaaagtgatcatttaactccctaatctctacccataatgtttacaaataagttctcagtttttaaactcgacaccaggagcttatatagcttttcatatgagagacattaagaaatgtagcttttaattcaggcttacctttttgcatcagagagtatgaggccttgaacaatgatggccatgttctcttggttttatctgtttttactgtaactattagcaaaatatatactgttttttttaaatctaggaataaacaaataaacacaatgaatgcattataatgtatattcaaaaacatatcaaaacaggcttacccaactagccttgaaaaagataacctttgggaaatcttccaggccagtcatgactgctggaaagaaaataagcaaatacttactaaagggctttctccaagcgacatatttctcttagaatttccagtctttggatactgacaccttcaccttcatctcagatgacgtagaaattcagctcggaattcagaaatggatagcttccagttcctctgagaatactcctcaatcaacaagttgtctacctagctgaggcacagcttcctggaattaagactgcataacctaggttataattaactcagacttcctcctcctcttgtaccttggccatgaccttaatcctcacctagatttccgtcccatctatggatacaaatttgttctaaattagatcaactgaactctattccttttagcctaagataagttggcactggtggccgaaaggaatcctaaaccaattttagaccatatagttagactttaagcatgactcaaaaaaagctagacatctcagtggagagataatattgctcagttttatccattttccctcattaaaaaaaaaaaaaaacttgggaggactttgagaatggtcagtaggattagaataacgagagcaattgaagctgtgggaagactaatagttgatagtggtttatacctgtaatcccaacactttgggaggctgagatgggaggatcgcttgaggccaggagttcacgaccagcctggtcaacacagcgagacttcgtctgtacagaaaattaaaaataaagccaggtgtgcctcatgcctgtaatcccaacactttgggaggctgaggcgggtggatcccttgagctcaggagtttgagaccagcctgggcaatatggcaaaagcctgtctctacaaaaaaaataccaaaattagccaggcatggtggtgtgcacctgtagttccaactccacaagaggctgaagctagaggattgcttgagcctgggaggtacaggctgcagtgagccatgatcgcaccactgcactccagcatgggcaacagagcaagacccagtctcaaaaaataataaataaaaactaaattaaaaacttagccaagggtgatggtgcacacctgtagtcccagctgctcagaaggctgaggcaggatgattgcttgagcccagaagttcatggctgcagtgagctataatcgtgctactgtactccagcctggtgacagagtgagacctatgtcaaaaaaagaaagaaaggccaggttcggtggctcacgcttgtaatcccagcactttgggaggccgaggcaggcagaggcgaggcgaggtcggcagttcgagaccagccaacatggtgaaatcccatctctactaaaaatacaattagccaggcatggtgatgtatacttgcaatcctagctgaggcaggagaagtgcttgaacccaggaggtggaggctgcagtgagccaagattgtgccattgcactccagcctgggcaacagagtgagactctgtctcaaaaaagaaaaacagtaatactaggcttagtgaattttttcaaagtaatttggaggcaaacaaaatgtttacaattctgggagctgcagcattgataatacacagaaataaaaggaatgataaaatgggagggactttggaatttagctgctttcaactgcatggatttaaagttagatttaagtgatgatcagtaggtccattgctgcttacctaaagagctcaaagccctatcctatatgatcttgttggttctcacaactttacaagagatatgggtcaaagagtagaatcaagaattttgctggtatgaaagttgagatttaaagaagctgttacgtaacttcactgacatgcagtgtcttccaaaaaagaggaatgccttacctattacgttaaagagaaaatagaaaccatccagcatgaactccttcagttttctccctttcacttcgaactgatgtactttttttttttttttttttttttgaaacagagtcttattctgtcatccaggctggagtgcagtggcatgatctcagctcactgccacctcaacctcccaggtccaagtggttctcctgtctcagcctcccaagtagca

SEQ ID NO: 1884408 - DNA, 4001 bp, Homo sapiens
ggtactactgagggttgagcctgatagggggatggagttgcctggactgaattttcagggccttcatcagttccttttctgtcccctggaaaacaaactgggcctctcttcctctctctccctctctttctctctctctccctctctcgttttctcactctggctcacacacacacaccttttcttgattagatcgttacattcaatcctaggtaggtgtgcctctaatttcgggtccccaagcatacacaccccagacctcaggggactttggcttcctgaggtcaggtcggagcacaaacagatctgaaacgccgttagtcacatcatggaagggagtgagttgggtgcttcaggtagatccagagtacaccttggctctcactcgttattatttcttaacagtgtgaaacccccaggacatcccgacagcgtctgtcctgggtgggccaatgtgagcagagagcacgggctttgaggctggagcccctgcatttgtattctggctccaccgcctaccctgtcaccgtgagaaagcggtttgacttctctcaatctccttttcccctaggtaggaaagggacagtaatggtccttagtaggactgaatgagatactgtgtaggcccagcacggtgcctgagcagatgaaaaactcaataactcatagtcattcttacttttaacagcacttccattatcattgttatcctccaggtcaggagccacgctgggcctgcggtgaattttcttagagtagatttttaagggagccggtccccagctctttccagaatccccagaagctattaaggttgtctgtgtacatccagtttgccatgtttagttaaactttgagggactcacgccccagtgcagcccacggggtttttgcagagctgatgactaatattttgtagagagtctgatgactccaatacacctgccttatgtccctgggtctgaaacagctttcttaatagactgagagattcactacaaggactctcctttgtcaacattttaccagccctgatgaaggattaaaaattatgttaaccagcagttctgacttggcttctgtcagtcacagcttcgcatggctgcacttgcttctctcttcctcttcctcttcctgtcccctctttgctgatctggactcagcctggtattcttgtcacaaggtcatcgcctaggtgagctcagctcagcgtgaaacaaaacagctcatctgaaggcaccacacagtccgtactgggaggaggggaccctcctcaatcccctgccttctcacaagtgggctcttttggttccatcttgcaaaagctgggcagaaagaattttaatctgagctctcggagcccttggacacagggacagcatgaactgcccctaattccttgggtgctgggtggtctgcaatcactccctcatagcactgtctgagggctgaccactcagcttgcaaagatatctaggcacaatttgttttcaaaaggcttgcatgtttgttattttttgaactttggctttagatcagtttgggtgttctccagagaacagccactctgcttcggcattgaagcgttctctcactcacgctctcctccctactcccaagtgtcttgaatcactgctgcattgcaggttcatgcatctggactgttttcatgttcttggggcatggcgtctattttataaacacacggtcagtttacactgcctgggaacttaggggatttcctctctgtgggaaacagctgtgaggagcttgaccaaacttggctttgtggagagtaagacgtcgcctctgatcatccacgtggggcagctgcactggctgtgttcctgttgttatgcctgaggattctcctagaaatctaagctaagaagggaagctcattatgctctcctccctggtttccagtttagttgttcatgagtgattttgcatatcataaaaccccatgtctgttcaccttcacgccgtctgccagcagcaccttaagccatctgactgctgtgggacctctgaggccacagaattatggcatcatgaagctggaagggactttaagagagccattcgcccaacacattagatgagcacttattatgtgcaaagtgctgtgctagatgccatgggtgaaggaaggtgagaaagacccagcctctgtcctcaaagaactgacagactttaggcttggccatcatcatcacaaagcattctgtgaccttcttcttcaggtgggctcaaggtgtcctccttagttcatgccccctgctgagcactatcacagcacctcctatgctgcagtgaagtgatcctcatgtctgtcttccgcatagaatgtgagcttccagagggcgggaccaacgatgctgggtgacatggagattctgcagcgcctatcataaggttttcataaaggggaaataagattaagagtagaaacactctatttactagctacttaggctaaccaccaaaaccagaggaggttggtagctccctgaagcagaaagaactagagaagccaaagggataccaccaaccttgagagtccatgaagaagctgggaaaaccggaagcatctaagccaccgttctcttggcccttctgcaaaccctctctgccacgtctgcaggagtttgttttagttcactagggctgccaaaacaaagtactgactggatggcttaaagaacagaaatttacttcctcaccattgtggagactgcaagtccaaggtcaaggtgtcagcggggttgtttcttctgggagctcctctccttggcttccagatggccgccttctctctttgtcttcatatggtcttccctctatacctatctgtgtcctaatctcttctcataaggacaccagtcatattggattagggcctactcatatgacctcattttacctaaataacctccttaaagaccttatctccaaatagagtcatatcctgaggtactggggattaggaagtcaacctataaacttggaggagaagaaggaggctgcacaattcagcccatgacagaagttaacactgatgctcagagaagtgccagtgagtccctgataaaagctacagccaatcagttcaggaaccaagaattaggcctgtaactgccttccttcttggctgactgacaaccctagagatacaaagcttcatccagcactggtaaccgaacttaactctattttgccaccaccacttcctgtacgtgcccctcgccccttggcctccccacagcactggtgctacctgaggtgtctgtatttgagccaaaggcaagagaaggtgtcaatacggaagagagaaagaaacatgtctcccttgggactagggtgggaaatgacaaggatggaggcaacttccaaggagaaccactggctcgcttcccaagctcataagcagaacatagaaaaaaggtccaaatgccctggctagatggaagagagccaagccaccagcaagtaccagcagcgggtctctgactgccagccaaggccatggcgctgccagacaggaactgacatggagcagagagagaggcctggcagcgggatggcttcaccctccacacagcttttgctgttggcttctgcagggtcatgagtcctcagcagcctcagttcccagagtcactcttcactattgggtgccagttggctaagtgccatattggaaaaagagtacgggatgtgagcttctagatgaaccaacccattataatcagacttggcttagtttggccacacattgccaagacaggagggaggtgttgctgactcagcaccaggcacccaaggacaggcaggtccagaagtggcttgaggtaaaggaatctacaatggacaactgtagtgtcctagagatgcctagggtccagccattaagctgtagtccagttctctcggcaaaggaaagttcacagtctatcttctcagctgcccctgaatccaagtctcaaggtgcaaagtcc

SEQ ID NO: 1884409 - DNA, 4001 bp, Homo sapiens
ctttgaggatgtggatttttgtcatgttcatgatctcccacacttcagagcagcatcatgattctgtcagaaacaataaagtaataaatgatgttcaggaaattggttgacaatgtgaagaaaaataaaagtagatccctacctcacaacgtatctaaaaaattatacctaggctgggcgtggtggctcacacctgtaatcccagcattttgggaggttgacgtgggtggatcacttgaggtcaggagtttgagaccagcctggccaacatggtgaaaccctgtctctactcaaaatacaaaaattagctgggtgtggtggcacatgcctgtaatcccagctactgaggaggctgaggcaggagaatcacttgaacccgggaggcaaaggttgcagtgagccaagatcacccctctgtactccagcctgggtgacaaagtgagattctgtctcaaaaaatgaaataaaataaaataaaataaaataaaataaaataaaagacaaataattatacctaaaaggctgggtacagtggctcacgcctgtaatctcaacactttgggaggcggaggctcaggaggattgcttgaacccaggagttcaagaccagcaacatagtgggaccccatctccacaaaatatttttaaaaattagccaggtgtggtggcacatgcctatagtcccaggtactcacaaggttgaggtgggagaattgcttgagcctgggagatgagactacagtgagcagttatcacgccactgcactccagcctgggcgacagagccggaccctgtatcactcaggctgggcacagtggttcacacctgtaatcccagcactttgggaggccgaggcgggtggatcacttaaggtcaggagttcgagaccatggccatgaccccatctctgctaaaaatatgaaatttccccaggcgtggtggcgcgtacgtagtcccagctatttgggaggctgagacatgagaatcgtttgaacccagtaggcggaggctgcagtgagcccagattgaaccagtgcattccagccttggtaacacagcgagacaccgtttcaaagaaaaaaaaaaagcactcagattaaaaaacaaaatgaaacacaatacaatactatatagtcatggctacatataattattaaaaatggactgggagaacacaagctaattctaattcataatagttgcttctggagaggatgagagggtaataggcttgagagtagaaaaaacaggtaagtttaacttttattgtattatctagcttttaaaaaataagcaaataaatcataatgccagtagtcaatttagggtgatgggtgtacagtatttacaatattctccgtattaagtgtcacaaaataaaaatgattatttttaagtaaatgggatgcctgtggatgatgtagataattccctgtaattttctgttggtcccaatgtaaagctgacttttctagacgttctgtgggctcacaggccatcctagttccattcaccagacagatccaggcggacgcccagaggcgtgtgagctggggctacaggcttgcaaggtatcgagttcaccggctgctgaaaaatcagttatgaaggtatacgtaggggtgggacagtgaatggtgtataaaaaggagggtaaggcagaagctggggccgcaggatgtgggttagaaaagtgtgccgaggtgtgtgaactggcatgacagcctaagtaagacgcggaatgtgggtgccctggaggtcccgcaaggctcttcagctctcagtttcgggagctcaagccgcaccgctgctttcacagctcatcgggaacaggctgctcagttcatttccttgatggccaccctcctccctctcggccactcccctccccatcaacaaatcccaacgcccctcacccgggaccgtggacctcgaggagccaccgttgcctcggatctcggaccaccaaacctattctcccgccaattcggccttctgaccttcgccttctgaccccgagagctactcttccgtcttccgtagcacaggaatgcgttctggggcttcaagaagctgctgtttttgaaaatgagtcctaccgaggcaagatggcaggtgctgcagccaggaaaatacatttccgtgtgttttaatatttattttcactcactacaactctttcgtggagggagcggaatttaaacttccgggtcagcctcagtgcagcttgggaaacgtagttcctagtccccacgtctcgctccttggagcccagactgagggagcgtcgcgaaagttgcccgttttggaacgctcccatttggctctccaaagggaagaattggttaaatagttgcactgaaaataatgcgattcaaatttctcattttccaagaacgctcccttgctgaagcttgcaagggcacggtactcccctctccttgaccctgaaacgtgcagcaagtagataacctcctgatccctgacagtctccgcctgtgttgatgccccgccccctctgctggagtccgagccgccgattggctaggagcacttgagcagcggaagcagctggctcgcgcggggactgcggtgagggggcgagccgtgaagatggcggcagtggtggaggtggaggttggaggtggtgctgctggggaacgggagctggatgaggtaagcggagttgagagacgaggagagactcaacctgagactgaggggaggggcagtgaggtatcgggaggtgggggtcttaggagagaagggaaagatcctgagagggaaggagctgactagggggcgggtgcgtggagagcgaagtcagaggcactcctgacttggggactccgaggcggccttgggagtagaagacttgcattagcctcaagggtgaagatggaggacagagagagaggtcggaggggtgggggtgttaagattttgtgattactagctgggtgtcttagggtaggaccgaagggctaagaggtagtttgagttggagggacgtgaatttcttcaggggaaggctgggcttctactgtgggagaggactctgtctaagcctagggtgggggttggggacacagaccgggaaagagtgctaatccactagtagtatagctttgagttatcttaaagttggaactgttttatttatcgttccattctaagactttgtatctaatgcatgctcagtaaagttttggccaacgaatgaaggaacaagtggatgaataaatgattgtatgccggaattcatgcatttattcacttaataaacattatgacttttgctccgggttctgggccaggtgctagggagacaaggggcccctccgttgaagagcccacagtctagtggtgggagacagacaagaagactagtcattgcattagagatataatggtggcactgagaagtgtgcaacatttcagcttgggatagggaaggcttcccggagttgctgagttttaaacgataaataagtgtctctctcttcttctggatttatgagttccttgaaggtgagctccttgagattgtatgttccctttacctatctaataggcatttaaagactggtgtattaaaataccagtggtccttgaaggaatcactaggaggaaggagatgttgagtgtgaaaggaatgaagggacagggcagagaagcagagacagaggtgaaaagattctgaagccatggagacattgatagctagtggtgtttgtgatcttgcacatgccagcatatgggcaaagacatcacaggaataggaggaaggggattggttgtcagagatagaaccagtgagatctctgaggggtcagaatcttagaggccccttgctgtgtgttgggtgtgggaagagtggggaggattggggatgattgaagatgaggttcagagaaagggagaagtggacttgggaagcaataagactgttgcctggtagtgggatgagttggaggagttggattacctgattgggatc

SEQ ID NO: 1884410 - DNA, 4001 bp, Homo sapiens
gctgctgctcatgccaatacacctcattccctaattccaaaatggctagcaaggtcccaacatcagccttttccaagaacagtctccttcagagttattatcctagtacacggttcagaaaaggtcctcaaagcagccaatcttggctttagatgatgatagtgatactttaaacaaaaacatgaaagaattcaagttcctttgtaatctaagcaacccacaccttgaggttggcctgcacatctgaaagggaaatcgaaaacattttataaaatacagcattttaaagagccagggaggtaattttgaaaaagggaccagaaacttccctttcagttaagacttcttgcctttttctacagagtggtgaagtcttctctataccactccagtctaacgtgaccctgactaccagcactcaggggtggatggggagtggttactactgtcaggaacccatctcttgtggattaaagtcttctgtgcccccccaaattcctatgctgaagccagaacccccaatgaggtattaggaggtggggcctttgggaggtaattaggtttagactaggtcaagagggtgggaccctcctgatgggattagtgcccttataagacaaggaagagatctcttgtcaatgcaatctgaccacacaagcatcaggcatcacagtccagagggggcacagtataaaggggtgaggacccgggtattgagtaaagatgagctatttgcaggcaggtagcatcagagctttctgggccaaagcaataacgatacaacaaaaaggaaaggcaggcagcagatcctgcacagtttgggccaaagggacctcacaagcacagccctgctctattacgcagtgagcgcacgctcccaccaggcctggtgggcacagcagctgaggctccctttctcaggaaagagaggctattcagagagctactgcactgcctgagaccctcggctacttccacagatgccgctaacaagtgaaagtagactttaggatgctgctttcatagttaaggattaattgggtttaaggctagaactggaattggtcattgagttttaaagactgttgccagataataaagttgaaaaatacgaagcatccaaaaatctgaacgcccaagaccttttcctacagctctatcagcctcagagcactccttcaagatttcattgctattaaaatagctgagtgaggaagaatcaggaccagcgcggctccgcagtccctccctactggctccccgcccactaacttgcagatcaactgtgctttcctcgttggcacccaccccagcccccgctcaggccccggcaatgagaccagcgagcggcggtcagagtggcgcacccgcgctcgactgctgctgtcggccccgccgggctcattcagtggactcgggcgcccccgtgaggccgcgggtgggcggcgcacctagctagtgcgccctgggtcccggcggcaaatcctcgcggcctggcactcacttgcgcgccatctggactgccgccctcttcccccgagcctcgtcagcgcccggcggatcggctgtttgctaggtcgccggggtccctagggccgagtcggcggtggccggccaagcagagctaacgagacccttgggagggcagctgcggcagccgggccatggcaacttgtcgcgctgccgccgccgccgcggccgccgcagtgtaggctcggcagtgcccccaggccccgcaccagcccgcgacctgctccgccgccgcccttctcccagtccctgccccgctgtcagcggaggcccccacgagctctacactgagcgcctccccgcactgccccgcggcgaagtcgccgtagaggaagaccgggctgggggcaaaggggcgtcagccctgcccactcccagtgccatccccgaacgcgccctccccggcccctccaaaaacctgggtgtggccgtcccctgcctggggccctcattgaaccgaggcctcatccatctttaaaagggaatggggagggaagggaaagagccagtcgccctctggcgcccagcctgggatgtgagggtgctccactgacacactaaagtgaagggccccggagctacctactgagctccccatctgggtggggaaaataatggtgttatttcataggggtgtcacggcgataataatctaacgtttattgtccatttgccaggaattaggctgtgtacgttactccagtgacctcatttagttcttacaacactgatggccccatcatgagtgtacgtttattcccattttacatatgggaaaactgaggcctagattcatatgacttgacctgaaggcacacagccagtgacaaagccaaagctctttaccccagtgttttctcttttttaattatttttggtacagacagggtctctctatgttgcccaggctggtctcaaagtcctggtctcaagtgatcctcccacttagcctcccaaagcactagaattataggcatgagccaccacgcccggcctaccccagtgtttgagaaagtgtcttccaggagtcacaactcctcagaacaaaggatttcatggcccaataatttggggaaacactgcatgttgtacttccctctgcttttgtggggtctgacaacgtttagtgagcttgagtctctccaagaagaaaagtgtttaacttggtttgattcagtgttttccaaacttatttgaacagagaacacttttaaaaaagacatcccacaggatgctaataagaatgtctttttaaaaagtgttttctgtgtacacttttagacacacttgtctcctcagtctcagatgaaacaatagctgtgggagtctttgtatcctaaaaagtgctgtaaaactatgagggcatgttttattgttgctagtgttatcataatcatcttcattatttttaggaattctgtctgtagcctcctgggactccactctgtggtgctgaataagaataactaacatttactgagcgttgcctatgtgccaagcactgttctaagtgccttccgtatattaactaatttattccttaaagctacccaggtattatggccatctgaggaaaaaagacacagaatctgaggatcctatgagtaatagatgtaaaatccttaaaagaaagcccttacaagtgctacgcaagtgcttgccattatcattatccccattgcacagaggaggaaactgaggcacagagcagttaagtgacttgctctagaccacactaatagtaagtgagttggaacccaggcagccaggggcagggcctgtcctggtacccactgtggtatcctgcctctgtaccagccacggaaaggaaaccccaggtttgcaccctcatcagcaaagccagaatttcctgtgagtgcctcctgtctgcgtaggacctcctcccccatctgtccatcataaccaccgccacaaacaccctcatagaaaaagaaaagggacaaaatttggggttagacaaccctggattggaccctgacctaataatttactggctgagtgaccttagacaaataaccatcagtttcctcttcagtaaaaagagcgcctcatctacctcacaggtttgtgtgaggatagactaacatcctggatataaagcactttgcacagggcccaatgcctacttctgcttctgcctcctctgagaagacttccctgactgtgcctccctccccctagaagggatcaaggcccctccactgtattcccctgcttataccccacctcagcctgccaaatccttggtcttgaaattatggcttcatgtgtctgtctccctcaccttcacaaaactgagttccaaaaatcagtcttcttcactgctatatccccaggttctagcactaccaagctcagcacacagtaggagctcaataaatgtttgctgactgaatgactgaatcataaccagaaggatagctgatattaattattgagagcctgcacta

SEQ ID NO: 1884411 - DNA, 4001 bp, Homo sapiens
ttgattctggctaattacacacacaaggaaattcaccaaatgagcaaaacccagctatggagttcaggtgggagctgtgctatgacttggccattggcaacaatgccaatgctagtggtatccctgggtatggggactggtaaaaaaaattggctaaggttgcagcctagccctctaagcaggctttagacaggccataagaaatcaggtacagaggtggtccctaaggctgggtactttgggagagctaaacccaaagcattctgaaggaactgcttaaatgaagaggtaaaattaggtcataatagggaaaaatgaggttgtgcacagaactgtgggggcaaacaagatacatatgcatgtcactagctgggggaatccagagaaatgggataagcagctaggaaaccataagtgggatgtggcacctgctgtatgctactagtttggactagggttcttaaaggaagctcatctggctagatttagggagtctagaaagccaaggcagataaagtacttttaatacatcagaaatgtagactggacctacagagggaattgacataattgctaaagcttggactttgaaattggaagtcttgggtttaaatctcagctctgacacttagtcacagtgtggccttgtgcaaattagtgtctctacaacgctgcatcctccattaaagaaccccacggggtcttttaagaacttgtaaagtccatatcccagtgcctggcatacaataagtacccaaaaatgaaggaatatgggctgataccatcacaactaattccagaccacattcattggtgacactgagcctgttaacaatttgctttctctgatgggaaggaactcaggaattggcaaactgatatgggtatgggtttcacagttgaaagagcggctagggaaccacgggcctgatgtagatggtggcttagaaagtagagctattcggggccaggcgcggtggctcacgcctgtaatcccagtactttgggaggccgaggcgggcggatcacgaggtcaggagatcaagaccatcatggctaacacagtgaaaccccgtctctactaaaaatacaaaaaaaaaaaattagccgggcgtggtggcgggcgcctgtagtcccagctactcaggaggctgaggcaggagaatggcatgaacccgggaggtggagcttgcagtgagtcgagattgcgccactgcactccagcctggggacagagcaagactccatctcaaaaaaaacgaaagtagagctatttggatggtgctccagggtagcagctgatctggcaaactgatatttgaaccacaatattaagacaaatatcattcagtctttcttcctagacacagaaacaaagacccctttcccagagatgtgtgtgtgtgcccacacacatgcacacacttcaaagccacgggtcacaatcaaacgtggtttccctttgcagtgaacacactggcttttaatactttccttaagtaagttatagcctcacatgtgaacttttgatctctgaaatgaagtccataaatttcattgtcagaatggttgctactcttttatagtttacgtgtaaattttgttattcctatatccatagaagtcacttcagttttttctctctatggccacagtattactacatttaatctgtgctggaaggtgccctgagtttaaattaagttgaatgctgggctgagtgtgaaacacaagagatactgctagtctaagtctggggcttccttaagagagcccctccttcacatctcggaaacaaggaatgatgttgcaccactcagacctcatctttccatcccagctgtattagtccattttcacgctgctgacaaagacatatccgagagtgggaagaaaaagaggtttaactggacttacagttccacatggctggggaggcctcagaatcatggcaggaggcaaaaggcacttcttacatggcagcagcaagagaaaatgaggaagaagcaaaagcagaaacccctgataaacccatcagatctcgtgagacttattcactatcacaagaacagcacggggaagaccggcccccatgattcaattacctcccctgccgggtcccttcccacaacacgtgggaagtctgggaggtacaactcaagttgagatttgggtgggggcacaactaaatcatatcaccagccttacctccgaccacttcattcctcacactacagtccagtcacaccaaattgtgatgattccttcaatgcaccatgccctttattgcattctgcctttgcacagtctctttcctctaccccaagtgacccttcttctttccagagggattcctcttcagcctaaatggcttagctcaagactcatcaatcagaatgctctctatagacctcctcaatccctttgaagttactttctcccttcccattgcccctgcagtattctatgcagcttctcacatcataatatctccatctgtgagccctttgaaagcagggggagtgtcctacttatgggcttagtatccccagcatctattaccatgcctggcacttgtttggtgcacattaaaaatgtatgaatgggccaggcacagtgactcacgcctgtaatcccaccactttgggaggccgaggcaggcagatcacaaggtcaggagttcgagcccagcctggccaacatggtgacaccctgtctctactaaaaatacaaaaattagccaggtgtggcggcgggcacctgtaatcccagctacttgggaggctgaggcaggagaattgcttgaacccaggaggcggaggttgcagtgagccaagatcgcgccactgcactccagcctgggtgacagagcaagactctgtctcaaaaaaaaaaaaaaaagaaaaaaaatgtatgaatgaaagccaaattatttttttgttttttcttcctgcagaaacgatgaccatgggtaagaggactgcttgtgccaaggacaaaataggacaaccatctcacaaagatcttaagtaactttttccatccagcaacatccagacgatttcagtgaccaaatgctcagctgtaaccacagcactaactggccttctttccagattgggtttggtgaacctgaatggtccagccaccttctgcaggtggcccaaggtgatgtgctgcagggaagcatgtctctcatgccaagaaccaagatcggactatgaacaaaaacaaatgatagatatagtgacagtaccaagagtaccaggactcaatgtttcatatgaagcccttggtgatgaggacatagcatctgccctggaaatcgttattccaacataatattattttctagaatgccctggaaggacagaatatttaaaaatatatccaggtgctaaataggcagcagatctcaattcacacatgactacctttgagctaatgactgtctccagaaaataactgtgccccaagaagtgctccagatttgcaaggaatagccccaagagaataccaagacaagcaggctgttccctggaaaaaatctaatgcaaggagggctagttcacagcaaattcactgcctcctcccatgcacgtggtagagagtaccagtatcaacatggccctgttttctgctaaaaccagattttgaggaatcagagacccccaacactactcactcagtagctagcagccccttcctttcaactgggagtgttattagaatgaaaagtaattagttagaagggcatacatctcagtggcatgagcattgtggaatatcctttcctaggcacattcgtccactaagggaacagcctcagaaactggtacagcaatgggtgagatgagatcatggagagagaacacagccatcccctatagaaaggcacagcttttgggcttctctggcctgaatgccttctggggtatttccatatgcaacagcccagagtcatagccttgggcaaccacacatagaggtttccttctcac

SEQ ID NO: 1884412 - DNA, 4001 bp, Homo sapiens
tcaattcacccacaattctctatctgtgcacttagcaaactaagttattgttgtttgttaatcctttgtctcctcctgtgagatcctaaaggatgaggattatctattcatttgatctgttcatctgattatatattcatctctgtaacccaaatgattaatagatcatttgatctctacatctgatcgtttattcatctctgtaggccaagggttttatgcattactcagcacaggcacacagagattcaatcctattgctgagtacattgatttccagctgggaattttttctgggaaaatagccctgccttccatctttgaagagcctcttctgggccctggtttggttggtcttgtcattttctattactgtggttctagcctcagtttcctaatctctataaggagctaacggaacctccttcactgggagtttatgatgatgactggagacaatgcagcttctccgtgtccaacacagttctaggcacagagccaaataccaaaaaaaagttgattccatttttgccctcagtcaagtctcgttgccaatataagaagactaaaaatacaagacagaatatgagtgtcacatgagtggcacagacattcttccaacttgcatctagcctctgccatatgccacagaattggctgaaatgggaggataaaaacatgcataaaacagtggcaagtgttggacaaaaagatctcaggaagagggtgaaaagccttttacccagatcctcattccggggctgctggagctgtctttagcaccaggctggaaagcaggaggctgtcccataattgatctcccctagctgttttggaaacacatacacacacacacacacacacacacacacacacacacaccccaatcaccaagttcttcagcatttattatgtgtcagacactgctaaatgatttacaggtattatctcactgaactcttagaacaactgtgtgaggtggatatgaacttccccactttacagccggccactttgaggctcagagaggcaccatagcttcaacacagtcaagcaacaagtaaacggtggaggaatccacctgctgggagtttactggccgactggaaagcagagagagggtggaccagcacaaagccgcggggggctggtaatgagacaggaaagttgggttcaaacctgggtcacatgatccccagatccctaggagccgaagcagaagcaaagaaaaaaaggggtgcagcctggtggggagggggtgcccgggaggccgggagagaggagtcacggtggttgtgcgccttcctcgtccccagtgcacaggtcaagcctctcccctcccgccctctcaccctcccaaccttatttagaaaccgtgtccccgagacaggaagggcggcgggccgagaagcacggagagtcccggtctcatttcctttcgaatccccctgtggaatttcatttcatacggtgaggaaatcagagcgcgagaccgtcggcgggtctgcagctccgcagctctggggcgcctccccgctggcggctggaggtgggcggctccctgcgcaggtcgggcgagtctgggggcggggagaggccgggccccgatcgccgctggtccggagtgaaaatagctgtggactcacgcagtaccaggcaccatgctaagccttctacactttatctctaatcctcccaagtgactttacagaggagactgacgccgaggggttgagcaatttgctcaaggtcacacaaccgggactgaaagccacaatcggtgtaaatccaaatccccaattctttgtgtacgtttctctgcctgacggggaggtggccaccggcctaggttacagctgaaaggagacaggaaggaaagggggcagatggaacagggcgcacttctcacctgcagaagggggcaggacggcgtggctggagccactgggctgcgtccctgcttggcccctgcgcgcctagatccgggtgggaggaaagcaagagccgggaggcgggcggggcggggcgctaggggagggagggagggaggggcggccggaggagggggccggagggcgggggcctgactcctcctgcgggagagcggccccgccccgccgcctcgcccctagctgcccaccgcgcccggccattggagaggcccgctgtccgtcccgccccgccgccgcgccgcgagcctccagcgccgcgcagggctccggcggtgagagctgcgcagcgctggctgctggctggcctcgcggagacgccgaacggacgcggccggcgccggcttgtgggctcgccgcctgcagccatgaccctcgcagcctgtccctcggcctcggcccgggacgtctaaaatcccacacagtcgcgcgcagctgctggagagccggccgctgccccctcgtcgccgcatcacactcccgtcccgggagctgggagcagcgcgggcagccggcgcccccgtgcaaactgggggtgtctgccagagcagccccagccgctgccgctgctacccccgatgctggccatggcctggcggggcgcagggccgagcgtcccgggggcgcccgggggcgtcggtctcagtctggggttgctcctgcagttgctgctgctcctggggccggcgcggggcttcggggacgaggaagagcggcgctgcgaccccatccgcatctccatgtgccagaacctcggctacaacgtgaccaagatgcccaacctggttgggcacgagctgcagacggacgccgagctgcagctgacaactttcacaccgctcatccagtacggctgctccagccagctgcaggtgggcgcccccacccccacccctggcgggaccccttggggagggacgctccaaactaactttgcagagcccatgccaagttgatcatcctagcccgaaggagacagctctcctggaaaagtgatttccatccccacccccactttctcagggactggaagccaaaacgttgtgtaagtcatctggcctgggaaagaacccactcttacaccccgcccttccgtttttctctcttgcccacccatgtctggcccagacccctaaccccagtggagctgagggttatctctgccaaggattctggccgccactgctcggtgggcgagtgggagggagccagctgcagctaagacttggagggagtgataaggagaccatccttcaccgaacttccttctccccactatttttggggtgttattaaatgaaacactactgcacctttttctgctgaatagccccttctcacgacgtcccgcagcgttttagaggtcatgcatgaaggagtggttgggttggcttgagttctttcttatcctcacagttgaaggcacgtttaatgcttggagggtgagaagaagctgcaggaaggtggttggtatattggaagaaatttttttgcagtcattaaaaaatgtaaagcatatctaatgatagagaaaatgtttattccacagtaataagaatttgcatatacagggtgattataatcctgcaaaataaaaaatttattgggataataaaagactgacaggaaaatttttaaagtgttaacattggttatgtttgggttggtgaggctgggtgatttttagaaatttagaaaagagagaagttgtgggaaaaagtagacgttagttgtccaggcttcagaaatctggtttctggccgggcgcagtggctcacgcctgtaatcccagcactttgggaggccgaggcaggtggctcacgaggttaggagttcgagaccagcctgaccaacatggcgaaatcctgtctctactaaaagtacaaaaattagccgggcgtggtggcgtgcgcctgtaatcccagctactcaggaggctgaggcaggagaatcgcttgaacccaggaggcagaggttgcagtgagcggggattgcaccattgcactctagcctgggccacaggagcgaaactccgtatcaaaaaaaaaaaga

SEQ ID NO: 1884413 - DNA, 4001 bp, Homo sapiens
aaatgcaaattcagactgcttcccttcactttctggtagtatcaatatttgcatttcttagatttccatattagccacaaaatggtctaccagtttaaagaaggtagaaactgcaaaatgactttttaagaccaggtgatccgacagttcaaaggcattctcatgcatgcttgcagtccttgaaacatatccatatagtattgtttttaattatttgtgcccaaggagtttttgtttttgtttttttgtttgtttgtttttaatttaaacaagaaggtgttaaatcctctgctatctggggagaactgcagtgcccaaacacccacccttctctttctcttggacttcagtgttattagatgaggtttgggaaagttttattagcactttttatcatgacactgggacaggagagaaaatgaattcaagctctaccagggttccagtgttaaacttggaaggtgctcacggccacgctcagccttactgtaggatattacttgagtgagtgcacaccctccccacaaactgaagttctactacacgccttcactcatctcctaccactcttactgggttgcatttcagcctcactggcctgctttccttccttgaacttgctaaatccacttctgacttaggatcttcccaccatttcctttgcccagaatgttctttctcccctggctccttcatgatactgaggtcttcagcataagcatcatatcctcaaagaaaccttcccgtatcaccctgttccaggcctttattgttgccacaccaaaacagtggcttaaacattaataattatttatttggctctggagtctgaaagagtgagatctcagcttaggagttctcactccaggtctttcatgtggttgctgtccaatgggcatcttgaagttttttccatcatgtatctgggctgggaagattcaaacatctaggtgctggcactgctagctgctcaggtctctctctctctcattcctctgaattgtctgtccacatggagacttcatgatagctggacttcttacattcagctgaaggcacctagagtgaatgttccaagaaaaatcagcagaagctgcatggccttttcaaactgatagccacttcctttgtgtcctattcttccaggtaggtacagaagcccctcaggtgcaaggggaagggacatagactctacctactagtagaacagtatcgaagtacctgaagacttgctttaagaccaccacacactacatactttataaaacagcctccccagcaccatatcacttcactttattataattctttgcatagcccatagtgctatatgtcatattttcttatttgtttattttctctctagcccccaaaagaatataaattgtgaaaataggggccttatgtgtcttattcaccactgtatcctggtgttcagtggagcagtgcctggtacttagtagacaataagtatctatcaaatattaataagtgaatgaaggataaatggcaagggctattctgaagggtcatctcactgagattgttactgtgggctccattttggatgacgatggaccctcctcaccctcctttttctacttccttctttttacctcccttccctctctcccacaaaataatttctaatcaccgatgtcagtatttcaaacctggagtccttagtataattgtgatccattggattcagcttttaccaccttgtttttgaaaacaaacataccaaagcatgccaatttcatcatttgggtatgtcaaggatacttacacaagcctgcacctggcttattttacaaatcacagattggcttgaatctgtcttttgtttcttaggattttttggttggttttgctttgtttttttgctttccttccagccagataagctgagatctggtctgtttccactgaggggtagtcatcagtctacccttctcaacatttctgttcctgagatttagctacagacttcacaagctgtaacattctaactacgtgtcattgccaccattgtctcttgtcacaatcctaattctatgttctgataataaaacttcattagtgtctgcacctcctttcccgtacctttgaaacactgtcttctgctgaaacgattagcagtgcgctgcgtcagatcatccggctgtctgacagccattgtgagtgagctaaattgtgagaaaatgaaaatttctgacaatttccattattgtcaaatggagatatttacttgtacaaatattaaaggttatttaaagatgtaaacggacttcatttcattagtggtatgcatcaggtaataatttaaaacaactacccagcctcattcaaataaattaccaattcattttctgaaagaaaaatgtcatttctccaggctgtgtttttaactgcttgcaatggtagaagattaaaaaaaaaaaacctatgaatatttcagaacagaaaatgttcaagttctcatattgtttaacataaaccagacaaagggctattgttctgaaaacctgactgagagttgcccaaccagaggagacagtgaaagatcaatgacatcaaaatgggctttaaaaaaaggaatagtagcaatggtgattacatcttcctgaattccagttctagaacttcactagaaaaaaatcaggatgtgtggaaatacttatctacaaggatgttcatcccagtgttatttataatggcaaaaaaagaaggtaggaaatgaaaaaaaatatgtatacaaggctaagggattgcaggtgtttgagaccagcctagccaacatggtaaaaccccttctctactaaaaaaaaaaaaaaaaaaaaaattagccaggcgtggtggcgggtgcctatagtcccagttacccgagaagctgaggcatgagaattgcttgaagctgggaggtggaggttgcagtgagccgagatggcaacactgcactccagcctgggtgacagagagaaactccatctcaaaaaaaaaaaagactaaggaattggacaatatattagaatacagccatatgatggtctggagtaaagatgattaataaatgtattgtagaagaattcattataaataatatgtaataaatagggcacggtggctcatgcctgtaatctgagcacttcggaggccaaggcagaagggttgctggaggccaagagtttaagaccagcctaggcaacatagtgagacagtctctataaagaattttttaaaaattagctgggcatggtggcgcacacctgtagtcccagttactcaggaggctgaggcagaaggatttttttgagcagaataattctaagatgctgtgagctgtgacagtgccactgtactccagcctggatgacagagtgagactctgacacaagaaacaaaacaaaacaaacaacaacaaaataatacatatactatgatatcatttataaaaagataaacatctatatttgcattgacatggacgcagggaggggaacattacacaccggggcctgtggcggggtggggggctagaggagggatagcattaggagaaatacctaatgtagatgatgggttaatgggtgcagaaaaacaccatggcacatgtatacctatgtaacaaacctgcacgttctgcacatgtatcccagaacttaaagtataataataataataataaaaaaatcttggtgtaatgttggacaacaaaaaaaaaaaggaagagaaggactaagaagaaatagatcaaaatgattacttggtagtgggatcactggtaagtttttaattttcatgggtacatagtagatgtatatatttctggggtacacgagatgctttaatacaggcatacagtgtgaaataatcacatcatggagaatggggcatccatgccctcaagcatttatcctgtgtgtattacaaacaatccaattacactcttagttatattggtgatttttattcttgtgcttttataatgagaaatatac

SEQ ID NO: 1884414 - DNA, 4001 bp, Homo sapiens
gtcaaaatgtaatttcatgcaatagtctggtatataaaactgatgcaagtggaacttctgtggttgggatggggcctggggagggagaggcacagcttactcctcagcttttactctgaccactaggtctgcttctgaggggtctctaaggaacctccaggttccatgaaacacagtaagacagacattgttcctagtgactccccacgtcacttcactttcttgctccaagaaaaggaagctgaaatccctggaggttgcatgaggtgaaaaaagctgctccttgtcctgtattcttgtgcatggaacctaccagggctggtttcctcacatgagtagggactgaagccttatctgggagccagtttgcccccagttgtttcaagaaataaagtgtcctcttggtcacagacagcagcagtaacaactttttcctgcggactggcagcattttccaagcacctgctcttcaggtgggagttacgggtcactgtcttcattccagacgggcggctctttgagtcatggcatgccagcttctgagtggctgaggactagatccagacaaggatttttcagtcccaaacactcttcctgaaaatgcaagaggagtagtctttagtcaaacagaatctccacaactgaaaaatttataccggactagacagtggtagtggttgcacaatattgttaaagtactacacgtcactgctataaacacttttaaatgggtgaaatggtaaattttatgttatgcatattttaacataacaatgataataattttaactaagtacgttgcctccttatttcctacagggtcaagttcaaactccctggcatagcttacaccttgtagtccccatacctgtaacctcatgtctgctatcttcccccagccccttcatctgatctatgttcagatcagctcacattgctctctattctctggacaagccatgttctttcacttttctatgctcaaacacaattttgcttttagtaatgatagcaaacacttatttaaagtgcttactgcatgcatatgtagacataaatctacggcttaatacatgcagggcttttgagtcatttaatcctcaccaattctatgaagtaatagaattgtaatagtaataatagatactattattaagcccattttatacttgagcaaattgagctaattgccttaggcaaggtcacacaactaagaagcagccataatagggtttggatctaggtgttctagctcctgaatccatgctgttcgtcactacactgtactgcctgtggatgacttacttgtccctgtagtttcatctgaagaattcctcctccttttcctttgaggcctgcctcaaatatcacttcccctgtgaagactgcctggtgttctccaggagagagtgtgactcccttctctaggaatggtagcaccccaaacacacacattttgcagcatatttcaccttgcatggtaatggcctgcttgtgagttttattccgtaccagagggtgagggctctgaagatagcgccaggtcttatttacctcgataccccacaacactcattacatgtctgatgaatgaatgcatagggggatggctgggtgcatttctctcaacttttcaatttcttgaaataaataacaaaatcttaccttccctcagaagtcctggcatggttcctttcatcttgccacagccactgataatcactttcattttctgtgtaactcaccaggcaagaagtccatgcagatttacttttagtagttcacatgacaaataaatactgcgtttgatttccaaacattaaaccatagtatattatagatagatatagagttatcattcaaagtatgatatttcaatctcaaaaggcttcccctgaagaatattacaaactcttcctctctttaagatctgctgggtaggaaagatgggagaaaatgaattaatgtttacacagaaaggaggataatgggggcaaaaataatagatgaacgtatgggtggatgagagaatggataaaatgataggtggatatgttgatcttggacagatgggaaatgagtggatatatcaataaacagatatgtgggtggatgggtggagaagaggatggtggatggttgtggttttatgaagagatgtgaaaaaggaagtgtggaatgatggatgagaagttgtatgggaagatgaatagaagaataggtggttgaataaattaaaaggtgtgtggttggatgaatgaatgagtgggatgatagatggacctaagtggttagtggatggacaggaggatggatggatgtgagagccccagaaggacataaggaaagatgggtggatagatggatgggcggatggaaggatatttaggaggatgaatgagcatgtgtgtggagagaggtgcccattcacactggcttgaacacatgggttagctgagccaaatgccagccctatgacaggccatcagtagctttccctgagctgttctgccaagaagctaaaattcattcaagccatgtggacttgttattgaggggaaaaagaatgagctctccctctttccacttggaagattcaccaactccccacccctcactccccactgtgggcacggaggcactgcgccacccagggcaagacctcgccctctctccagctcctctcccaggatatccaacatcctgtgaaacccagagatcttgctccagccggattcagagaaatttagcgggaaaggagaggccaaaggctgaacccaatggtgcaaggttttacggttcggtcatcctctgtcctgacgccgcggggccagcgggagaagaaagccagtgcgtctctgggcgcaggggccagtggggctcggaggcacaggcaccccgcgacactccaggttccccgacccacgtccctggcagccccgattatttacagcctcagcagagcacggggcgggggcagaggggcccgcccgggagggctgctacttcttaaaacctctgcgggctgcttagtcacagccccccttgcttgggtgtgtccttcgctcgctccctccctccgtcttaggtcactgttttcaacctcgaataaaaactgcagccaacttccgaggcagcctcattgcccagcggaccccagcctctgccaggttcggtccgccatcctcgtcccgtcctccgccggcccctgccccgcgcccagggatcctccagctcctttcgcccgcgccctccgttcgctccggacaccatggacaagttttggtggcacgcagcctggggactctgcctcgtgccgctgagcctggcgcagatcggtgagtgcccgccgcagcctgggcagcaagatgggtgcggggtgctcagcgcggacccggcggcagcccctccggctgagtcggccctgggggactggagtcaagtgagctgtctgcgaagtgcattgggctccggaaagcagggctgggatttgcgctaaaccgttggagaatgtgtctgtggaagcaccatttggttgaaagaaaaagagaaagagaagaaagtttgttgggcaggctgccggcgcgcagttttgggcgaggtcgctagagctgcagcacatggcagaaagtaaccgttctcccggatgcgcacagtcgttgtctggactaacaggctcctgtgcccaagggctcgccaagccccaccgggctgtgtctaggcagggcagagctgggcggggcagagactggggctggaacagggcgagtggctgttatcaaggtggtcacagaagggatcacaattccaagtgtgagactagctggcaatgggttttccagaaaggggtcctgggttctcccagctccccactgagccttgttccaaagcttacagtccgcagtgtcactgccaccttagcgctgtggaagcttgaaccagctctgcggtgaggtcttgggtctccatgagattccagcctgggatagggagcatgaata

SEQ ID NO: 1884415 - DNA, 4001 bp, Homo sapiens
ctaaatatttcccaatgaattcattattgcattcctctattgataggcattcactttattctgctttgtttccactataaacaatggtataataaatatgcttataaatgtgtctttacatactgtagatttgtttatttgcaatagatttacagaaatgggattgttgggtcaagatgagtatggctatagtttgaatatgtgccctccaaaatcaggtattgccaatgtgttaatattaaaagctggtgcctgtaagaggtcatggttgttcctccttcattgatgggattaaaacccttataagccccacatagcattaggctatcgtttgcccttctgcattttgccaagtgaagacacagtgttcctaccctccagaggataaagtgtcaaggcagcatcttggaagcagagaatgagccctcaccaggcaaccaaacctgctggtattaatacattgttctgggacttcccaaccaccagaaccgtgggaaaataaatttatattctttataagtgactcagtctgaggtgttctgttataacagcacaaattgactaagacatgtatccaatataaaatctgatagaccttgccagtttgctttcctgaaggatgaaaagactctaacttattttagcagtgtgtgaaaatattttttcttacaatcataacagaaatagatattatgattctttttgaagttggctatactttaactgatttttgaataccttgtctatatttatatgtcattaggttttttttaaggattttcctattgatatattttatctatttttctatttggctatctttttgtcagtttataggaactatttgtatatgataggtaaaatatttttgttatcagaaatatatttgttccaaatctttgactactgtctttatatatgaaaatttttcctcattaaattattcttaatttttcatctttatctttaatcttattactccagagtatgcagatttggttaatttctactagattttcttgcaagttttttgttgctcttttgttcttttaattttttattccttttggaatttattttgtatacattaaaatcgatgttgaattttatttttatccagtatgtcatcaccacttactaaatattgcatcctatcccacttatttgactggactcttaattttacatatactaccttcttatatacacagatacatgatctgaattatctttcaggttccggtgacatgttgatctatccctctaccaatagcacattgactatcacaaggcttgataatgtattaatagctagatgacaaatacctctcactaatcttttattttccccccaactccttctcttacctattcccagacatttattctgctatgtaagctttaagaaattttcttccaaccctttttagcagctgtcactgtttaaagaaggaagaaggaagaatttaacctaacattagtgagataatgtatataaagtaacatactttgtgaatggcagagggaatattttatccagcccaatctgatagatctgattgtaaaataattagcattacacccaattctacctacatggtttcctttgatgcttaccaaagacttgtagctatagttttctatttttacagataaggaagtgagatgactaaaaggggaactaatttgtgcatgtcatttttaggcatatttccttattctttttattttttatttttttagacagagtcttgctctgttgccaggctggagtgcagtggcgtgatcttggctcaccacaacctccacctcctggtttcaagtgattctccagcctcagcctcccgagtagctgggaatacacgtgtgcaccaccacacccagctaatttttgtctaagtacctgtctaaataccaaaatacctttatcctcagcatgaaaatgcctgtgcactttgcagaaatcagtctaagcagctctggacatgaaagtgaagcaaagtgggtgtgatcatctgaggaaaaaaaaaatctgcattcaatgtgcaacatcacaatcagtagggcattctgttgccagtaacctggatactgagcctggttttgaccaacggcaaattttcggaactcctgacaatgcagcaggaatcacaagccttttgaatcaaatcctgtgattcaggtcttaaaacctgaacttgactgcctccccatgggagtcacaagttcagaactactggcttttgtaaaattagatcaatgaaaaccttgatacaatccttgtccacatcttcaaaaccagaagacctcatattccagtttgcccagaatagtccaggtttatgtctattgtccaagtttgcttaataagaaagtccctttactctcaaaattatctcagcagggataatacattatatggtcatgctattcagaaagagacaatgtgagacatggcatatgtagtagtacagagctgaacgagctcacagggtaaggtttacagggttattagcagagagccagagggcaaaaactccaggaaaaaacagccatcacttgttatatgttattgctatcttaaagaaccattttctggtcaggtgaggtggctaaagcctgtaatcacagcactttgggaggctaaggcaggcagatcacttgaggccagagttcaagatcagcctggtcaacatgacaaaaccccatcactttgcctgttgccatccatgtaagatgtgacttgctctttcttgccttccaccatgattatgaggcttctgcagccacgtggaactgtaagtgcaattaaacctagttcttttgtaaattacccagtctcaggtatgtctttatcagcagcatgaaaatgaactaatataacactcaacctctcttttctgtctatatgaagttacctattatcaatattttatataaataaaaacatacaatatgtgatattttgtacacatatacacatatatacacatatacacatttataatataaataaagcacatatataaaatgcatatataatttatatttctttccatatatataaaaatacaaaaaaaacacattttttgtgtttatccattgatcgacatttgggtttttctacctttggttattatgaatagcagtgttatgaacattgatgtgaaattatttgttttcagttttgggagggtatatatacctacctaggattgaaattgctgtgtcatatggtaactctatgtttaaattttttagatgattgctgaaccatgttctacagtggatatcatgttacattcccgccagcaatgtacaactgttctactttcaccctatccttgccaacacttttttttttcattttttaaaattctagtaggtgtgaagtgctatccattgtgaattttctatatctgggattttgtaatctgtaaatagagatagttttacctcttcctttttaatttggacattatttatttatttttgctaattgcttcactgagaacttccagtacagtgttaaacagaaggatcaaagttagcattctaacttttctttctcctgatgttagcgggagagctttcagtctttaaccattgaatatgattgtggttgttgattcttcataaatgacttttatcaggttgaggaagttatctctactcctagtttgttgagcattttatcataaaagtctgatggattttgttatatgtcctttctcataaataagattctgggtaaaacaaaataaaagatgaaaagaataatgaatgattgatcaggaaaactaaaattaaaggatgagttgatttataattagatagaagagaaatgagaattactttagatgtagaaggaacaacatgatcaaaccctcataggcctatgtaagcatgatataagaatagtaggtgactttagctgcttttcagtaactccctacattatgtttgaaaacaattctatgtaggtgttccaacagccccag

SEQ ID NO: 1884416 - DNA, 4001 bp, Homo sapiens
gcactccagcctcagtgacagagtgagaccctgtctcccacacacacacacacacacacacacacacacacacacccctctttggaatctctgatttagtatatgatttaggcacaactctccctttcatacacaccaaataccttatgacattaaaacatttatcactgggctgaatgagagttaattttgttttgatagatgtttcagattcttttacagtcctcacacaatgtttactgtgaaccaggcaccgttctaaggactttacctgtattaattctctcaacaatgctgtgacgtcatcctcattttacagatgaagaaaacaaggcactgagagcttggttaagtaactttgctgaggtcgcagaactggaatttgaagcctggcagtctgactttagagtccatattcttaactgaggtgctagactgcatctttctttggaaaaaagggaagaggatatcataaattcgggaacttcctcaggcttcttctgttagcttacaaactatggttagcattttcatatgacatacgagaacaattatctcctcctctactttatccctattgcttaatcctttggcttttcagtaacacccaaagacaaccagtcattctctccagtgagtctcagagttaaaaatttagctgtcttcaataagaatgatacattggactttggggactcgggagctcaggggtaaggggaaggctaatgagggacaaaagactacacattggatacagtgtacattgctcggacgcaccaaaatctcagaaatcaccactaaaaaccttattcatgtaaccaaacgccacctgttacccccaaaaatcgattgaaataaaacaataatttaaaaaagcacataccccccaaaacatagttgacctcagcttaaaaaaaactaacatacatttgttattttaaaaaatattgcatagtttatttgcattcattggtcagcatcctcagttatgtctgctttgaaagaaaaatccgctgaggttttaagttaatgatccaagatatccaattaagattttcagctttgaaaaatatggaaatacggtacagctgtgtactggatgtgctgtgctactgttaagttccagcactttaaggaacgtttcaggagtgactaatacactaattcattaccagaggtcacagagctgtcataattgacagtgttctttgagtacgaaaaaccggaaaacgatgcaacttccaaagcacggaggatggagactggtattggaaagtaacttttctgctgggctcaggagtttttatatgctcaagctatagacaactgtaccaacgcaatagactaatgtaatctaactattctacaaacggccacacctacccagactaactggaaaacaatagtttataactggaattaaatagttgctgttctttaattaatgagatcggtgttcttgaaaagctacagcgtacgaactctaccctggtccatatctgctttttaaagccttccccagaaccgctctcacttcagccttggtgccttcccggatataccctccagaggcttccccggtccccatcctggacgtcagcctctgcacctagaggccggcttagagggaagacgggcagaggcgggggagacaggagagagagaaacggtctattcctccttaactccgggccccctcgagggcctcacccctcctcccgggggctgagattggagaggaagtgggaaggctccaatctgttcctcactccagcgccctcatgcccccacccttctcttcagctcggggcttcggcgcgcctcgtccccgcccttcgccccgggagaggagcgggcggcgtgggagggctcgcggagaaaggcccaggggagtggacgacctccgcccggcagccacatcctcagcagcagagacccggagccatccgcccgcgggcgagccaggcccgagggcagccccggagaccgcggtggccggatgcgcgggcgcgtcacttccgggcggtgcagcggcggccgcttggaagatggctgcgccctgtggctcggagctgcccgccaactcgccgctaaaaattccgaagatggaggtgctttccccggcttctcctggtggcctgagcgacggaaatccatcgctgtccgacccttccacgcctcggggtgcctccccgctcgggccgggcagtgcggcgggctcgggggcagcggcgtccgggggtctcgggctggggctggggggccgcagcgccgcctcgtcctcggtctccttctcccctggtggcggcggtggcggggctgcggcagccgccgccgccgcctgccggggcatgtcgtggacgccagccgagacgaacgcgctcatcgcagtgtggggcaacgagcggctggtggaggcgcggtaccagcagctggagggagccggcacggtgttcggcagcaaggcccccgggccagccatgtacgagcgcgtgtcccgggccctggccgagctgggctacgagcggaccccgtcccagtgccgggagcgcatcaaggtaaccggccgcccggcctggggcagcgaaccagaggcagagagaaggcggggaagcgggcctcgggggcgggggccggtctgagggcagggctctcctccggggcccggtgggcgattcgcatctcctccgcctttttcttctctccctgggaagggggctttttcccagatggccgccagcccgtaggtttcctgagtttgaagttgggcgtgcctgccgccgcccctctttcttgccaattgagatgttcctgcgctctgaagttggtagtttctcattgtgcgccgtgcggcagtccccgtgccgctggcgcctcttgcccccaccgccggggcccctcgctttgttccaggcggaggggctcccaggcagaggcttaccggccggggcaggattgaggaagggcagaaggggggggcattgagcccctagtttaggaatagttaataagtggccgtagcggagccatagaaaaagcgccttgggacgactggcctttgtgtcagtcgctttgcttctatcttgagctacgaaggacgagtaagactagagatgctttggagaattggaaaggcttgattgtagccagattgtgtattgttaccgcggagttagtgtacaccataaaagttagcttggccaagagttggtctggaatttggattgtcgatgcctccagagttagattggcttgaggccctgcggtttcttaggaagctccttcaggaaagccagtttttccctgcttcagtttctgtgccggatgtggtgacaagtagaactctcagtgtgcatctggccgtccttgtgtacctgcatgtttaaatgcagaggcttaatttgggctagaaatcttagccaggttaagattttgctactagaactgactctaggctttcatatttgtattattggcagataaggagttgtattttagttaagctcatttcctcatcgtagtggctgctaaaaagattgtgataggattctcccagtttttactgaactacttatcctattatctgtgcacttcttttctgatacagctggcactttttctgggaacttcttgaggggggataaaaaccaccaagaacaattataaaataagaatgatcacactaaagagcaataataaagtctaataggcgcaatcatgagttagagtaagctaaaggagggaaattgcaccaaagttctccaggtcttggctccagtagtatttctttggggatgttgttgcttagaaaactgggtccacaaactaagatatttaaaacctactattgttcaaggaatttgccacccattaattactccattacaaatttaaattagtgtatttgataacatttatctttgggacttcttaagctttctctttttttaacaaagacattaaagtagtagctaataggacaaagctactcttctctgaat

SEQ ID NO: 1884417 - DNA, 4001 bp, Homo sapiens
ctgggaaagcacttggggacctgggtgggggccaacattcatttgcactgcggctgggagggtggtctgccttctgtgggtggtgctcaggttaaagctcctccctgggaccactaccgtcaccatatctctagtttcctgcttggcctggaaaaaagaaatcaaaccagagagagagaagggcacaggaaaagagaaaaagagaacagtgtgaaagtgagaaaaaagagacagaaggtaaaagaagtcagtgcagggaggcaggtgctttgacaagtggaatctttttggtggatatttaagcagcaagagacacttttggtcctggacaagcttattgcacatccacagttgatgagctctcaagggccaatgacaagtattcagatacccagtgggtcagggaaatggcatttgccaactctactgactacagaccctgactctaaactgatttggtgccctctttctgcaaatcaatttctcaaactttctggtagctggttatttctcagtggagcagacgatgaactagtgctagggaacaggtcttctttcaggcccccggaaattctcaggcgggagtgaaaagtggaaaaaatttcgctggcctgggctagagtcaggaggtgggaggagggaagggctggggagaaagaatatggggaaaaggaaaggagagaggaggaggcgtgggtatgagtgaaagagttccgccctccttacccatgctcacctcttgctgccaaacaattatactgtcttcttttcaggctgcaggaaatggtgttctggtattcattggaaaagcccaacagtcattgtcagcttctgaggcatatgaatggggtacaggggggaggccctggtgttagttgggaaaaccgagggcagcaaatgcaggggcctcactcttactatgggaacacatctccgttcaacttggtgagaagagaatcaaagtttccaaaggaccttttatcaggaaactacaggaaagaatcaaaacaaccagtaagtggggttaaagggcattcttcagtctcagtagctttttcctctccgcctaaccctgtgtgagtggacagtggaccaaaacgcttcctctattattattatttttttaagacagggtctcactgtgtcgcccaggctggagtgcagtggtgcaatctcggctcactgcagctccacctcccaggttcaagtgattctcatgcctcagcctcccaagtagccaagtagctgggattacaggtgcctgctatgacgcctgactaatttttgtatttttagtagagatggggtctcgtcatattggccaggctggtctcgaactcctgtcctcaagtgatctgcccgcctcggcctcccaaagtgctgaaattacaggcatgagcctccacgctcggccatcctctatcttttgagttcacactccgaggcccttctggtaagcaaccacttcccctcaccctccaagctctccctttggccgaagggcatctctcctcccttccttttgagcatcctcctggctctggatcctggaagtgcttctctactctggtgctttccctgacgttcacaattaactagcccgtgacgcagggcgtcttccaaaatatccaaaagcaaaggagtcaacagatcatggggaatcaaccctttctttatgaaaaggcaactgagcaccaggatgaggaagagactcgcccagggtcacagagtgagggaatgataggcatgggggcagaatacagccagtgcagcctacctaacactactactattaatagaacccattagtagctgctaagccttttccgcttccccgtccaaggctctaacctgcgtgtgggtgtaggctgacgctaccgtcccctccccattccccctgcctgtgatgcccaggccctagcggtgagaccagcaggtgtgggcatcaggaacttctccattggctcaaatagctgggagcgattggcctgtcctccaacctccgtttgtgtcagggggtgctgctcattggcctagcagaagtgattgacaggtcagtagcccagtgaatgatgagccttggaagcgtgatggcagttaccagtcaattctcgctttgcgagatcctggggtaacggttttattcttttccgaagtagattcagccatttttcacactcaaaatccagggtcttctcagtaaagggtgtaaagaaatttccaaagaaggaatgcgtttggggctctaaaagtacaaacgaacccttcaggagaaatgagagtgtcatattgaatgaatcattttataaagggggttttgctttgctaaacagttggtgggcaagtgagtgggcaggagggaggggaaaggtggccgggaatggggacagaggagtcacgcagcagaaggctggagtcaaaaatgcttattgcagcttttgtaacctgtgtgaaatgccgtggccattcttggggtctggataggttctgggacctgggggaaaggatggggtcacttcaggggactcttaaggtccaggaatcgggggctaactggcagtggggtgatgaggcagtggttgtggtaagagctggcttggatggtgaaaagggtagcctggaccatgagacaattcctgagagtagctagtgatggtccgagcatagagatggggtggcctatccttgaagggtctagtcacataagatggggcctctggaagaatgacagtggattaccccataactggttagaagatggagttggagataaagagagatgagacagggagttgagagatggaaagtttgacaaaggaaagagagagtgccacagggactgagagctggagtcccagaaaagctgagcaaaccacgcttggtacatagttgtcactcagtaagtgctagctattattattgctccctttggaagggtaggggaggggtcgttcaagtctagtagttcaaaggcagttggaggaagtgagtggagaagtaaaagagtgccaggaaaatagtccattctacttgtccgcttctctccccccgtgattatgagagctgcagaaaccactcctccattgggtgaatgagagggaagaattgaactaaagagagagggtgctggtatgttctgcagctggaaacccaaaggatgggaagtaggcatggggagaggctgcccttccaagtgtcttcaatagagcctgttagaagtgaggtgaaagagaggggaacaggtgagaagtagaatgggttgtggcatggttaggccctgggtgaaccatgtatgatatacataacagttgtcatgattgctggggtggggtcatggggaggagcccccctagttgtctctcctaagaaaagggaatggtggtgagattcaagactccattggaaattcccaacaatcattgtcacaaatgtcaaccgactcaggcaccacaaatttctgagggaagagaggaaaagactcttctaaattttctatttggcaagcagggtgtgtatcagctgaggctcctaaacagagagtgcatagtacagtgcgtcaaggttctgaacagaaaaaatgaaactcctgatgtcaatactccatttcccttggccttcctaccctcactaatgtgtgctctctttttagcaagtcatcgaatgattggcatttgttgggaggggtgcagactgggcagctctgaggtagctaagagaaggtgatgttgaaggaagagcaaagagtgcttttgagaccccaaattccacttaaatatgtatctgtaggggaaccaacaagctctctttgagcaacagttgaaatgcaaagccacctggactagcctactacctaaggaactctcttctataatgtctgggggaaaagcaagtagggagaggggaagataaggtaggccagagagaggagagacacagagaagaaggcagagacaagatggagagattagtgacagcagaggctgaggctggactgagagggt

SEQ ID NO: 1884418 - DNA, 4001 bp, Homo sapiens
agacgctcttggatggcccttcctgcaacatagtcacaaatgccaacaagcatcttactgctgtagccatgtgctctggttgctaatcatataaagtagtgcatttgagaacccatcctatccttggtctgaacatttgtctccatccaaaattgacagattaaaatcctcaacaccaaggtgatgataccaggaggcggagccttcggaaggtgacttggtcttgagggtagaggccacacgcatgggatgagtgccctcataagaggggcctaagggagcttgtttgtcccttctgacatgtgaagttacagtgagaagatagggtctatgaggaaacaggccatcatttgacactgaaccttgctctctggactgtgagaaatgtgttttgttttgtttttttttgtcagctacctgatatggtattctgttatggcagctcagacacagtcctgcgtctttagaactcagggtacactgtgtgctccgtcaatgctcatgaccatttggtactcacgctggagtgtgggggttcggaatgaacactgagaccagccatgcagcatctgtcctctctttctgtgaaaagtgccattctgtatgtgacatggacccctagctttagaccctacagatcacagtgcagtgtctttcacagagtgagtgtgctgggtactagtgatactaagctgggtgataaaccctgctagagaggtgcggcctgcatggagtggagagtgtgtgacaaggtgaagcagcccagacagaagtgccagcaccaccatccactaattgggtgacctcagccatgcacccgagctctgggcctcatctttcccatctataacatgtgggcatgtacctttgttttggcaaataaatgacaatatatgcttttagaaactggtggctactaatcttatgtaaagaatgtgtgtatttatcttgccaaataaatatatggttgctcttcaatttcggatcatgacaagtcgatatcataacgaatttgttgtatttcttggtcagggaagaaggagagagaaaaaaaccagtgcctagtgatgacgccaagtcaaggtaaaacctggccaagggtggacctggctccagtgtctcttccagttctccttcaccctggggattactcatttatctctatgaatgcagatttatggacctataaatgaatatatgtgttagggccaccattgcttgttgtaactccacaaagcatgttgaccacaaaacctattgagggccataggggcccagcctgcaacgcagcccatctgctccctgcatcctcatccaccgccttccttaccaccgcccacccacatgccagcactgccgcgcggcctctgctccggccgtcccttggcctacactgccttttcctaatctttcccaagttgactcctaacaccttttaagactgcctagaatcaccgggaaggcttcgctggcccacccctgcccgcccagcttccccaggctgggggaagtccttcttctgggggcttccgtgtgcacctctgtgcctccacgtccctcctcacacggtgactttccgatgatgcgcctgcctcccctgtccatggataatgaattcacccaggacagggctttgtctttttcattcctgaatccgaagcttacctgctactagagaatttgtgaatttccgttgaacacgtggaagacctaggaagctgtgggggagaaagaatgaatgactttcttcaaggcctcctggcaaagcagcagtgcagcgggaaccggagccggaggacgctggctcctcacctagagccctcccttgggtcagggtggctcttctctcccatacctagcgtccggcgcttggctttgtttcccggagtgggtggcactgtttggccgccacaggcacagcatcgcccctaggcatcgccctccgcacccggggatgcggcgtccccagccttgcctttcttgatggctaaagcaacagcgccaccttccggcctcaaggccaccgggcgtggccggacttgggagaccttgggcgccctcttgtggaatttcagaagttgggctgcgaaaatgactccgttatccccagctgaccatgaggcccgctgggcacttccacctctgaggtttgagtggttcagtgggcctgtgcagggaaacccagcctagaaagcaagcctttatagctaccttggtgtagaagatcagaggcatatgaggtgagaaacaggtgacatgtcacgctccctggagacaaaatgtccagaaagctcctctaggcagcaaataaagaagttatgaaaaggaaccgtggagaaaaaagaggtgaagggaaaagaaagggaatgttattctgacccacatgcctcaccgccagggctgaagtcactactaacaaggccatttaggaagagcaggctggagttgacagcctttccccaggagtcctctggtttccaggtcccccggtttgaagcactcaggaacacactcagcccctgaatcttcactcagttccgtggtgttactggcaatcgttggatatccctggctggggctcagcctcagctccggtgtcagctacataagaatctcagcatcttgggaacgtgagctcaacttgaaatacacttccctgaaaggattactttgttttgggacaaggctcatatcaatctgtcctgccaagagattactgctgttaaactgttggttttcactgctgtcaaacataatcttacaaggagagagaggggcaatcaccctcaacacccagctgcaagagaagacttttgactgggcaggacttttcctggcactctctggagaataaaaaaggaatatgtagaatggctgttgtgtgattaatgcttacacccacagtgcggctgagccattcccaggggtgcactgagtgggatccctctacatgcaacgaccctgctggcatttcacaggtgcctgtggagaaggcccattgaagacctggggctgaaagtgcagctcaactttgcacatatgcttggatttcctctctattccaaggcagacagtcctcagggtttggcctaacacacaaaggatgggaagaataaagaaacgatgttccaacagtatttctgcagatctaagctactgaagggatgctggaccaaccacgatagatgcttccttttccgcagtgcctcgaaaaacacttaggagtgtgaaggagtgaaattttatgctattggccttgttctcatttacttttgattattataaaattattctaacgcaaaacccataaaaaattggtaactcagaatctcgccagatgaactgttacatcggactacgctctaggaagaagtattaaaaatcaaagatattaactttccaagtgttcatttccatctgttttccctctctgggactcagtttcctactctgtacaattgggacggtgacctactttcaaggacctttatagttcaaacgctcttcggttctgtgaaaagaagccttacatcatcccatggtgggctgcatgtcacattatcacacagagtggtccttgctttacagaaaaatattcatttgctcattcattcacctatccactcattccacaaacagtgagcacctacgatattcctcacactgctaaaggcagagctgtagggtgagctgtgaataaagcaaggtcctggccctcatggggcttgcattcttatgggaaccacacacagtgaaagatttaaacatatatagtgtaacctgaagtgatgtaagccaggcacagaaagacaaataccacatggtctcacttacatgtgaactctaaagagctgaattcatagaaacactgaataaaatagtggctaacaggctgaagggttggaggattggggagatgttggtcaaaggacacaaaatttcagttaggaggaagaagttcaaagatctattgtataacatggtgattacagttaacaaca

SEQ ID NO: 1884419 - DNA, 4001 bp, Homo sapiens
gtgacaatgtgaagggccacagaactcttgtattccagtcaggggcaaagagtggagacggaaggcctgtccttctgacaagcagccccttccactgtctgacagtgggaggtcacccccactgtagcagaggggtggggggcgggtactgccaaggaggagctttggagtgataggcggggcaggcctgggacccttggtctttcccaaagggtggttccctttcgaagttgctattccaaaggtagcagtgaggatggcacacatttatgtagccaggccactcctgtttgtccgtggagtggagaggagccaccctcctgccctctcagaggtccaggtgtgctcactcctatttgggaagagagaaggggcacagcagccctgcaggggcccctggctctgctcgtgtttctgggcttctgctggtagggggtgccaccttcccgtttgaccctggactttctttctccactgcccactttcacccactgggcagctcaggggaggggtcctggcaggagccacagggcaggagggtccatgcctgtccatgctgtcctgggagtgtcttgagatgcccctgggggggccgccctgtaatcatcctcctctccccctccccactggctcgaaggcaggactcgggaggcttcatcagaggactctaaaggatttctggggattctccacttttcgaccctgacccaggaggaggaaggggaaggatggtggtgctgggtgggagtggggatggtgtgtgcttcatccccctctgaccgaaatcctaatcttgtctctagatctgggggctgcagcgttgtgtacctgtcacccttagccttgctgctttgacctgtattgtctgttctgaccctcctgagactggaagctgggggtaggggacacactctccttccatcctgttcctcaggagcccagcaggggtgcagaaggggaaggcagacatgagggcaggtggagtgggggtagaagcagggccagagacagaaggtggatgcctgtctgggatggtggtgcaaaggctgagacagaggctggggtggatggaagccaggatgcagggctaccaaaatcacctggtcccagctgacttgggggtttggaccacagttctttgtgcaggagtccttgggtggttggggagcgggggtgggacacacagggtgaagggagggattggctgtttgtagctgaacagcagaacagagcactctgcctttggggtctctggcatcactggcagggagaggggtggctgggccaggagcccacctcatccccagtgctcagagaactgggtcctcagaagtggtcctgcccccactttacacataaggaaacagacgcaaggaggagagggatgcccaatgacgggcacttcgatgagtccgtgtgaactctgttccgtgtgagctgctgcgcgctcagggaatgattgtgagaagcgggtggaggctggagtgggcagcaaagaactgacattttgaggtcagtttttcactccttggtcaagggcaggctctctccctggtcattaccaggagcctggctccgggcagcaaagaactgacatttcgaggagctctgctaagggccaggcagtatgtgagggagttcacagacaccgtcccattttcacagccctctgaggttggtaacataacccccacttcacagatgaggaactccagcccagaaagcctgtcagccctgagaaaggaagggcagggcatcgggctgggcagctggcctgggaccagtggggtgtgatagtgttggctctgcttcccgcgggtggggtgccagtggggaggggtctcaccagagagggagccgggggagtgcgctcctgcgtccatcctcagaccagcgtgtccctcccaacctctgacccctctgaggccaggggatgggttcggcttcctttggtacctcttttggaagtctcttcagacaaacactggagagaaggcacagcaccctagggtgacatcagtggacaggtcagtttcctgttcctgttcccagccacccctgtctgtctgcccagggacctacctgcctggcccactcctgctgccacccctctccatgagtgggactcctgagcagtgccaggcccaggccctcagggtggcagttgctggatggggccaggcttcccattccctggcaggcagactcttggctctggaagatccctgggggactctgacttcttggttactcaggctactccgtaagggtagccttacgagagcgtaagggcatgaggggaagtcgatgggtagaccaggtgtctctgatttctctgaggaaatgcagcttctttgccaagaactcttgggctttggtggcttcgtcgcccttgcctggggtgggcgagttttagtctcttcagctgcagaccagaagctgagctgacctgaaaagagctggagttctggagttcgggcttccaggccagggcctgcttctgggtgagagtgggaggtaatggttgcttgaggcagaggcagtaaaccctcacacccgcagctggacaaaggcaccagctggctgtattctgtgggggcaatgtggcttctggaaggtctctccagtggctctgtagctggtcttggcaaagaatgttctagaccaagggttgtcaaactacagctcatgggccaaatccagcctgctgtctgcttttgtaagtaaagttttattggaacaaagccatgttcatttgttacatattgtctatggctgctttcacactgcaacagcagagaccatgtgtcctgcaaagcctaaaatatgttctgtcttatcctttacaaaaacagtttactgacccctgctctagacctccaaagacctggtatcctctttcctggtgttcaagttcagagaggtgtctggagtaggggctgagcctggcctggatgggcagtgctgtgacaagtgtctaggatggccgggtatcctgcacagagctagaaggctgcctggcacgggtgaaagcagagctgctccctgaccctctgcccctccctcctccaccctggcctgctttagctttccccagacatggccaacaagggtccttcctatggcatgagccgcgaagtgcagtccaaaatcgagaagaagtatgacgaggagctggaggagcggctggtggagtggatcatagtgcagtgtggccctgatgtgggccgcccagaccgtgggcgcttgggcttccaggtctggctgaagaatggcgtggtgagtggcaccctgggctagggcgctggggggctggggtgtgccaccctgtgagtcctgggccaatccctgagctgactgctaagctgcgtcctatgccctatgcctggtagattctgagcaagctggtgaacagcctgtaccctgatggctccaagccggtgaaggtgcccgagaacccaccctccatggtcttcaagcagatggagcaggtggctcagttcctgaaggcggctgaggactatggggtcatcaagactgacatgttccagactgttgacctctttgaaggtagagaggaagaggctgggggaggaggtgggcaggaggacagggtgctgggacagggagagggaatgaccagaatatgccacaactaggggtgtgcttgcccgcacacagcagggatgggatatgccgagaataacacgccacgctcacagggcccactgagaggcctcccttgaattggggacaactcttggccctggtttggccatttttttgtgagagacgggggcaggccctggcttggagtcttgtttatacgttcttgatgttcatctcctctctcctgtcttctcacaggcaaagacatggcagcagtgcagaggaccctgatggctttgggcagcttggcagtgaccaagaatgatgggcactaccgtggagatcccaactggtttatgaagtatgtggcccccagggagcttgggtctccg

SEQ ID NO: 1884420 - DNA, 4001 bp, Homo sapiens
aaaaaaaaacaatacattatctgggcatggtggtgcatgcctgtaatcccaggtactcgggaggctgagacaggaggatcgcttgaacctgggaagtggaggttgcagagccaagatcgcaccactgtactccagcctgggcgacagagagaaattctgtctcaaaaaaaaagaaccctcccaagcaacatattagaatcttcccagggcctttttaggggttagggagtctttctgtactaattaactctccagtctccagctactatgcagcctcccttgatctagaaccttcagagtccacatctaggaacattctctagacccggctggtccctgctggcttgctcccaccactcctctgcttgttaatccctcttggtccctggcatgcaaagcacatccttggtcaggtcatgctgagatatgatccagctttgagcctggtggtcaggaggggaggtggggacagatgctggagagaggaactccttatcttgtaaggtcccttcccttagtttctgcatggtctttaagcaaaagaggacctctgtcttccaacagaggcaatgggtcacttctgcaggccaggaggtacaggagaatctgggggttcaatgtctcaagagtgtctcctcagatagtccatctcagatatcagggaccccacccttccctttggggccctgactttggagaagggacttccctgggctggaaatttggccttctctggagtcctgcaccttgtcttctgccctctgacccctggctatagaagagaagcatttcgttaaattctgccaaggaatcctgactttgctttaaattggtgatgcgtggccctgaacttgtcattttccctcttctaagtgtcagtagtattcagtgacagcctccccactccacgtccttctcacggctattttcccatctgtctctcaacatcagtgatattaaacgagccgggcatccccgtccacctgagtcctgtcccaggtgaccacaggcggaggcctgagcagctgctctgccacctcgtgccaggggcctccgcaacgggctccagtcaccaggggccagcggggcatcctcctgcagcatcccgtccttggggccagcttcctggggcccctcctgctgttccctgccttcagctgtctgaaaacagagcccaagacagggatttactaggggagggctcatcctgggacaagccgcccaggatgtgagggcagaggggcggggaaggagaaaggactcggtaaaggcgtggtcccagggtaaatacagctctggcagatatgcagggggccctggggcagaggtatcgccatctagaggcaggcgagggaacagtcttttgtacagttagccgtgggctgtgggcgtcgcctgaacgtaccaggtattgtggctccattggctgaggatgcttctccagcgaaggaggcagggagccggggaagtggggtggggtcgcgacaccgacagcagctgccagaccagccatgctgcgctcagctccctcaggctgtcactcttaatcatcatgtcactatctctggggcgtgtcagtcaccatcaacgacgtgtcccccaagctgcagaggacgcaaatccagctctccaagaggctctgttggccctctccacatgggcttgaggtcaggggtgggggcacgttcggaccgccctcctgcctctctgaagaagatcctccaagtcccggctccagctctccggcctctttggcagctgggcgggtggccatccaggaggcccgttctccatgcccagtttggcaaggctccttgggacgccgggctcgctgcccctgttttcttaaagcttcggcccaaagggacccagagtctgaggttaacactccgtcatcccagcgtgagcggcgcctgactccagctctcgactcccccacctcctatcccctgcgccgggctcaccctgcactcccacctgcaaatcagcagagcagaggccagcgctcccgacgtccagcaccaccccaagcgaggcagggggagctgagtggccgggagcgccatctagtgggtgccaggggcgagtccccgaaagagactggagagccacgactcgggcagggcaggatggtgtcccagggagggccggggcccaggcgctggacagcagaggacataaagggagaggcatgggagagcgaggagccagggtgcttccggggcgcatgagccccaccccagcctgcccctgccctcgtaaccagatgactcggctcaggcaggacacaccacgtccagtctctgtcccctctccagactcttgggaaagtgtcacttaaaatccatttgggtctggtgtttgctttattccaaggaaaggggtaaggaaaaattcagaaaaggggcgagggtctcccctctccacagtggcagtcaggggaatagtgacattcaccccctcccccaacctggtcttgaacgtggcagggaagagaactgagccacctgtcacccagagggggagggggaaggtcagaactccagccttcccacagcagacacgcctgcggggcaggaagcaggcaggctccacgcagtgtagacatgtgcactcacacggatgttaacagtctggaagaaactgacctggctgtgaatagaggctctctcatggggaaggggcagaagatggagctttcacttctccatttatacacttctccaaaatgtggtgggaccatgaggaaactgcactttcagttttgatctctttttgtattttttcagttaaaatgcaattgggaacaatggggtgttaagtgcctcagtgtggaaggctgcggcatcaccattgaaatgctgtatcagacctggattggatccaccctcgactcagggctgtgcaaactgggacccagatcccgcgctgtgggaacggagccctgctccgctgtttacatgttgtctctggctgcggcctcgctgtgacagcagagttgaggaattgccacagagactgttatagcccacaaagcccaaaatatttactcgctggctctttatggaaaaagtttgccaactatcaaattacaagaaatacagggactggggagcctgctcaacaaagctaaggggacgtgaccagcaaaatccagactgcaggcaaccataggacaaagcgccagtttcttcaatacgtaatttgcaacagcaacctgcttactagaggccaggaaggggagggggaaaggaggggatgaagaaaggttgatgagtgggtacaaatacacacttacatagacgaaataacatctggtgttcaatagatcagtagggtgacattaatcgattgtacacttcaaaattgctagaaaagaataatcctaatgttcctggcacaaggaaaagataaatatttaagatgatggacatcccaattaccctgatttgattataggaatgtatccaattatcatgcacatcccgaaactagatacagctagtgtatttcaacttttataaagaaaagaaaaaaacgggcggggtgcagtggctcgcgcctgtaatcccagcattttgggaggctgaggtgggcagatcacttgaggtcaggagttccagacctgcctggccaacatggtgaaaccccttctgtactaaaaatacaaaaattagccagatgtggtggtgtgcacctgtaatcccagctgctccggaggctgaggcaggagaatcgcttgaacccgggaggcagaggttgcagtgagcaagactccatctgaaaagaaaagaaaagaaatgaaaagaaaagacagagggggcccatagatttaaaagaggctgagcagtgacagataatagaagtgtggatggtaagaaaataaagtctcatttttcatggtagcaagtgagatctcaaatccgagatcagaaagtgaagaaaatcaggaattaagagtagaagccatttcacttagaaatgaaggtttaagaaaaaga

SEQ ID NO: 1884421 - DNA, 4001 bp, Homo sapiens
tctctagtctcatatacttctgtgcccacacttgctcctgttctattcataatggtccccttgcagttgccatattatatcctgccatttgatgcccggtgaacattctatacctgcttcccagaattctctttacctttcctctatctgcctaacttccacatatctaaaattaatcagagtaaactatttactagaacaaccaactccaaatcctagtaacctaacatgataaaggtttgtttctcactcatatagcccctccccagatgatcgaggggtccaggctccttacctctagtggctcccccaccttctggagtcttctgcattctttatacatggttgagataaactatgagtcattagcacagctagaccttgaggtcctacaagaaaatttgcaaatcattcactctgttttgaacaaggtatatttaagatgatgttaaaatacccaatggtcttgggtcaaatacagtttatgactgtgtatctaaaatatatattgcaatattcttccctttttctactgacttcatgaatttagcggggatccattttataagctcaaagataattacttttcagactaagaatatttagggtaaaaagtactgttcaacatctctactgaggatgttatgatgtagcacactgtataagctggagctaaaggaaactttccttaaagtgctatttactaaaaattggaacacattccttaagacaaatcgaagtgtggcacacaacatccaaacttccatcatagatacagaggtgttaccatctcccactcccaaatttctttgtcacgctgaggatactcaagaggagcaggacatgttggtcgcagcaggagaaacttgaaagcattcacttttatggaactcataagggagagaatctcttatttagtatcgtccttgatacatttattattttaaaagataatgtagccaaatgtcttcctctgtgttaaatctttacaaaactgaaatcttaaaatggtgacaaaaattctacttctgatagaatctattcatttttccaattagatagggcataattcttaatttgcaaaacaaaacgtaatatgcttatgaggttccatcccaaagaacctgctattgagagtagcattcagaataacgggtggaaatgccaactccagagtttcagatcctaccggtaattggggtagggaggggctttgggcggggcctccctagaggaggaggcgttgttagaaagctgtctggccagtccacagctgtcactaatcggggtaagccttgttgtatttgtgcgtgtgggtggcattctcaatgagaactagcttcacttgtcatttgagtgaaatctacaacccgaggcggctagtgctcccgcactactgggatctgagatcttcggagatgactgtcgcccgcagtacggagccagcagaagtccgacccttcctgggaatgggctgtaccgagaggtccgactagccccagggttttagtgagggggcagtggaactcagcgagggactgagagcttcacagcatgcacgagtttgatgccagagaaaaagtcgggagataaaggagccgcgtgtcactaaattgccgtcgcagccgcagccactcaagtgccggacttgtgagtactctgcgtctccagtcctcggacagaagttggagaactctcttggagaactccccgagttaggagacgagatctcctaacaattactactttttcttgcgctccccacttgccgctcgctgggacaaacgacagccacagttcccctgacgacaggatggaggccaagggcaggagctgaccagcgccgccctcccccgcccccgacccaggaggtggagatccctccggtccagccacattcaacacccactttctcctccctctgcccctatattcccgaaaccccctcctccttcccttttccctcctcctggagacgggggaggagaaaaggggagtccagtcgtcatgactgagctgaaggcaaagggtccccgggctccccacgtggcgggcggcccgccctcccccgaggtcggatccccactgctgtgtcgcccagccgcaggtccgttcccggggagccagacctcggacaccttgcctgaagtttcggccatacctatctccctggacgggctactcttccctcggccctgccagggacaggacccctccgacgaaaagacgcaggaccagcagtcgctgtcggacgtggagggcgcatattccagagctgaagctacaaggggtgctggaggcagcagttctagtcccccagaaaaggacagcggactgctggacagtgtcttggacactctgttggcgccctcaggtcccgggcagagccaacccagccctcccgcctgcgaggtcaccagctcttggtgcctgtttggccccgaacttcccgaagatccaccggctgcccccgccacccagcgggtgttgtccccgctcatgagccggtccgggtgcaaggttggagacagctccgggacggcagctgcccataaagtgctgccccggggcctgtcaccagcccggcagctgctgctcccggcctctgagagccctcactggtccggggccccagtgaagccgtctccgcaggccgctgcggtggaggttgaggaggaggatggctctgagtccgaggagtctgcgggtccgcttctgaagggcaaacctcgggctctgggtggcgcggcggctggaggaggagccgcggctgtcccgccgggggcggcagcaggaggcgtcgccctggtccccaaggaagattcccgcttctcagcgcccagggtcgccctggtggagcaggacgcgccgatggcgcccgggcgctccccgctggccaccacggtgatggatttcatccacgtgcctatcctgcctctcaatcacgccttattggcagcccgcactcggcagctgctggaagacgaaagttacgacggcggggccggggctgccagcgcctttgccccgccgcggagttcaccctgtgcctcgtccaccccggtcgctgtaggcgacttccccgactgcgcgtacccgcccgacgccgagcccaaggacgacgcgtaccctctctatagcgacttccagccgcccgctctaaagataaaggaggaggaggaaggcgcggaggcctccgcgcgctccccgcgttcctaccttgtggccggtgccaaccccgcagccttcccggatttcccgttggggccaccgcccccgctgccgccgcgagcgaccccatccagacccggggaagcggcggtgacggccgcacccgccagtgcctcagtctcgtctgcgtcctcctcggggtcgaccctggagtgcatcctgtacaaagcggagggcgcgccgccccagcagggcccgttcgcgccgccgccctgcaaggcgccgggcgcgagcggctgcctgctcccgcgggacggcctgccctccacctccgcctctgccgccgccgccggggcggcccccgcgctctaccctgcactcggcctcaacgggctcccgcagctcggctaccaggccgccgtgctcaaggagggcctgccgcaggtctacccgccctatctcaactacctgaggtgagggcccgggacggggcacgcccagcgcgtccgggagtagcggttccgttggcggcggcggccgccaaccctcagccccagccccagcgcaccgctgcgctccccggggcggccggagagggtgggcagcgggacacagcacaggggcagttgcctcccttcttcttccctcctctcctcactcttggggacacgaaggtgggcgcagaatatactatttttggggcgtgcctccctgaaagctgtttttttgtttgttttttaactttccgaatcttccagattccgaagcagaaccaaccccgatttaaaacgtgcagcgtcacactaggtccgctgtagcccagtggggca

SEQ ID NO: 1884422 - DNA, 4001 bp, Homo sapiens
ataaaataataacataatgtaaaatctacccccttagcattttaaagtatacaatacagtattgcttgctataggcactatgctatatgttggatctcaggtattaaattctcctgcataactgaaactttgtccctttaaccatcactcctcattctcccctctccccagctcttggcaaccaccattctaccctctgcttctatgagtttgactattttagattccacatataagtgaaatcatacagtgtttttctgtatctgacttattttacttaatgtataaccatgttgccacaaatggcagaatttctctctttcttaaggctgactaatattctgttgtacgtatataccacattttctttatctactcatctgtcaatggataaagaacaatggatatttcgcatttataattttgatagatattacacaattgcattccttagaagttgaaacatactgcacattcattatagcaatgtgagagagtgcctgtttctctacagtttccccagaagctggtgtattattaagcttttgaatttttaccaaataggtgagaaatgctatttctgtgtagtcttaattttcattgtatgagagggatgagtatcttttcataagtttagggctgcagttacatttctttttctgagaactttctgttctctacttttcagttggttctttgggcattaacatttctataaatataagactaaagtaatggataaagttactaaaataaagaagactattaaaatttatttcatgtggcattgttgaagcatttttatttaattttatttatttattttactttaaattctgggacacatgttttatctgggatacatgttttaatacatgaaaaaatactggcattattattctttcctttttttatactgtcaatataccctcactaagttcttattgttctctcttggcatcatgggggttttcctaaatggtgaaacaagtccagcttaaaatgaagacttcagcattgtcctaaagaagatgagtcactttttacctgctttaacccagaagctcatctgtcttggggatatttgtgtgccaaagcactttcatctactgtagatatatgctgtctgtgttgatcatttattttggtttctaacctcctctgcaatgggccactttggcttttcagttcaggaaaaacataaaaacaaaaatatctgataaatcaggaaagtcagtcaatgttctttgtttgattatatgaagcagggaaaacagcccttaaaattctcttaccaactcagtggtaaacttctactcaatagtaaacttggattagacaagctcactagaacattttactatgtgtaatttaagaatgtgtattgccaagtttctgactttgtcctgaagtacatttctactaagaaccatttgttttcctgtgctaatcctggcatgaaaagtaaatcaccttttcagatttcactactgttgtatctctcacttgacaagtagctttttcagcgttggcaatgctcctgaaatagttctattaaatttttctcctatttctgtgtaagcagcatttgaatttattcaacttgtagatataagcttttactaaatttgattttccatttttacattacagcaaatcttttgttttcaatctgagaacgattacttttactctttattattctttgcttccatctccaataccagaagttggctttcttttcaaggccatttaaaaaatcacccccccccacccaaaaagagaaaaagagaggttcataagagaggttatgtgagttatcatattcacactgaatataaaacaacaaagcctcatacttacgggcaaatggttaggctcactcatcagctcagtgattcccccttgtatagaatgtaagataaaaatttatgatacaagaaaattaaagatgcctgcagaggaagtctggcaagattgcctccaggtccttagtatactaagggagtatgtgtctaaagaccctaaaccttaaaatatgatgtgctcatcctcacaaactgccaaatgacaacgggccttttattcctataaacttccattatcctgctactgatgtaaagatgaatttcatgttaatcattaatgtctctatttgtgtcaggagcctccctgtctagacattttttagctggagggatagcggctgcaaattagccatgcagtcacgcagcacagaagttccgttagcgtaatgaacctcttgggactgggattgagaactgcagggacagcagcatctctgtgtgtcccctgctgccactcgccattttggtagagtcaatacgatgcctttttaatcacaattttgtttcaacacattttgatctgttaatgggcattcatatgtctttggtgaatatcttgctttttaaaaacattttcaaaggaagaaactgttttttacatttaccaaaagcctattaagtgcaaattcaaagtgcctattttccacctgtcctctgttattttctagcactcgcaacttacaggagccactcacttttctactttagaaaaatttttcttctcatttctgcccataccttccctgatctctcttgtcttttggtatttctcccctccatctgatgagctgctcagttgtcatacattttctggtttcagctccccggagagggcggtttattttccactccgattttcttgcaagggtctgttcatcccacttctgacctttcttttttggagacagaaaaaggaggcatagcattaaattgaccacggctaaatgttttgcctggactggggagctgagaagagaaggctgtaaatctagatatgaggactgtttttgttcatcacactcttgccatgatcaatctttgtgtattcttgtggagtgacatccatgcctagtttgcttctgtagccttttattgaattgcgagcttatccctgatgattctggaattgctgggcagagtctggctgaaaacattatcgtccctgcaaaaaccctgggctgcgaaatagttttgtttaagagtagatttgttagaattaggcttccctctccatgaccagattctttgctatgagcaggaaatgaaataaagaggaaagcagccctagatatttatctctaactccactgtattgggatttagtccatgttttctgggcttcccgatcagagggtgaatgtaaatcactgcgtaactctgaccattcctttctgtgctgtgtgggaggaaacctggggcatgcggtctccaacatgcactcaggctggctgtggtggggatggcattcactcattaacacttgcaaggccctccttgaggtttgcttctcagttctgcatcctgttgtacatgagattcaccttctgtgttcccaagtcatgtttacattcaagtagcatttggctccttggcatagggataattcccacccttatttaatgagtcctgactatattgctgaatcaaaaactcagcttacttgcttatgaacttccaagcattattgtttttgtggtgggaaaaaagacgtgctggagtgctatagtggtttttcaagtcaggacctgaattgttaaactgtcatccaaatcctagttgtagtccaccctgatatacattgtttctaggacagtgagtcaagcttttagagaagcagcaattttaatggattcaagtccatcaacagccctcaggagaaggcttgcaaaatatccccgagatatctctggatatgtgtgtctttgtgctgcctgctctgtgttcctcccttgactcaaagtcctttccatttctactgctggagagtttaccatgcaaatcctgcaatctgggtagaaagcaatttatgcaagtaggctccaaagcttggtatgaggccaatgccacacgagcaggcgaggctcagagtgtccagtcttaaccattgcaaaagatcaaaagtgtgtctggaag

SEQ ID NO: 1884423 - DNA, 4001 bp, Homo sapiens
catagtagatttagttgcacagatattaggtggtacaagttttatatcttctataataataactttttattatctccttgtgcactaatatttcaatatgtcaaagtcatttgaataacctttctagtaaatctcaacttcgtagattgaaaacttttttaaaagctttatttaagtttagtggtacatgtgcaggtctgctatatagataaactcatgtcatgggggtttgatgtacagattatttcaccaccaaggtattaagcctagtacccattagttgtttttcccgatcctctcccttcttccatccaccaccctccgataggccccagcgtctgttgttcccctctgcgtgtccatgtgttctcatcatttagctcccacgtataagtgataatatgcagtatttgatttctgttcctgcattagtttgccaagaataatggcctctagctccatccatgtccctgtacaggacatgatctcattattttttatggctgtgtagtattcaatggtatactgagttttctttatccagcctaccactgataggcatttaggttgattctttgctattgtgaacagcgctgcaaggaacatacgtgttcgtgtgtctttatgaaagaatgatttatattcctttgggtacatacccagtcatgggattgctgggttgaatggtagttctgtttttaagtctttgaggaattgccacactgttttccacaatggttgaactaatttacactcccacctagtatataatccttccttttggaaacaaattttatcagtatattcaattctgaacacccatgttttagaaaatgttaagcctattgtcctttaatcactatttgcttacacattaaaatgtaaaacaggcaaaagagaaagaaggaagaaaggagggagggagggaaggagaaaagtgagaaagaaagaaagataaaagaaaaaagaaagaagaaagaaagaaagagaagaaataaagagaaaaaagaaaggaagaaaggaaggaaggaatgaagaagaaaagaaaaaagagaaagaaagaaggaaagaaaaagaaaaaaagaaagagaaagaaagaaagaaagagaaagaaagaaagagagagagagagagaaagagagagaaaagaaaattttctccagattagaattattggctgctattgtttggatgctgggtactagctgtgattaccctttgtgaatgtaggaatgcacagattccaaaagtgagtctcatagaaaaagtcagcattcaaatatgttttaaggttactctatccaaaccccaaagaacccacagaagatgaagcagtaattttagcttctcttggtgtattgtacatgcatttaaggccagttccttccttcaaattcccatgtgttttgtagttaccaacacacctttcaaccctatctgtttatatacatcatatagtcctctgtcaattgcataaaagttgtcccctttgtgactgtaatcgccttttccaatacacatctactcagaatgcaggtccttaaacagcaggctgccttgaaaaccctctccaatcttcttcgatcatcagctttgagatgcatattcctagagcccatatcatcttcttcatcactatcataaacgtctccacatattgatgaacgtttggagaatcgatttatgacaagggagtttactcttcctgcatccgcggcttcttcgtgattttgtcctagtcaccgggcctatcccacctgctggggatgccgccccctcggaagtgcctgaaatctccccacttacccaactagcctcagcgcctcctgtgtgctgcagcagatggcgcgctgcagaccccagcctggtgcctccgcgactcctccccaaccatgatttacaggcggggacagccacattcctgcgccccaacttccacctccgcttcctgcgcgcgcgagactcaagctgccacagtggctctgccgccagcgtcccagctcctcccacacccgagtttttatttcctgctccctctccagcccggcccaggccagcctaccggcgactaggatgctttcgctttcgctctcgctttccaatactcgggactggggaaaccgggagaatagaagcaggcaaggaccgccgtgggcacggggtcagtgagacagggtcctgctcgcggcgtcaaggaggagcgctgtgggtgggtagggtaggcgcgccccctcggccttgcctttccaaccactcttttttgcacgccaacaggtgtccccagcgcagccaatcggcttccgaagtaggtgagttgctgcctgaagagaaaagacaaactccagtatctttcattccattggccagacgcgccattccccaagtgagttctgttctccaaccaaagtgctggattccaagggactggaagggaaagtccctaaaaatcacgagttcaggcgtctgagacttggtgggaacggaccttcctcttaggtgagttactctttggttctggggctgacctggagttttgccaggattcattggccgcagcaggatgctggtggggacagggtaaataaaatctgcactcctgcgggcttttattgttgaaaggggcactgacgctctccctggaaacttaaaaagaacagccaagtgaacggatgtgtctttcttttgcagtgcccaagcctgttctaatttttaaaaactgatgtctattaagacccaatgttaactttatgaaaatggttcctaaggagattcacatctctgtgtccgaattctgtgtgcagcaaacatcatctcaagtgcgttttcccaactacgcttctttccaggataaaatactctaagtgacaaatgttgagtacattatcaggtatgttcactattgtgagaactgaagccatctacactcacatagcttgccaactacattaacctgacttcttattccattattttcatcaacatacatttactatttcaagaaacttttgccagggaccggaaagttgcaaatatctttattgcttaatccagtatcttcttcaaagatccaaccactcttcaatggaaaacatcaaagaacagtttacattctaagactttgaacctttacctcaaaatcctagccttgttttatctaccaatcctaaacttttacccgtagctgactcaattctaaccaattcccctcattaaatattagacttacaatgggacttcaaaatctcaatacatatagcccaaacttgctcttccctctctgagacaccacttaaattctgtcaagttattgttctccattacctaagtgagcaagaaacttagctttgtcttatcaacaggttgctttgatattactgggagccaacatttgacattcttggaggctccagcaagacctaatcaacctcccaaccctcaactcagaatcagtgtgtgccctgaagtcccttcaaccttcttgaggctctccctgatctcaaaggtggagaaagtagatcttgcatcaggttgaactccagtttctttttgctcagtttttcaagcgctgagtttattttgtccctaggcataaagaaatctttctaggaacccctttggttatgggaccagatttttaaaagctttttaggcttggtgaaaaatctgccttatcactagcaacactacgacttgtctctgttcttgttttttgttgtactcgtgtaaaagaaaagttcaagggaagagaacaggctcaagtctacttctcacgctggctctggggattaggaaattcagaaagttttgtttcagactggcagtgctgtctgatataaacacagcgtcaagtactgcacgctgtagctacctgaggtttaggccggaagaggcacggctgatttaaaagtgaaagaaagtaaccaattggttcgcagacaaccttttcccaaaaggcgggcgattcaaacccctagccccacctgctccgtttcccgcccagc

SEQ ID NO: 1884424 - DNA, 4001 bp, Homo sapiens
caaagcgacttcatgaagatgtgaaaatgctctgtcatcccccaccacctggccccaataaccttaattttctttttcagtctctattatgtcccctttcttcctgtaaccaatttaattcagcaaagatttacgaggctactgcttggtgcaaggtgctgggcatttgggaagcttcaggatttccccagggccaaggtcattgctctgctttctgtggtcccaaagcactgtgttcagacctgcctttgtacacatcctattgtttttatacagctaccatcctggagggcagggcttggtcttgtttaagcttgcatgcccgaatggtgctcaggccatggcctggcgttcgggagcctggagaaatccttgcccagggccatgtttccctgaatccacctgttaatgcacttgtcgcactgtatgacaattacccagagaaggagcaggattctgtatatgcagtgcctagcacatagcagctacgtcattaatgtttgctgaatggatcaataaaaaacctgagaggaggaagataaagatggatagtaaacgggcgatccttgcccagaaagagctcccagtccattgcaggggtggaggaggtggacagaaagcaggattgaagagctgtataaatgctatcagcgtagacaactccatcaccgaaatgctgagaagtgccatggggctacagaagaggagcattcagactcacctgggagaatcagggatggctccctggacaaagtgacagtgaagatgggctttgaaaggtggaaacccatagggagaaactcagtttttagctgaaggcagggcactgggcaagacgaggaagtcaaaagtcatcctggggcagactccatctcaggctaacctgctccttctgcaggcatggggagccatcgaaggcccgggggctgagaagccagcagagcaattggatcttgtgtctcagaaaaccacagggaggccgggcgaggtggttcatgcctgtaatcccaacactttgggaggcccaagatgggcggatcatttgggctctagaccagcctggccaagatggcgaaactctgtatttactaaaaacacaaaaattagccaggcatgatggcaggcgcctgtaatcccagctactcaggctcaaggcacgagaatgtcttgagcctgggagatggaggttgcagtgagctgagatcctgccactgcactccagcctgagtgacagagcaagactctgtctcaaaaaaaaaaaaaaaaaaaaaaagaaaagaaagaaaagagaaaagaaaaccacgaggagggagggcactggatggaaaagactgggggaggcaagcgactgggcaggagccaggtgaggcggaggctgatcggcttgagtgtctgacttagggaggtggctcaggagtctgagaacagggtgtgagaggctgggaagagaaaagggtctgaaggatatggacagtaattaggtgtgggggaagagcagtgggaggatttggggaaccgatgtggagcttgagagagtgatggggccttagcagctgtggggtgaccccagggaggtgatgtttcctccacctggtggagaggcttcactaagtacacagctgcggagcttgggagggaggtcagggccccagagacagtgctgggaatggggatgaagcaaaagctgaggccgtgggcgtggatgaggtcacgaagagagtgggtgagaaagaagagggaagagaggacggagccttggggtacgcccaccgttgggaggggtgggagcaggaagagagcaggaaatgaagcagccacggagctgggggtccctcattcttcctcctttccagggcgcccggcctctgcgccccctcacctcccacgggccacatccagctgaggagcaggctctgttgcctgctcagcctccaggagagctccgaggactcgaaggcaggaaagctcaggggttgaaggtttgggttctagacctggttggagctggcgtgactcccacctgtccctccaccctgccggctgcccgtcctctggcaggccacgccccaggcaagccacgcccctgacaagccacgcccctcgcctcaaccctctcaccttcctaaggggatcacaacgggacttctgtgactattaagcgggataatgcgtgttatgcacttggcacccgggcctggcagtccctcggagctcagtaagtgctgccggctgctctgatgattattatagagcaggattggattctggcgctcaggctggcagaaccaaggagcccagcagctcccccagaggccttggtgagggagagggcctggccacctgaactcgcccagctctcggagtgctggggcccctcccgtcatcctcctgagcccagagccagggatcgcggaaccgggacagtcacagctctcccggtgcagatcacccttccacctgcgagggataggccccacccccactaaggtcttcaactccagttagggcagagggtggggcctcaatcctggggttggggatccctcagagagtcatgtcccccgcccccccatctgtgtaccgtccccctcctccctctgggccggcgtggacgggtcctctcaggtccgcggtaatttgtctgctcacgcgggctccgcggcaccccctccgcgcacgcgcatctctgccccgggccggatactcggggcgctcggggtgggtccgtccaagttgcagagaaagacttcaatgttgggggcgcccgtcgctggaggggcaggcctcgagcccaggccgggcgtttgcgggcgctcagctattaagagcggagacgcctcgtcccccgccccccaggaattctgcagctgggactcagcccaggcgcgccttctgcgcggccctggaggaccaggagcgcgggcggcgagtggtgctggctggggtggggctgctggagcaggtcttgggttggtggattctggctcctgccctctcacacaccaaggcctgaaccctggacttctcagagcctcagtttccccttctcagcctcagcctcagacctggaaacaggtcaattgctatcatcgtgggcctgcatgcctgtctgtgcagcctcagctgggcgggaagaagagtaacggcccgctgaaggctggggaacaggtcccccaccccacactaccagactcggcctgggctccctgagaggagcggggcttgaccgctctaccagctgggctcgggtctggggttccaactcaggccagagtcgttcagcgctgggaggcccccattaactaggccacccctgggtatgggtggtggaggctggagctgactggcctgagtccccgggggaggtggctgaaaggcccagggctttgaacaaaccacagaaggtttctgcaatatcaaaagagctcttagagactaatcatgtggggggaggggggacagttggcgaaagagcttctgcttggttcccatcagcggaggatcaaaaagcatttggtcaaagaacctttaaataccttgaaaggcaggtgaagccagttcagtgggttccaagagggattgaaatgctggtctgagctgcagacaagctggcaccagccacaggaaatgctgggggaggggcccactgaggcaggagggagaaaaggtgtggatagaccagcaacccacctccctaactgtcccctcttcccccacacccaaaagtcactgcggagaggatggggagggcagagaactgggttcagactgacagctggaagcagtcttgcaggcttctgggccaggggcttttcatctggaacccgaaggacccccaccccaaacacacacccaattatgggcaaaatgttgtgtctgtgtttgtatatgcacttttctagggaggagaggtccactgacttcattagattttcacaggggtccaagacccagtcaagattaaaaaacaacatcctatggtacagactggtaaaatgagg

SEQ ID NO: 1884425 - DNA, 4001 bp, Homo sapiens
ggctgaagaaggcaaatacgggcctcgggatttgcagtaacattgccaggaatgtttgagaaagcaaacttctccagagtgaagcagtctgccaaagcttagaggccagattccctattagcagggactggggggactgggggcagacaagcgggtaggggctggaccccctcaggacaccagggtgcagactggtgtgagtaaaagaaagagaggtggtcgtgccatcatctgcagaagatgatgtctacagaggacagtaccatgtgagcccttggggagccggatgactggatggattttgcacaggatgcaaattaagcacagatccccctctgacctagacagcccacctccaggaacatctcacagaaatgcaggcacagagcaccaagtgatgtgtgcgaggaaattcatcagaacaccgtctgtgattgggaaaaggcggaaaccatccacagacgtatcggtgcagggctggttaaacgaagcgtggtgcatccacacgtcagaataactgctgggagaagaaggtggttcccaggttccaacgtgagacaatgtcaaagacacgctgcctgaaaagcaggctttccaaagaataaatagagcattattccatttttatttttttaaaaagtttacaataaacacttatgtgcaaatacatgtgcttgcgtgcacagagggaaaaggtatggacaggaacagaaaaccaaactctgcgtgttctccctcataagtgggagttgaacaatgagaacacgtggacacagggaggggaatatcacacaccagggcccatcgggggtgggggacaaggggagggagagcattaggacaaatacctaatgcatgcggggcttaaaacctagatgatgggttgataggtgcactaaaccaccatggcacatgtacacctgtgtaacaaacctgcacattcagcacatgtatctcagaatgtagaataaaaaataaaaagaaatcaaagaaaaaggtgtggagacgtataccccaacccttcccagtgttacctctgagaagcaaggtcaagaaaatcaaatcaagaggaagttttatgttttgttttctatataaattttttatttatttttttattttttttggaaacatagtctcgctctattgcacaggctggagtccagggacacattctcggctcactgcaacctcctcctcactgcaacctcctcctcactgcaaccacctcttcactgcaacctcctcctcactgcaacctgctccttctgggttcaagttattctcttgcctcatcctcccaaataactaggattacaggcacgcaccaccaagcctggctaactttcatattttttgtagagacaaggtttcactattttggccacctggtctcgaactcctggcctgcccgccttggcctccaaaagtgctgggattacaggtgtgagccaccacgcctggcctgcattgcttgaattctcagaccacatggaccctctcatctggcccaattgcaagagtccaaggcaggaaaggcagaaggcaggggcttacccctccatcaggacaacatagaacagagtcaaaaaagaaaaacatgaatggatcagtcaagagggccgtgcaagtgccctcccaggcacctacaccttgcaacttaagccgacaggctttcaagtcacagagtcttccttcccagagactagcaaggacacaagccctagccaggcccctccaggaggatggtctgagggacaaggtggggagcacagtcaggggtggcaggaggaaagggggacacaaagccaaggaaaccagggcaccccatgcttcctgaaggccaccaggacagggcgccacacagagcccctgcgtacctgtttctacaacagcctgaacacaaggaaaaggaaaacaaggaaaatacacaaagcccagcctcacctggagcaggttaaataaaggtgtgtgactttgtcttcatgtcctttggaactggaaatccaagcttcttctcctgtgcctttaaggccctggctgctgccccacagctccctctcttccctcctcctcctgtcctgactcttttttttttttttttttcttgagatggaatcttgccctgttgcccaggctggagtacagtggcacaatctcagctcactgcaacctccaccttccgggttcaagcaattctcatggctcagcttcccaagtagctgggattataggtgtcaccacgtctggctaattattgtatttttagtagagacaggttttcaccatgttggccagtctggtctcaaactcctggcctcaggtgatccgcccacctcggcctcccaaagtgctgggattacaggtgtgagccaccatgcccggccctcttgtactaactctgccacctctttgcagtctccctcgagcagcttttcctgggcccgcaattcccccttccagagctgcactctcaaaccaccccccaatgccccctggccctggctcctgccctggggctctgatcctcagctggtgaggtctagagggtcagagggagccagactccctagagcagctgaggcaggagccctgtgcttaggcaggagctaagctaagctaaggcaggagccctgtgctgggctgtgggtaacctgtccccttccagctggggctgaatagaagggggaaaggctgcccccagaatacagggctctcagaggccctggggatctgtgctggcagtcaggaggactgccacctcagcgcacttgcctgcaaggagggctgtgcaggacgctgcatgttgcttagagaacaaaaaaaggaaattaaatgcaccatctggttattaggatgagcttttgaggcaaacactgaaatatgcatgcctagacattataaaacttgggggaaatgttaatttcaataacgccagttcttgtactcgcaaaaactattcttttatctctcttcctagtcatttgtgggctccatccctcagagtgtcagcaccaagacagctggcctcactgggttttgtacgctgtgcaaggtgagatcccaagcccttgcctggagacccttcttaggaaaatgttagaacagggcaacaagttatcatttcctccctcctttctcttccccatacaaaaatcagaaagcacactagcccagatctgtgtacatttcaagggtggctggactcatggccgcctgggacgtcagggtggtacaaagtcctcttaacctaagactgtcggggtacaaggatcagcatttttttttcctttttcttgagggccagatggtaaatagctcagctttgcaggccataggtctctgtcccaactattcaactctccattgtagcaggaaagcagccacaagacaatatgcactgaaatgggtgtggctgtgttccaataaaactttatttgtatgaaaaggcaaggggctggttctggcctgtgggctacagcctgcctcctctgctacagcgtgatctccaaggacccatccatctcatagaccagcagctgccacacaggagctgctcagatacttgaaggaggaatggagaaggcaagcagcccccagtgtgcagacgtgagggtctcccagcagcaccatcctttgccatctcatgccgagggacaaagccagagcagggctctccaccaaggctcggttctcctccaacgaaatgtgataacaggacagaaagcactgtggaaggataggggctttggagtcccacaaaccacagtttgcaagaccaggagcaacctgcacttccttgcacacaccctgggtgggtgctggagcatctagacttagagtgaatcttttctccctcctcccccagctggcctccattacacttccagcaacattgtggtgtatgtacacgatggaatactattcagccttcaaaaagaaggaaatgctgccatttgagacaacatggatgagcctggaggatattatcttaagtgaaa

SEQ ID NO: 1884426 - DNA, 4001 bp, Homo sapiens
aattgttgatgttctgcttttttaaaatatattttaatgaaagagggccatatctttgcctgcacattagtactttgagtacattttcaaaaactttgaaagcttgatttgatgtctcttactttcaaaataaatagggaagtaaattaggacagtttttaacatggattttttttttccccagttagaacatgcagtaccaattaggaatgttctttaaaaaaaaaaaagcctccctaaaatatttgattattgagtaaattcttccacatctaaaattgtaaaggattctgtaacctgtgattgtaaaactgtgaggggatttcccacgtacaccacatcctctaacaaaaatatttccaggaaaaaagtgtaactcctttatacctctctgaggaaataaagttatttttccctctagtgaacttctggttaatccagaaatttctaataaaagtttatagtctgaaaagtaaactgaaatctggatgatgagtttgtatagtgattttatgaaagataaattttactgatgggttagcctctgacaaactttgggtgtttttatagagtcctaaatagaaatcactgcaatttgacaataagcaagccttcatgaaacagaacagtgtaggtaatgaattcaaaattatattgtttttagaaattatttaaatggtattattttcctgacattttttagttgaattactgatattttatttcttgactattcattacacttttaatttatgtttatttaagtgtgattcctcacagaagttacatgatttaatttgtgatatacataatacttgtcatcctaatataaacctgtcttggtgtaagagtcttcttcaaaagtagcgggtttgtttttttttttttttgcggctgggggcggggtttgagacaaagtctcgctcggttgcccaggctggagtgcagtggcacggtctcagctcactgcaacctccacctcccgggttcaagtgattctcctgcctcagcctcccgagtagctgggattacaggtgcctgccgccacacctggctaattttttgtatttttagtagagatgagatttcaccatgttggtcaggctgctctcgaactcctgaccttgtgatccgcccacctcagcctcccagtgctgggattacaggcgtgagccaccacacccagcccaaaaggaagtttttaatcctgtgctttgagctaatcatttcttcaatatctgtctctaccatcccagtttcagatgagagtgagctccccacaggtactaccctgaaggcctcaattgctttgagctaatcatttctttgatatctgtctctaccatcacagtttcagatgagagtgagctccccacaggtactaccctgaagacctcaattgctttgagctaatcatttcttcgatatctgtctctaccatcacagtttcagatgagagtgagctccccacaagtaccaccctgaaggcctccgagaagtctacaatggaacagttggtggaaaaagcttgtttcagagactatcagcgtttaggtttaggaaccataagtggcagctcttcccgttcaagacccgagtattttagaattactgcctccaacaggatgtattcactctgccggaggtaagtgtgtcagtgggctccaaaaagaggtcttccttcctttcttcttatttgaatctttaataggccatttgcatccatagccctgagatagataaaaatgcctgaaaataagaacaaggtctccaggatacgagcaagcatctcattggcattctcggaacaattaccttactgaaagtacctctagtaggtgagaaggtgaaaggtaaagtactcaccccctatgaatttctcttgtctttctcttcccagtttgcttcttttctagcatgactaaagataacttgaagaacaggattttcccagcccaatagaggacatgaaagtcttttgtaggctggggagccacaaactctttctataaagggtcagttggtaaatattttcagtttatgagccatagagtctcttgttgcagctattcaactgtgccgcaaaagcagccacagacagtaaggaaatgagtaggcatggccagttttggcccacaggctataatttgctgacccaggtgtaggcaaggctttcttatgcggtctaattggaatgttttcaagggaatattacttaaaggatgtaaataaagaggcattttcttttttcagttcttgtcatctctcactgtttttcaaatatgttgagtcttattccatgctttactatatgtaaatatatattttctaaaattacattttcaccatccacaagtttagtcattttcatctccaggtaagatttttctttgcatttataaattcctgcttaaacagctctgaaatcactttgtaaattgtaagctttgtacatattttagaaagttatcttaatgttactttcaaccctgttgctcttgaagatagatatgtcattttaaatggcaatttaagtttacaaatattaatatgaaacttcagaaacaagttgggaatatagttttgagattgtggccaaataaacattttgcatgaagttctgaaaaattggcactctgagtatgcagtaatttttctggaattctccgtcattctaactaaattttctctgaagatgagtcatgttgtcggggtgtgatgtcctgctgtttggaaagtttgctatcaaaattatgccagccattgagaaaacagactcatttatcattccaatctgtcagaagtaaaataaaattttaatagatgacttattagaacactggttataaagcatttatgatggtaaaaagtaatatatatccattaagttattagcaggaaggaaatggaataataaaaaataatccaaaagaaggcaagaaaggaaaaaaaaggggacatagaacaaatggaataaataacaagtagtaagatggtagatttaaattcaaatatatccataattgcattaattattaattgactaaatgttccaattcaaagaaagagatcagggtttgctttaaaaaaaaaaaaaaaaaaaaagtggctgggctcagtggctcacgcctgtaatcccagcactttgggaggccgaggcaggcagatcacgaggtcaagagatggagaccatcctggccaacatggtgaaaccctgtgtctactaaaaatacaaaaattagctgggcatggtggcttgtgcctgtagtcccagctacttgggaggctgaggcaggagaatcacttgaaccctggtggtggaggttacagtgagccgaggtcaagctactgcactccagcctggtgacagagcaacactccgtctccaaaaaaaaagctttctgctgcttttaagggacaaatctaatatacaagtatataaaaaggtagaaagtaaaaggatagaaaaaatataccacgcaaaactacctttaaaaaaagttgttgtcactatatgaatatcaaagtagactttaaaagcagtaagaaaggatggttgataatgacaaaaggtttattttacacacagcaattcattaagatcaagtggagtttattgtaggaatagagtactggtttcacatctgaaaatcagtcagtgtaatttaccacattaacagaattaaaaagaagtttattatataaagataagcattttgcaaatgcaaagtacacttatgagttttatttatgtaaatttatttatgtaaattctgtattttttgtcacatttgtgatctttagaaaaaagctctcagcaaaagagagtaagaatgagctcccatgagtagcgccctgaaggcctcagagaagtctacagtggaacagtgggtagctccttaatcttctgtcttaaaaatcctacacaggaaattacttatcttagaaataaataaaatattaaaagctttttctctgaaatcctgacaaggatgcccatt

SEQ ID NO: 1884427 - DNA, 4001 bp, Homo sapiens
ctgtaatcccagtattttgggaggcccagacgggtggatcacttgaggtcaggagtttgagaccagtctgggcaacatggtgaaaccccatctcaagtagaaatacaaaaattagctgggcgtggtggcacatgcttgtaatcccagctactcaggaggctgaggcacgagaactgcttgaacccaggaggtggaggctgcagtgtgcagagatcacaccactacactccagcctgagtgacaaagtgagactctgtctcaaaaaaaaatttttttttctaaaggttttacttaatgtttttatttaatctttgctaattgtgaacccttctgcaatgggctttgcaggtacgatttcaacttcaaatctttctatttaagtgagagaaaggtaattgaaagattgttttatcaatatttttactttttctaccttaggttattcccttccaggtcaatttctcacataaactcatatctgcaaagcccataccaaaagggttcccaattagcaaagattaaataaaatattaagtaaaaccttttttaaatttttaattactgaattttaagtgtcttaattataagaacatccgacttttacggctaggtgaatattctctttgaagtctagacaatagtttttgaatactactcttcttagtaaactaatgtattcgttcattatcagataaatggaatgtaaaccagttatgtaaaaatatcacatatactaatgcatttttccaaaccttaaagccctacagaaattataaagaaacattattctcgtgttatcatgaagctagaagggtccaaagaaatacaaagtgaaacctcttgtatttaaaacaaaacttgcaccaccaccaccaccccaaaatagtttttttttttttttagaatatctcttccaagttttaaagttcaagtaaaattgatgtaatagcaataagtgtagtaacagtaaagtagggaatggtgactattctatagcaaagatctacagatgttggaattgtgttaaaaaccttcagagccacaccacagccttctattacatttaaatgtcgtaggaaaaactgcaattttccggaaaattgtattaaggaccaggtgctctaataccaagagctgttttgacacatcaaaggttaagtttgggtctttgaaaatcctgcctcttactgaacactttaaaagtcattcatgttaaaacacacacattcttgcctttgactatacactgtaaaagtactacatgttaaaatggagatggggacatttttgttgtttaagtttatggaagtatgactccattttagtatagctacaatgtcgcaaacgatggaataaggtactcatcaatacattacctggtaagtataaatagttcaacttgccggctttgaaaagcttaatcctatttcttatggtgaaccttaaataaaatgaaaatacacaactgacaatgtttaacgtgcacttaaacaaacaaaaaacaaaaaaaaacaggagctagcaattcgaaatcctccaaacacccgcggaagtctgacacacagggtgttttcctcggtgaccgccagccggacattcctatgggaaaagcagcttcttctgtgcggttcgaagaaaatcaaccccttcctttcatcactttctcattcactctgcagggggtgggccaataaggagctgaatgaagctcccctttggcatccgggcgcacgtctcgcctcctccccactactttctgggttccctaaggctgccgaagccgaggacctggagccgggtagtgtcccggcgctgcgcccgggggctccaggcctcaacccgaagggctcagccccgggagaggccaggcacgcgagggcagccacagctccaaggggcgccaagaaaagcaatgctcactcgccacgcacagggttcgggggaggtaagggtgcgttttcttcccatattcccggtgagaaaacgaggtcgagggaaaaggggatgatacaactggagcatggcatatggactcagtgaacaaagggactggagcaagaagcagcagccacgccaacgcagactcaaaagggctctccggctttacgcacgcaaccctcatctcgacagcgctcggcgccccttacgccactggctcagcctcagagacttcgcgaatatggctttgcgcactgcggcggggctgcgccgcaaccgagctcagccctgtggctcctcctcgctgccctgcgcggattggtggcagacggcaaccgggccgctgattgggcggcgaaggagccattcggggagactctggtgggttcggctgccccaagagtgataagttcggcttcagacacgccttagcgccagcagtgagtcggagctctatggaggtggcagcgggtaccgagtggcggctgcagcagcgactcctctgagctgagtttgaggccgtccccgactccttcctcccccttccctcccccttttttttgttttccgttcccctttcccctcccttccctatccccgacgaccggatcctgaggaggcagctgcggtggcagctgctgagttctcggtgaaggtgagttgagccgctgccgccgccgagtggagcgctctaaaatggccgccgtccctggtcgcttcttctcgagtggtacaaaatggcggccgcaggcggagccgggtggggcgacccttttttagcatttcctctgcgcttcagatacctggaaagtcttggcttttgttctctcttcctgttgctgacggagtagaaggaaaacgtcagtgttggccaggccgccgtgcggtcatggccggatggccgacgcctgcagggacgaggccgtggcggaccgaggcacggctgtgctcggacggcgagggagcgtggctcggaccgctagcgccgtggcgggaggcacgcgggccggcagggaaggccaggccgttggcgcgggaccagggaaccgcaggcgtcccggagcctggcctcccggcggggaggtgtgtaggacctggagtcggcaggggctgcccttcgtcggggaggaaagagagagtgatgatttctgccccttttgtcagcagaggaggccgtggcgaggcggttgtcagtcccggggggatttatggtgcaggagggggcccgcttggaggcggcgggtgggcaggaggccgccttcctgcttggagaacaaagagctgggcgccgggctggcgggggtggcctcagctgctcctccccgtcgagcgacccgggcctcgcggggaggttgtcggaagcacttccctaacttgcgcctgggtgggaggaatgctccgctcttttgttcccaggaagggaaaaacggggcggaggttcctgctgccatgttgtggccctggtcttccgcctgcaagtgctagtcctgtacacccggccccctctcgcgcgtctttccacgagctctccacggggaggaggcgaaagggtggacaggggaaaactgctgaagagctttcggagagacctcatctagtcgctggcctcgtcaaggcagtaaaaattcctagggcagacattttccacgtgatgttgctcgtgtctgtagttagacttttctattgatctcagtgctcagttttaaagatagtagaatgtggctttttcaaaagattcgttctgagccgtttaaaatgctcttgtgttctacgaagtctctttgcatccttgaacaccggggaatttccaggtggctaaacaaaatgtaattgtcagtgttttgagtacattttaggttagtcttacagatctgcaatgcagtgacagtgccaggatctgaaatacgttgtaattgaatgaaggcttatagatctgtatgttagcagtgtctaattttggtgctctttctcgttccaggtatttcatttctcctgtcccctcccctccccaccccatctattaatattattcttttgaagattcttcgttgtcaagccgccaa

SEQ ID NO: 1884428 - DNA, 4001 bp, Homo sapiens
ttattgagaagacagagggcacccgaatgtgatgagagaaggaggagggtgtgatcagattcttgcttccagagcatggcactgctgcagtgggggtgaaggggagggtggggatgctgcaggaggtgtgggagcattccaacttctctcccctcaacatacacacaacacacaaagcactcaaaatccaactcttccaagttctctcttctgaccctgttgggaaccaggcaggggaacattctgatcccatttccagtggggaacctcagaccctaggaggaaagaccagcaaagggcaccacagtagatgctggggaggattcagaggtattggtggaggaggtcagagccctggtcttgtcccagctctgcctttgccagctgttagagcctcagtttcctcagtgctaaaggggataacagtcactacctcgccaggtggttgtgaatatacagagagcacctgtaacacagttgattcgtaactgttgctcctcaccgaccccttttgcattcccatggggaagagccaaggctggggagttatgactccagtgatagactgctccatgtgagtgactgtgtgtgtgtatctctatgttggggccagggatatctgaactgtgtggtgttataggagtcggcgaacctcttagcctcagtttccctatctgtacaatgggtaaagtgatcatacctcaggatttttgcaagaattaaatgaggtcctccatgccaaactgctagcaagggacctcagtatatgctcatcttatctgtgatcataaaaatgtgatcacgtagctggttggggggtcctgagagcactggggtcttttccttgcctgagctgccccctgctggcagtgggcagcactacctcccttacctgtgcacatttcaacttcacctgtcagccaactttatacccattttaaagacaatgaaaacggaggcacaggaaagaagaggggtgactttcctaaggacaccgaccaacttgttgaactcccccatataacaagtaatcatcaaagctaacagcttgtaacactgttgtgtcaagcagggccttgggcacctttgtggatgagaaactggtgtctatggtaagcagaggctgtctggcctagacacgggcgtagcaaggagaccgtgcgggatttcagtacccaaacgcccctcaccctgcgcaactatagggagcggcactgcagtcaacacatcacaacttacaatatcccttggattggattcaattattagcctggttttccggttcataaagccaagactcccagacaacctcactccaccccccagtctgaccctgggccctcaccactactccccatttggcctaggcccttccgcatgccccacccagaccgtggtcccgtgagtccgtccagacctgtaaaagtggaccgcgggcccgcctctgctctggactccctttcggggccgcaggaggctttctcatccatcaggcatctggcaagcaccaggaaactaccagcctgtttgtgctaaggaaactgaggctcgggaatgtttagcggctccttccaggcccgtggcgggtgggtggtggtacagtgaagcagtcgaggcgtttctccgcgcccctacacgggtgggaccacctcagccctggcccgatcccactcaaccgtagccccgattcccggcaccgagagctttgcaacttccaagtctccacccccaggtcccgagtcccgagaggaaggtggagccacattactcctattgtgtaggttcccacctgcaagagtgctgtcgggtcctctgaggtgaaaccccaaaggaaagcgggatcgggactgggggagggggattcccaagtccctgacacccgcgccgtctcggcctgggcttggtgacctcgtcagtcccgtctgccgggactaggccgcggccaggccgggcacagcggtacccggtccggcgcgtgtgcggcctgctgacaaaaggccgagcccgcagggccaatccgcgcgccaccccgtagcgcctgggggcgggagcgggcgagccgagaagctcgtcttggcgcgtctattggctggtactgacgcccatccggaccccgaggccaggcagttggccaaggggggcggggttcgcagagccccaatgaatgggggagccggaagcaggaagtgagtttgcgaacggagcagctgctgcaggtgaggcgcggcgcctgggcttttggggtcaaagcgtgtcatcccgggggaccaaggcgaatccatactgagcgcaaaatcgttccctttctgcccactctccagtaccccctccaaattcaccccgccctcgaggccaaggagtgctccggggagcaaagagttaacagccctttccgaacctcgaggctgtgctattggggcggggcttctggaggccggggcagggcgaggaggctggacactctgtcccagccgggacggggcgtggcggggagaatgccccgggttggggaatccccgggttccaacggggctgtcagaccttcagtaaattgttgccctttccaagcctcagtttccctatctgtaaaatgggctttcttctggttgtgaacttctgtggcttccctggtggagcacagggagcgagcaggagaatggagggccaaggaaaaggcatttagagggatgagaatgggacagtttcaagcaaaatcatttattgctgtggatactttccgtccagggcgacttcatctgattagcgcacccacctggtaatattggggttattctctcttttatagaggaggaaacggaggtacagaaaagtgaagcaatggacttgacttttaggagtctggggccgagtcctggctaaaggctgagccttccagctggcggcctggcactttatccttgtgagcacagtggaaagtgtaaagaattctgaacaaaggccaggcgcggtggctcacgcctgtaatcccagcactttgggaggccaaggcaagcagatcgcttgaggccaggagttcgagaccagcctggacaaaatagcgagaccccgtctctatcaaaaatacaaaaaattagctgggcatggtgatgcacgcctgtagtcccaactactttggaggctgaggcaggagaatcgcttgaacccgggaggcggaggttgcagtgagtcaagatcatgccactgcactccagcctgggcaactaagtgagactccgtcttaaaaaaataatactgaacaaggaagcagggaggggcctgggctgggagcctagagatgaggatctctgctgctgatgtctccattgtgggattaggcaaggctcttagcctctctgaacctcagtttccccatctgtaatactaggtagttagagtcaatcaatttttttttttttgaggtggagtctcactctgttgcccaggctggagtgcaatggtgcggtctcagctcactgcagcctccacctcctgggttcaagtgattctcctgcctcagccttcccagtagctgagattacaggtgcctggcaccaagcctggctaatttttgtatttttagtagaaaggaggtttcaccatgttggtcaggctggtcttgaactcttgacctcaggtgatccacacacctcggcctcccaaagtgctgggattacaggtgtgagccaccatgcctgaccttagagtcaatctttaaggtttagggactacagaccaaatatggtccaccagtgtattttgtgaccccttgggtgagtcatctcaccttctctaagcctcagttagcatatctggtgaatgggtacaatagtattcccttccacatgggcttttgggaggattaaatgagatcataagagttcagagccaggtatgcaattggtatggggtaaacaacagctgtgatgacagtgatggttctcagcagggcccatggcggacacccagtacatcctgcccaatgacatcggcgtgtctagcct

SEQ ID NO: 1884429 - DNA, 4001 bp, Homo sapiens
gcctcagtttcctcatctgcaaaatgggtctaataatacaaaggccatgtaattcatagactttgtgtgaggatgagcaatagagtatgcaaccaatggtactttggaaatagagaggtgatttttttctctttccttctttcttttttttttttttttttttttttttgagatggagtttcactctttttgcccaggctggagtgcaatggtgcaatcttggctcactgcaacctctgcctctgaggttcaagcgattctcctgcctcagcctcccaagtagctggaattacagacgcgtaccaccacacctggctaattttgtatttttagtagagatgggggtttcgctatgttggccaggctggtctcgaactcctgacctcaggtgatccatccgcttcggcctcccgcagtgctgggattacaggcgtgagccaccacgcccggccgaggtgatttttttaaatgatgaaaatacaatggactccaaatatagggacacattcaggacaagaaccatttgctgtgtgaggatcctgcaccccccagtagacacagatgaagcagaacaactgagaacttgtgtgcatgggggccgcatgttttgaacggaccatgctggggtgagctgggggagggttcaggagctgctttccctctggagccttgcccagtgtccccctcccctggactaccatgtgctccgtgcctgtctcagcaagggggttctggcatcaccgtcacctgtgtgcatgtctctcctccatgagactgggcaggttcccaaacctgcctgtcctctgggcccactagggactgttgaaaatctctgagcgggaagtactagaatgtggatatttgaaagctccttgggtgaagcagtgactatctagacgagcactctgtaaatattgggcaagacgttggacttccctggggcacgaaactgccatagaccagaatgtgtctattatgttgtttttttgttgttgttgttgtttgttgttgttgttgttgtttgagacagagtctcactctgtcacccaggctggagtacagtggtgcaatctcggctcactgcaacctctgcctcccgggttcaagcgattctcctccctcagcctcttgagtagctgggactacaggcacatgccaccacgcccagctaatttttgtattttttagtagagatggggtttcaccatattggccaggctggtttcaaactcctgacctcgtgatccacctcccaaagtgctgggattataggcgtgagccaccgcgcccagccgataatgatttttactgcatcaattgatgtttgttgaataaagagcagggaggggaggaaagaatgggatgagggtagagaaaggcaagatcagggagaatttcagctcctcgggcccagacctgtcatcttatcagaacaatcccaatcccctgacagtggtctggagaccagtgacccttcggcaagagcattttagctgaggaatttttgcctttcttaaagataagattaaattaatgtgactccaagtcttaccacaaggacattgccctttgctgggaagccgagcattcccatgtacctcacctatgatgttcttggtgcctcattacacatggtagcaaaaatgccaaaagcccctaagaggaccactgtgatcctctgaagatggggattcctaatcccgcgaacccagttcttcagaaccccgtttgttctggagaaataagaactggtcatacctagtctttgtttccctctcttttgatcattttttggatgagtcaaaatcaggtcaccaccagcaccaggatgtgacatgaagggacacgcctcagccccacagggtacattcctgccctcttcccagactcaggtcttccctgcctctgaatcttgctctctcttttccttgttctcacttttctttcttttattttctgcccttcctttgttttctttgattcctctttcttttttacctggggaaaaagtcttcagacttctggagtggattcatgagtgtgaatggggtgtagcccgccaacatcattttttcccaaggcacagaggctgtttctgtggctgggcacagctgagaggaccgtctcattgtactgggggattgatggctgatggagggaaggaacatcaggcagagtttgtcctgcttccctcgggctccctatatcatgttgatggggttgcaaccctggcctgcaggagtaggtctggcctgatggaggctgggacatctggaagccagtggcctctcagccagcccctggctctcacgcacactctccgggaagagccccaggtctcttcttcacccttcttcactccccctcaccctcctggtgggggttctctgaccccagccacacagatgggcagggaggcatctccaaaggccagacgcttagctgagaaatcatttctcagttcctgtgtggtcccttgctcttagcctttttctcctttgttcttagtcctgtttttgccctgatttttcagatgggcgccctggactgaggcaaactttaatattgcccctgggatcagacacacgctggccccctctctggctatgctggcctccctgtttggggcagcaggtaaggaagagctggctcagtccaggccagatgagaaggaaataaaagttttccttgtcccccttcctccaagcctcttccttcttccctttccccttgccgtgggaagttctcttcctccactccttccatccctcgccgtctgtgggcctgatgctgattgtcctgttcactatcaaaatgatctgggagaagaaagtcatttatactttagtatgagtttgatccatagtttgtctttccttgggctatttgctctgtgagtctcactggcagatgaaaagttgagggatgcattacagacactcggggccatcacagaagaatgggggtgggggatggggaggcgctgacagtagaaggaccctccagagctcaagcagtcacacacacaagctgccacccccagtcctcaattggtttccatgccgttcatagtctgggacaaaggacttaaaaaatatgtggttgagagtggctctgagcccagccaggtacagggagcagggggacctgaggctgcttggctgggcaaggcaagaatgcagggagctttttaagacggctgactctgtagctctgatttttttttcttatgaaggagcaatcctgtttggctccaagcctagggatggggctggctctgtggagcaggttgcctttgagccgggtggggctgccccaggagtcatcggctgcctctggaggtggcgaggtttccatcacagcggttggggtctcctggattcaaccatcattagaggaggctttgcatattgccggggttgtgccagatacctgggggccttgactaaaatgtgtttcctgggcactacccccagctcgctgaatccaggagcagccccgggatcattgtgacctcacagttcagacagcatcggtcccctgtgggggccacctttccagcccctcctcccagcagaggatcccagtgccctcctggcctgaaggccctgcaggcctggccttcccaacttcctctctgcccttgtcccccgtcgtccctctagttggcctggccctcccaacttcctctctgcccttgtcccccgtcgtccccctagttggcctggccctcccaacctcctctctgcccttgtcccccgtcgtccccctagctggagggtgccccagcctggctgacctcagttcttgtccccagcacacacaactcttcccagcctcaaggccttcacctggctgtgccgctgcctgcaatgttcctccccagtcttgtcagggctggctcctggggagaagatctctgctcagatgtcacttccccggaagggccttccacggccacccacgtcgtgtctccccacgcctgcccccacactcgctag

SEQ ID NO: 1884430 - DNA, 4001 bp, Homo sapiens
tgacagtggtctggagaccagtgacccttcggcaagagcattttagctgaggaatttttgcctttcttaaagataagattaaattaatgtgactccaagtcttaccacaaggacattgccctttgctgggaagccgagcattcccatgtacctcacctatgatgttcttggtgcctcattacacatggtagcaaaaatgccaaaagcccctaagaggaccactgtgatcctctgaagatggggattcctaatcccgcgaacccagttcttcagaaccccgtttgttctggagaaataagaactggtcatacctagtctttgtttccctctcttttgatcattttttggatgagtcaaaatcaggtcaccaccagcaccaggatgtgacatgaagggacacgcctcagccccacagggtacattcctgccctcttcccagactcaggtcttccctgcctctgaatcttgctctctcttttccttgttctcacttttctttcttttattttctgcccttcctttgttttctttgattcctctttcttttttacctggggaaaaagtcttcagacttctggagtggattcatgagtgtgaatggggtgtagcccgccaacatcattttttcccaaggcacagaggctgtttctgtggctgggcacagctgagaggaccgtctcattgtactgggggattgatggctgatggagggaaggaacatcaggcagagtttgtcctgcttccctcgggctccctatatcatgttgatggggttgcaaccctggcctgcaggagtaggtctggcctgatggaggctgggacatctggaagccagtggcctctcagccagcccctggctctcacgcacactctccgggaagagccccaggtctcttcttcacccttcttcactccccctcaccctcctggtgggggttctctgaccccagccacacagatgggcagggaggcatctccaaaggccagacgcttagctgagaaatcatttctcagttcctgtgtggtcccttgctcttagcctttttctcctttgttcttagtcctgtttttgccctgatttttcagatgggcgccctggactgaggcaaactttaatattgcccctgggatcagacacacgctggccccctctctggctatgctggcctccctgtttggggcagcaggtaaggaagagctggctcagtccaggccagatgagaaggaaataaaagttttccttgtcccccttcctccaagcctcttccttcttccctttccccttgccgtgggaagttctcttcctccactccttccatccctcgccgtctgtgggcctgatgctgattgtcctgttcactatcaaaatgatctgggagaagaaagtcatttatactttagtatgagtttgatccatagtttgtctttccttgggctatttgctctgtgagtctcactggcagatgaaaagttgagggatgcattacagacactcggggccatcacagaagaatgggggtgggggatggggaggcgctgacagtagaaggaccctccagagctcaagcagtcacacacacaagctgccacccccagtcctcaattggtttccatgccgttcatagtctgggacaaaggacttaaaaaatatgtggttgagagtggctctgagcccagccaggtacagggagcagggggacctgaggctgcttggctgggcaaggcaagaatgcagggagctttttaagacggctgactctgtagctctgatttttttttcttatgaaggagcaatcctgtttggctccaagcctagggatggggctggctctgtggagcaggttgcctttgagccgggtggggctgccccaggagtcatcggctgcctctggaggtggcgaggtttccatcacagcggttggggtctcctggattcaaccatcattagaggaggctttgcatattgccggggttgtgccagatacctgggggccttgactaaaatgtgtttcctgggcactacccccagctcgctgaatccaggagcagccccgggatcattgtgacctcacagttcagacagcatcggtcccctgtgggggccacctttccagcccctcctcccagcagaggatcccagtgccctcctggcctgaaggccctgcaggcctggccttcccaacttcctctctgcccttgtcccccgtcgtccctctagttggcctggccctcccaacttcctctctgcccttgtcccccgtcgtccccctagttggcctggccctcccaacctcctctctgcccttgtcccccgtcgtccccctagctggagggtgccccagcctggctgacctcagttcttgtccccagcacacacaactcttcccagcctcaaggccttcacctggctgtgccgctgcctgcaatgttcctccccagtcttgtcagggctggctcctggggagaagatctctgctcagatgtcacttccccggaagggccttccacggccacccacgtcgtgtctccccacgcctgcccccacactcgctagcccgccgtcccctcttcctgcttccgtcctccacagcagtcatcaccatctgatattcctgtgtatgcatcggtttgcctttctggctcctggttttgctctgcctccccgctggaaggtaagctctgtgggagtagagcagggacttgtttgcattgtttattccgtgacccagccccggttctgtgtctggcacatagaagtgtcgctgaatgaatgaatgaatgaatgtccattgtgtgaatgaaagagtgacaggtttggaggtcactggagcagatggccaagtctgtgacagctgtgataataaacagtgattacaagcagggggtcagatgccgagctgccctcgtgggcactaagggtcccaggccctgagcttgcattcccaagggaccccatgcttggtgtttggggcccactcttaacatctcaacagcctgtcttcttattgggactgagttggaaacaggggtcccagagcccacatgacttgtccaaagacaccctgcagggttgcagggacagagggggaggaggcctgtgcctggcacccatcatcagtctctagaaagttccattctgatagatgagtcagccatgcccaacagtctcctgggacaatcacccccacaaacatttgccaaatgtctgcaatgtgttgagggcacatggagtcctcctctccttggtgatttggtggcgggggcggggtgggtggcagccctgactttggcctccctgaatgacggcacagcagagacgtctggtctcccgtggagattagacccccttcagcggcagggatgctgccagctccatcaccgtaactccacggtggagcaaagcaccccggaggctgtcctggcacaacctgaccacagtcatagaccagtcagccccaggagggacactctgccccggcctggttgctgccagccaggcccatggatgctgctagtccagccaaggaagtgcctgtccccactcccaggcccatgcaaaggggcccaaaacaaacttgaaaaagcagccccccagcggggaggccagtctgtccggggtgtccagggatcatgaccggcactgctgttttcctaactcatgtgaccaaaaatccttttatttgtataaaaatggagcctggttgtctaagtcttcccaaagtttccttatatcaagcagtcatgaagggccccccacagagcaaggtctgtactggccaccatgagaaactgctgttcccaccttccagccatgtccaaacccctctaccccgtggggcttaaccacctctgagcatcccacctgccgtgtcatttgcttctgttttgtcgatggtctgcctgcccctccctcgctggacagcagctccaaggggacaaggaatcgtgggtgttttttttttttttttttttttgagacggagtctccctctggtgcccag

SEQ ID NO: 1884431 - DNA, 4001 bp, Homo sapiens
gttctgggtcgggtgcagtggctcacgcctgtaatcccagcactttgggaggccgaggtgggtggatcacgaggtcaggagatcgaggccatcctggcccacatggtgaaacctcgtctctactaaaaatacaaaagttagccaggcatggtggcatgtgcctgtagtcccagctactcgggaggctgaggcaggagaattgcttgaaccagggaggcagaggttgcagtgagccgagattgcaccactgcactacagcctgggtgacaaagcaagactctgcctcaaaaaaaaaaaaaaaaaaaaaaaagaatgtgttctggtcatcacaggtctagaaagaaggaagtcaataagcagaaacaggtcagtgtgtctttcacatcttagaaatggagacccgatcaacagacaagacaatcagcctcccttggaaggtatgattctgttggttaagagcacttggttggaagattctccacctaattctcttgtgtctgtttgttaccggggggtccttgctcccagagctcccaagatggtggtgggctgcttccaagatggtggcaagtctcatgttctctgacctggggttcttggcctcacagattccaaggaatggaatcttgggccatgcagtgagtgttatagttctattagaagccatgggtcacagaagagaaccatggaacctggtgactagtgttcagttccattaggacgaacccaggcacttagccgtgcaggaacaatggcaagcctttagcctgatcgggagcagcaatgggcccctcactggattaggacagtggataccctgccagatccagagggatagacgtcagtggtgggtctgcgacagtagcaaacagcagtggtgggcagcgagcaaaagctctgttcgagccataacaaacacggaccagaagagaatgcagttgcaagatttaatagagtgaaaacagagctcccctacaaagggaggggacccaaagagggtagccattgctggctcggatgcctgggtttatatcgtgatcattgtccctccccctgtgctctcaggtgattgatgattggctatttctttacctcctgttttagcctaattagcattttagtgagctctctttactatctgactggtcaggtttgagctaagttgcaagccccatgtttaaaggtggatgcggtcaccttcccagctaggcttaggaaatctttcttggcctaggaaatccagctagtctgtctttcatgtttccagattacagatttgtaaaatatctagctagctgcccatcacatggtaaatattttacatacctaaattcactttcttctttcaccctagtctttctaaatccattgtatatatgaaaaggctgaggcttatggaaagtaagtaatatatcccaggtcccacagccaagtagttggcagagccagaattcgctgactctttgatgctacatgcagaatcttgaatggcattttatattatgctgcttcccacaaaaaattctcatccagggagagaatgcattgaccaactaatattaatattcaggtcctcttgcaaaccagagttctctgtaaaataattgtgtctggttgtaaagtagtcccttgtgaataggaataccatgatttctcacacctcatccacttcctcagacatgttgcatcaattacgtacattttaggggaccaacaaagttaagaacagtctcaggaacatgccaaacctaccaaaatgtcatccttggtggccagcctgaacagcaaacaagcctcttaagttattccttttcttctaaagccacagactttatctttctttctcctccctctgtctccaggaggctgttgtgttttatgcgtcaagctcttgggtatttactgtaactgcgtaacacaaatttttgagctattttggtcagaggcttgcccccatgttgttctcacatgaaagattttccaaaggttttataattccacagctcagtcttatcttgaatggtctttcttaaatacaggctctgtggacagcagggaatcttagcagctgcttttgtgatgtaatttcacggtcaacaaaaaggcaactctgaccctcataaatttccatctccatctgttcaatggtatctaaaaatcgaaagagatttattcatttaagctgtgactgcctgtgtttcccacaattcatatacctctaggaaactagtatattaagcttcatcagtcattagcatcctactgagtctgagtttatcaagtcttctacctacaggacatttttaatagggacagaaagggaagcctcagatcataaggctgtatttaaagcacagaaggaccatggagtattgcgtctgtctctctagaacccaactcagaggagagaagtatcaaatgcctgattcacactctctccatagtttttttttgtttcactagatcctctgcaatctggctcccactgccaccctctgagtgtgttcactgatctgtaagctccataagggaaggaattccacccatgctttgtcccaactgggactgccacaaaacccatgctcaatgagcatttactaaaaaaaaaaaaaaaaaatgtggaagaatgaccttcccgtgggcactattcacttcttatggaaactctctggagcatttgtttaccatttcctcattcctggaacccctcccttggtgttcatgtttccccaccttcattgggtgaaagtgaagagatgatggtggcacactgatgaggagattgaactctggagtaagacagacaaggtttaaatccgagatcttctacttactacttgcgtgacccaggcaggtacttaattgtccaattttgttacttcatgaaaaataagggaatctgacaagtttttgcacaatcaggttgcaataaggattatgtaaaagaatccctgttaacattacatagtgccatatacatagtcagcaatcataaatattagctatcattttaataagttaaaaccctttggttgctatttctcatgctcattcacctgtcacttaaatctttacagatgaaaaaactgaatattcttcaagttttcattctctttgcttcttttgtttttaactctatctaccactactccctttgaattctcatccagtctatagcctcagttacacattatattttaatgacatgccctttaacacttaactctcatttctgaacataaactcctatgtgacagatattactatgaattcacccaaattcacttttttctaccttttgagtacactgctagactacatgtttcccaaccttccttagagttttgtatggccatgtgagtagcttctgtcaatggaatacggtggtgataaaacaagccatccctaggattagcacataaaacaccttccatgtgatcattcatactttctccccatctaccagtttgtacagaagatctaggggaggagatggacccttgagaatggtgaggtcattaagattgtagagcagtgtccctaaatgaccctggggaaggcctcttgccaaccaagaacaactgcattgttctttgcatgagcaagaaattaacttttactgaattaaaatgttgagatattggaggattgttacagcagctagtggtttattacatgccctttatctaacagcctcatagacctttcacttagctgttccctctacaaatcaaattcagcatgcctaaagttgaattcacaattgttgaaattttactgaaaaagatattttccttaaccaaaattcaggcaaacttctgaacctttttctaggcccatctgtgtacttacttgtaaaatccagtgttagaaaggaaccataatgctaagtcagtgtggtactgtgaaattaaaaccagcccaacttctccataaaactgacagttacgtgtttttttgaataaacacagaaattgaccctcacagtcttaaatcttgaa

SEQ ID NO: 1884432 - DNA, 4001 bp, Homo sapiens
gtcatttagggagagtgcaggactggtgggctgtcatgaggaaacacattctcttaacatagtgttcaatttattgcttagagtcttctaatttagtttagagataagactggcaagaagaaaatattctattctataataaatgaacacctacatccttagaggttgtaattttgactcccacttgttttcatgtatccagtcattcaacaaatattgattggcactggattaaacactggctgtttaacagctagcaagattcacatggtccctgccttcaacagctagcagtccactgagtgcacaggtaaaataaccaacaattacaatactgtgttttaaaagctacgataggataaatatgttttatgactacctaggaaggacatttggctcatcagactcattaggaagcaatgccatatgaaaacactggatttgtctcttctcctttattagattacagacaggtgctcttgacaaaatctggcttactttatctttgaattctctgtagtatctgaattatcacttagcacaagtacttgcctggggtgtatccagctgattttctgaggctcactcagtatctatcccaatcttcttatagtatcctacaaggttgaaaaactaaaaataagatttcccagactcctttacgtacatggttatgattgtgacttggattaggccagttagatacaatcacaatgatttgttttggaaatggttaaatgcaaacagaagtagtacaaaatctgatacaggtgtagactatagcagacacatgggttggagccaacaaatttgacaatgacttcctgggtcatagtcaaggtagtatgaacctgaggccagcagtttgaatagcagcttcctgactccatgacttttcaattgtgacaaagatgacagctctcttggtgggcaagttctgcagggtaactcttattctacagtcatttctagaggcccagcctaagggttgcttttccagcactttgaacaatgttgtagccaactaactccttatactaagtccctttctgctcaaactcgctggaactatctctgctatctgcaactgaaccttattgcagccttttaagcaaaacttaaatttttcagaaacatatactaatctccatagtcaatacataaagcactataaagtataataagaccacccactgaatgtgaaaatagcaagaatgagcacacaatggcacatttaatcaactacatgaagaattgtgcttaagatggtctgtgaattcatttgtcagtagtttggagccactcaaggccaatcaatgtggctctgttgcatgcttagaactggcatgtaacaagtaggcagtctaatctatcctatttaagaatgtgttctgggtcgggtgcagtggctcacgcctgtaatcccagcactttgggaggccgaggtgggtggatcacgaggtcaggagatcgaggccatcctggcccacatggtgaaacctcgtctctactaaaaatacaaaagttagccaggcatggtggcatgtgcctgtagtcccagctactcgggaggctgaggcaggagaattgcttgaaccagggaggcagaggttgcagtgagccgagattgcaccactgcactacagcctgggtgacaaagcaagactctgcctcaaaaaaaaaaaaaaaaaaaaaaaagaatgtgttctggtcatcacaggtctagaaagaaggaagtcaataagcagaaacaggtcagtgtgtctttcacatcttagaaatggagacccgatcaacagacaagacaatcagcctcccttggaaggtatgattctgttggttaagagcacttggttggaagattctccacctaattctcttgtgtctgtttgttaccggggggtccttgctcccagagctcccaagatggtggtgggctgcttccaagatggtggcaagtctcatgttctctgacctggggttcttggcctcacagattccaaggaatggaatcttgggccatgcagtgagtgttatagttctattagaagccatgggtcacagaagagaaccatggaacctggtgactagtgttcagttccattaggacgaacccaggcacttagccgtgcaggaacaatggcaagcctttagcctgatcgggagcagcaatgggcccctcactggattaggacagtggataccctgccagatccagagggatagacgtcagtggtgggtctgcgacagtagcaaacagcagtggtgggcagcgagcaaaagctctgttcgagccataacaaacacggaccagaagagaatgcagttgcaagatttaatagagtgaaaacagagctcccctacaaagggaggggacccaaagagggtagccattgctggctcggatgcctgggtttatatcgtgatcattgtccctccccctgtgctctcaggtgattgatgattggctatttctttacctcctgttttagcctaattagcattttagtgagctctctttactatctgactggtcaggtttgagctaagttgcaagccccatgtttaaaggtggatgcggtcaccttcccagctaggcttaggaaatctttcttggcctaggaaatccagctagtctgtctttcatgtttccagattacagatttgtaaaatatctagctagctgcccatcacatggtaaatattttacatacctaaattcactttcttctttcaccctagtctttctaaatccattgtatatatgaaaaggctgaggcttatggaaagtaagtaatatatcccaggtcccacagccaagtagttggcagagccagaattcgctgactctttgatgctacatgcagaatcttgaatggcattttatattatgctgcttcccacaaaaaattctcatccagggagagaatgcattgaccaactaatattaatattcaggtcctcttgcaaaccagagttctctgtaaaataattgtgtctggttgtaaagtagtcccttgtgaataggaataccatgatttctcacacctcatccacttcctcagacatgttgcatcaattacgtacattttaggggaccaacaaagttaagaacagtctcaggaacatgccaaacctaccaaaatgtcatccttggtggccagcctgaacagcaaacaagcctcttaagttattccttttcttctaaagccacagactttatctttctttctcctccctctgtctccaggaggctgttgtgttttatgcgtcaagctcttgggtatttactgtaactgcgtaacacaaatttttgagctattttggtcagaggcttgcccccatgttgttctcacatgaaagattttccaaaggttttataattccacagctcagtcttatcttgaatggtctttcttaaatacaggctctgtggacagcagggaatcttagcagctgcttttgtgatgtaatttcacggtcaacaaaaaggcaactctgaccctcataaatttccatctccatctgttcaatggtatctaaaaatcgaaagagatttattcatttaagctgtgactgcctgtgtttcccacaattcatatacctctaggaaactagtatattaagcttcatcagtcattagcatcctactgagtctgagtttatcaagtcttctacctacaggacatttttaatagggacagaaagggaagcctcagatcataaggctgtatttaaagcacagaaggaccatggagtattgcgtctgtctctctagaacccaactcagaggagagaagtatcaaatgcctgattcacactctctccatagtttttttttgtttcactagatcctctgcaatctggctcccactgccaccctctgagtgtgttcactgatctgtaagctccataagggaaggaattccacccatgctttgtcccaactgggactgccacaaaacccatgctcaatgagcatttactaaaaaaaaaaaaaa

SEQ ID NO: 1884433 - DNA, 4001 bp, Homo sapiens
ggatctgcatgttacatctcatgtctacacaagcagtggtgtgctggagctggctcaccccagctcacaggagttgttggcatctttatccaaccacagtcagtggtgacatttttgcatgtcgaaattagccactgtgggagaattgacaccacagaaattggcaaatgccacaaaccagaactttatttttttcctggagagctggtttaccagcacacctcgaatgtggtccacaagtgattaacactgagtaggttaatgattgtccctacaattcagtcttctcatcggtaaagtggggccaataatactgtaagaatactaatattacttaggctatagggtcagcatgagaattaaatgagttaatacatgtaaaatactctggacagcgattaaatgagttaatatatgtaaaatactctggatggcgactgccacacaggaaacacccggtaagtattaactactatgtttactgttgccattgttattacaattattgctaccttaaaaacttccactggattttcatagaggacaagcacctaaatttcttagtatgacatgcaaagacctttcacaatctgatagtttcaagcacaagaaacttttcatcatttctggaactcaaactgttttccacctccaaaccttgtcacgcccatgtaccttctgccaggaaagcccactcctcccttgcctgtcaacttccaatttttttcatccttttgaaccagcacccatcacctcctctctgatgccctctccacccactacatgagggttccttcttcagtgttgccattgcatattgcacaaccctcagttactctgacagcactttattgtgattacttgtttacataactgtctcctcctttgagtccaggattggatctgctatttctctgtgtaggcagcacagtaacacaggtactaataaatatttgttgcatgaatgaacattgcctgggaaatgcataagaggggggaaatagagtacatagcctagtaggctataataataataataatatttttatttgcttaagtgactctaagtatattgtgtaaagcagtgactttaggaccccagagcttcaggttctgtaagtcctagatttgtcatatactcacatcctgacacagtcctacttatccttcagatggctcagatgtcacgctctctgtgagggttttcctcccagctgtcctcttgccgctctttgcctgcgcacctattcacatacgcataattgactcttctggacgtccctgtggggatccagtggtgtttgtgtattcccactccatggtacagaggggcggatattttggggatcctgtgagcgtggtgttaacaatatttggggatagtcacagccttagacctgtgaattcatcgctcaccctgcctccgcctcaatttcccctagtgtgatgggcacagtggaaacaccttcccagggtcgcgatttagtggagggcggcggagactgatgttgcaggaagcccccacgcattccgaggagctgaggaatagagagcgaggtgaggcgtcgaaacaaggaaggagtcagggggcgtggagcgagactgggcggtggacgggacgggccgggccggggccagagggcggggcctgagccgggagggggcggagacaggggcggggcaggcgagggcgggagcggctgccgccgcgcggccaggactgtctgaggggaagttcgcgagcgctggctatgggtcctggggcgcggctggcggcgctgctggcggtgctggcgctcgggacaggagacccagaaagggctgcggctcggggcgacacgttctcggcgctgaccagcgtggcgcgcgccctggcgcccgagcgccggctgctggggctgctgaggcggtacctgcgcggggaggaggcgcggctgcgggacctgactaggtgagggcacgacgagtgggagcgaccgaggggcctcagtgggatacactgtgccgcagggtggggtgactcaggttgagtgtgaccccaggctcattgtcatgctgcgtgggaccccagacccactgtcgcaccgtgcgactgagacattgtggcatggggtggggagtggctctgagggccagtgtgaccccctagacccattgtcaccctgtgtgggaccctgacactccgtggcatgaggtgttggcgagggttgggtcacactgggactgcagactccatcacacacatagtggcaccccccatatccagcgtcacacagcaaagttgatacactgtggaagagcggggcggggtgactctaggacctcacaatgtgctgtgcaaagctgtgtgagccccaggccctgtgtcacactgacacagacacagtggacggtgctgtgacagagacactgtgagagtgacatggagagaatacggtgacgctttagctacgcaagtattgacctttcaaggggggatcgtgaaacaccgcatgacctagtgagctgatgtttagtgttaggagtcaggtgacagtcttccaccatatgtgaggtttacatgtcattgggactggatgggcacgacactgtggatatcatactctgcatgtgaatgatgctgagtaactgtacaggtcgctatatgaataatgcttcagttcattaattcatacaacacatatttttgagtgcctactaagagccaggcagtgttccaggcagtggggataaaatggtgatcaagagccaactctgccctcgaggagtttgggtctgtagcaccatgactgttaatcagagatgtccactgccgtctacgtcttcagttcttccttctctttacacatgtagaagctctctaaatactaaataaatgataactgagatgttatatgtgtgtcaacatatttgatatcaaaaaagcactgtgaaaaaacatacttgatgcagaagatactgagtgtagcacacagcagtggatgctcagctaatatagttttggggtacagtcaacaaactctagtgctacacactgtggcataaaaggttgtcagacttgggatgctgaggcaccatagtcatgtatcgacttagcagtgtccaactgacaaaaatgaaagataaatgattgtatatgataccatctgtatgaatatgtgctgcgccttctctgcctgggacatcaagaagcctacaacactgacagagtggttatgaccacgtcactatttggatatattaatattgtacttatatcatgtgaccttatcattgagcaaagacagcacaatgcactgcttttaaaactttgcgtgagtgtgtgtggtaataatactgattctggggtgacatgagaagaaggtatgtggaatggggagtgactctgaggtccagtgtgacccccaaacccattgtcaccctgtgcgaaactttgtgaccccatgactgtgagagagagctatgtagaagagaagcattttgtgggtggaaagtatttgcgagagatcttgttaatagtgactgaatgagctaatgtggtgcttgtccttaagtatgtggcttgcgtataaacagcttgaaatagtgtgacaatatacaatataggtatgtattaattttaacaataaatgaagatcatttcaataattattgtcactctttggaatagcatagttgtctagtattctatgggtccatgttgaccgagccaaatgttttctttttgttcatagcccagagtcattggagtccaagcttattagtggaaataggacagaattttttctctttgatttcagagcccagcattctccctgctacccatgcttgttctcataccagtaatctctttgggtagctcagatggagacgggagtggggggtcaaaatccccctgctggtctttcaggttacattctcagaagagagcacttgaagcattttggccaaagcagctggccaaccccattccaccatgctggtctccttcactgtctttc

SEQ ID NO: 1884434 - DNA, 4001 bp, Homo sapiens
caggtaaaggatgatgatgcctgggttagggtggtggagataagaacagtgaatggatttaggatatattttagaataaaagcggatcgaatttgttgatgggtgagctgtggggaatgaaagagggaatcaagattgttcccaggtttttgctttgagtgcactaatgatggcaccattagttgacataaggagccctgggagaggaagagattgggggcaggaaaggaagagtttgacttagacatgttaatttgagatatttattaatgaacccactgaagcccccatctcatactttatatctatcactataccaagaactatgagatccaagaccttgccttccttttcaattccttgttaagcaggaataaagtgaaaaattactgaataaaatattcagtttttttgcaaaacactcttacgttcagaggtttggtagcagagccatatcttcccaggcaggcataagtagccaatcaatctccatgtcataccaagcaacggtccaaggggcaaactaattaaaaatttaatcccatgattttcatcttaatctctttttcccattagctttgatcaatgcctacaactacaatttaaccaaacttttcatttagataaatgactcagtggggtacctatttagtccgtttgttatgaaccaatggataactaaaatgtatatgctaattactaaagaccacacactaattttcaaagcattttattagcacaaaagctgtgttcctgttatcaaatgaaatgcgcttcctatgttacactcagtagttgttcaaaccagtttctcttgacttcagtagccaaattgcagcatgctgtgtaggtacacagtgcacttgagaaatgtctgcacatcccaaccctgcactatatcacaagcagtagtgaaaggtgtagcaaataagaagattccatgaacttctcagctacctgagacttctgctgcaccctgaaaaaaaaaatcaggctagaaaccacataaaacaactaaaccaaactgaatgcaggggctgctatgaggaagaatgaactttgcagcctgttccaaatgctaaggtgaaggaggtccttcctggctctgctcactaggtgtgcaagtcaggagatattcatttcgtgatcatcctttcctatcacctgtggtgaaatttctactgctttcaagtcttccagcccctatttgaatgccaaaattcttaagttccttcaagtaaaagagatcttcattttaaaaataaaagtcaatggctctggtctcctgtagccttttcagcccctgtaacagtgctttctcacttagattttcactgtcacttcaataaaggggtgagaagagagaactggcctgcgatcaatgaaaactattcagtaaaaactcttcatgccagacatggccccagaaacaggaggaaagtttaccagacagcaggagtgggtggtggctgggtccagtggaatgggtaaacctaaaaggggacgaaaatggttttcaggctgctgtggccctctctacacacaaattttgtggccatgaagtcctggctactaagcatcattgtctttgcgcaaccgctgcacctgccacttccctcaacccattaataatcgggttcctgggaggattttcatccccaatttactggacatgcctccgagccacctccccgctccggccctccctctcgttggtcgccttcagactcccccacacgcgggacggcccctccccccaccctcctcaccggctagccgcggccagcagagccttcgagcggctctgtcaggctgccctggagcgtaaggaagaagaaggcgcgaaggaagaagacttcctcatattcttggcttccaaggggcgctagggcaacagagggggaaatgacgtagcttccatcccggaagcgaaaattgggcgcgggtccaggaagccgccatgttgtgtgtggcggatgagaatttcagcgctcagcatctgggtaccagcagagaggccccacagagaggctagactaaccgtctccgcctcctctcctttctctgctcctcccctcctcccatcccccctccctctcctttctcagtgtactaaatgagtgcttcagagcccagtgaatagatggacaaacatttaaatttcctagccggaaacactgaaaagatgaactgtcaagaggcgtttgaaccagagggactccatcttgaataggggctgcataaaagaaggtggagacctgctgggatgcattcccaggaggttaggcattctaagtcacaggatgagacagggaggtcagcacaagatacaggtcacaaagaccctgctggtaaaacaggatacttaaagaagccggccaaaatccaccaaaaccaagattggcaatgaaagtgaactctggttgtccccactgctcatcatatgctaattataatacattagcttgctgaaagactctcccaccagcaccatgagcatttacaaatgccatggcgatgttaggaagttactctatatgatctgaaggcgagggtggaaccctcagttctgggaattgccactcctttccccagaatactcttgactaatctaccccttgtttagtgtataatcaataaataacgtatacacagttgaacagcccatgccgctgttctgcctatggtgtagccaatcgtttattcctttacttttttaataaacttgctttcactttactctttgaacttgccccaaattcttcgttgcttaaagtctaagaatcctctcttggggtctggatggggaccccttttcattaacataaccactttacaatagttgagggtttcaagcaccaggctggtgagtacagagtacatggccctgcttttcttgactttggttacttggactcaggccacagctgaagaatacaggagggagggagggagagagagagatcattgggaagcaggtggcggcagtggtggtggtggattgggtgtgtgaaatttgcagagttggggtgactgccaggcttctgggctgatagctgggagaatgttgggccatcacatactaaaagggaaccacaggagaagaagctgatgtgtgggaagtttggttttacatatattaagccttgaaggtcttctaggggagaaactcaacaggccaatggatgtgcctggtttgattttttagatgacaggcctgagctagaaatctgtgccttagattcttgtatatgaatggtgctagagcaggagcttagaagaaattgcctggtggagagaataccctttgggaaagaggcgcaggacagagtgtcaagagctcttctactaaagaaagggaagatgagcaggcagccctaggagaggaaccagggaaatgcggcattgcagggagcaagggaagagcacttcaggaagagtaattaggtcagttttgctgataaattagtgagatgactgagcagactttgttgttacctggagcagattccttggaatggctggagaaggtcagcttgtggtgagttgaggaataagtgagggtgatggtgagaaaatggagataaatgaacataggcaaatcttccaagaagttgtctgtgaagaaatgagagtgattctgaaaggaaaatgatgatttttaattattattttttaagattggagaaacataagcttgttttggggggtttttgttttgttttgttttcttgagatgtagtctcactctgttgccgaggctggagtgcattggtgtaatattggctcactgcaacctctgccactggggttcaaatgattctcctactttagcctcctgagtagctctgattgcaggcacgcgccaccacgctaggctaatttttgtatttttagtagagatggggtttcaccatgtttgccaggctggtctcaaactcctgacctcagttgctcccaccttggcctcccaaagtgctgggattacaggcacgagccac

SEQ ID NO: 1884435 - DNA, 4001 bp, Homo sapiens
caacataaagaaggccagatggcacttgcacacacagtgggttgtattataagatagaaaccctgaacttaggaaacttaaatctttataagggtcaatagctatgactgctctttgctccagaaagaaatacaatctctattttccaggctgttcactacacaaacacccttgaaaagatagttcagagcaaagggaagttggtgcttgtctccagaatgtgcagaaatgggagagatctgtgaaggactgcctctcatcacaccctatgctggagcccctgacttgctcatcagcttgcccctgctagttcagagtgtcctacctctgaatcccaattctgcagctgggacctaacagctaactacctatgtccaagcacctgaattgctcataattccctagattacttctctccaaactttcttctcaggcaaatgggtgcccaagtctctgatccctggtgggaactctccaagctagaacagaacataagaatgtgtggagctagccagaggctgcagaacaatgagccagagaagacagtaggagcatcattcaggttaaatggagggttgcaagctaatcacacaatccaaatcactagttctcaaacttcagtgttttggtgttgaagttatttcacaacttcagagtgtagcagaatcacttggagagagtgctaaaacacagattgttgggccctaacccaaatgcctctgattaagcaggtctgagctggggccttgcaaatatgcacttctaataagttcccaggtagtgctgatgctgttctggtctaaactttgtccatccaaggtaactgggctgagaaataacagtcagattgagaccaatggaaggccaagtggaggaggtaacaggaaggtttagaagaacctgaagggatatgattcagctgtgcaacccagaggccagacacttcctataaagctccctcagccttgcctgtgggtcagggagagtgctattatagggtcatttagggcagtgggatgttgggcttccatcatgttgactactcgttatcccagatgctatgccccctgttaaacatggctccttccagtgtctgtggctggctctgctcttagggtctcatcctaccccacaggtagaccttgttggagtttctgttcctcccagcccgcctgctcccagtcaagctaacccagccatgttagttagcctgtttcccttccccacatttatagatcatacacacccgccaaattcattattctcccatctctgctctgtactcaagaggctgataccctcacagactacaatacctgggctaccttgtggcctgtttccagttccatctggctaaagggacacactggcaaagatcaaaggatgacagatgagtttcagctgttcactctcctccttcctcctcagagctgtatctctcgcaatatttgcatcccatactgtctcttctgctgagtggcccctgctccatggtaccagctttaaaactggaatatcatttctataaagccatttcctcctcttgtcccttcagtgctcggggtggtaatggcttcctgctgttatttcaggggcatcactacccatcacctgttcccctggtcctgcctacactgctgtaagcagttccttcagtgaagtctcctaaacctctgagcaagattctgtttctactgagaacccttgagggacatagtcgtctcgcctgatcacaccccaaggtgtaccatagctcctctctgctgggtggaggtacctgaagtgggcccttctcaggaattgaattgataaagagcttcctataacttcttgagaatccatcttgaactccaccccactccacagggctcccctagtgatacgaagacggcagcaaaggtgaagccacatcagacatgactgaggtcttgtcagccaagcattggtgggctcctctccccagagagcttccctcagtgccaacgagcaatagagcaaggctgccccccaagagcaaaagtgctcctaaggccctgctaacagtttcccaaagtcttgtcaggaacaggaggctggtaccagcagcactccggagtctctgatgttgccatggtagcagtagggtcactgcttagcaacagaccagagctgcaggaagttgctaaggtattttcacatgtgttaaagcaaatggatgtttatctcaatcttgagtgtaaatacactgtagggaaaaaaagagaaaacatgtacacacaaaccacctactgatgttcagagctgcacgtctgctgatacttgaggcctgaagcatatgccttctctctggaggaaacagagagaccatagatgacccaatgaagtacatcctcttaccccctaaaacaactgttcacctgtcttcccaccaacccaggcttaaaaccttccccatcatttaatttccaatagaatttccaaatctttctcctaaatggtttttgagaggccatgtggcatactaactaaatgtgtggactctaaagccagactatgtgagtccaaagcccggcattggccccctctttctttgttactttggacaagtcacttaatatctctgtgcctcaactttctcatctgtaaaatgggtataatactagtgcctaccttacaggattatgtgaggattaaataacttcttccatgtcaagcactttcaacagtgcctggtatacactgagggcattgttagggatagctgttagtaacattcagtgatatcatggatactttcccatttgccaggctctatataaagaacgaagcatataaaagttagcaagaaattggccctgtcttcatggggcccacagctattccagtgctagtttggcaatggtaaagacccaactctttggatggttcttcaaaatacccccaaatactgaccttgtctccttaaggagtagttgtgaggtttaaataaggtaatccatgtaagagttcagaatggtgtcaggcatacaatacaggctcaataaaagttacctatcactactaaaattattttattattccttcccacaaaccagctccaaacttgtctgtgttcaagcccctaaataaactcatgcactcccacatctgggttcttcttgacactgcccatgaccatctggaatactttcccgtttccaccagtctcgtgtccgcatgacctgcaagaccaggttctgtcgtacctgtgcttgaaagcccctcacctactccacgccatgctcacccctccaccctaactaggttgaaactcccatggaggtcagtgtctcttctgccttgtgtttgtattttgctttctaagccacaagccctctgtatgagactcttcttatgcatcttctcagatcccctcagcctcatctgtcttgggccctttaccactgttccacctctattgtcaccagtgaccagctctgcactgctgtgaccagacagcagttctatggtaaccagcttcacccaacagccacccagtcaccaatgctggctcctagggccactttaccacacaatgcatgtgtgatcatggaattcaccagtcttactaaggcccccatcatccagaagcagcatcctgaaggaatggcagaatgagcaaaggcacctgccctgtaacaacacaccaaagggttaggacacaatcactggtgatgtggtatgtgcactgagcaatgaatgatgttggcattgtatatggtgctgtgtcccaaacagcagggatacacagtctgggaaccaaggagtggatgtaggacttgtctctctcatcatccttcccactcactcagaatttgtgcagtctatagcctggaccctgctggataagaggtctggttgtcagggaagaaactcttctgccagtgaggttccactgaacttaaagctgactaccacttagtcacttggcacacctcatgctaatggacaacacaggagttatcatactggtgggattaata

SEQ ID NO: 1884436 - DNA, 4001 bp, Homo sapiens
agggtaaaggatcacaatatatacaacttattttcatgcggttaaagaatatatagtttgagccgactgggcacggtggctcacacctgtaatccagcactttgggaggccgaagcaggcggatcacttaaggtcaggagttcgagaccagcctggccagcatggtgaaacaccgtctctactaaaaatacaaaaattagccgagcttagtggcttgcccctgtaatcctagcttctggggaggctgaggcataacaatcatttgaaccctggaggttgaggttgcagtgagctgagatcatgctactgtactccagcctgggcaacagaacaagacttcatctcaaaaaaaaaaaaagaatatatatcacacacatacaatacagagagagacagagaaagagaaaaagagatgacaaatcataaagcgaatggattaaatgttaaaaatagaggaatcagggcacactttgtactgttcttattcttgtaattttcagtgagtttgaaattctttctaaatttaaaaaattataagaggccttcaggccaaaactaaaacaaaccttttcctgctccaagataatcttctggccaacaggtgagaaaaacaacaaagcgctggcttgtgtcaaatcttgtgaggcaccagaatctttgtctgcactgtaacatccctgaaagtaaggcaaaaatggaagtgaactcgcacccccatttttggggagcacacacatagggatcacatgggagcacgctaagctcccatgtgctgccccttagaactcttgtgggcctctagaaaccaccccagaagccttaacatgcaaagcaccaccacagagcagcacaactgcctaagagtgtctggttgcttagcaacccagactcctacttgactagataaagcaaaagatttccctctgggtcacagtattgatgcactacactgagaatgcctctgttggtcaagttttaggtgagactctggccagagtcaagtctaggttctgaaccacagaaagcagcatccatggctctgagggcttgagccagacacaaagcctgggatctagaaattcagcctagaaaaattcaaagcaaacagaccttttatcaagtcacttcaactctctgagcctcagttccctcatgggtaaaaagagacagctagtatagatccatggttctcatatatagctgaattttaggactacctgatgagctggtagccaaccatattctgctaccaatgagatcagaatctgtggaggcaggacccaggcatcggttatagttgttttttttttaaagctcttcagatgtttcaaatgtgcaggcaggtttgcatgtgtccttccaatattcaggtgttgccaaggtgatagtataaagaggtggggcctttaagaagcaattaggccatgagggctcctccctcatgaatgagattaggtatccttataaaggggcttgacagagggggcttgtcccttcttgcccctatgttgtgttgggacacagcatttctccccaccagaggacacagccctccctcaccagacaatcaagcctgctggcaccttgatcttggagttcccagcctccagaactgcgagaaaataaatttatattctttataaattacctagatcatggtattctattatagcagcacaaatggagtagcacagcctattaagtctattatctttattggtactgttacctaaaagggtatcttgaatcctggtctcttcttccctccttttccaccaggtagagccctgtgaccccacacagctctgccctacccctagcactaaccctgacccaggttagctttgctgctctcggtcatatttgctgcttgtccatccccttctttcttgaggctcaggcctactttgtgcctctcaagaactgtgaagagcctgatattttataatacttacaaggtaacaagttagcctgccatattttcatgattacttatagaagatatgagactccagggtcagagacaagaggcagtttactacttacagtaattgcagcagccagtgtatcattattttttgcaccagttccctaggccccagtgtctacaaggcaacataaagaaggccagatggcacttgcacacacagtgggttgtattataagatagaaaccctgaacttaggaaacttaaatctttataagggtcaatagctatgactgctctttgctccagaaagaaatacaatctctattttccaggctgttcactacacaaacacccttgaaaagatagttcagagcaaagggaagttggtgcttgtctccagaatgtgcagaaatgggagagatctgtgaaggactgcctctcatcacaccctatgctggagcccctgacttgctcatcagcttgcccctgctagttcagagtgtcctacctctgaatcccaattctgcagctgggacctaacagctaactacctatgtccaagcacctgaattgctcataattccctagattacttctctccaaactttcttctcaggcaaatgggtgcccaagtctctgatccctggtgggaactctccaagctagaacagaacataagaatgtgtggagctagccagaggctgcagaacaatgagccagagaagacagtaggagcatcattcaggttaaatggagggttgcaagctaatcacacaatccaaatcactagttctcaaacttcagtgttttggtgttgaagttatttcacaacttcagagtgtagcagaatcacttggagagagtgctaaaacacagattgttgggccctaacccaaatgcctctgattaagcaggtctgagctggggccttgcaaatatgcacttctaataagttcccaggtagtgctgatgctgttctggtctaaactttgtccatccaaggtaactgggctgagaaataacagtcagattgagaccaatggaaggccaagtggaggaggtaacaggaaggtttagaagaacctgaagggatatgattcagctgtgcaacccagaggccagacacttcctataaagctccctcagccttgcctgtgggtcagggagagtgctattatagggtcatttagggcagtgggatgttgggcttccatcatgttgactactcgttatcccagatgctatgccccctgttaaacatggctccttccagtgtctgtggctggctctgctcttagggtctcatcctaccccacaggtagaccttgttggagtttctgttcctcccagcccgcctgctcccagtcaagctaacccagccatgttagttagcctgtttcccttccccacatttatagatcatacacacccgccaaattcattattctcccatctctgctctgtactcaagaggctgataccctcacagactacaatacctgggctaccttgtggcctgtttccagttccatctggctaaagggacacactggcaaagatcaaaggatgacagatgagtttcagctgttcactctcctccttcctcctcagagctgtatctctcgcaatatttgcatcccatactgtctcttctgctgagtggcccctgctccatggtaccagctttaaaactggaatatcatttctataaagccatttcctcctcttgtcccttcagtgctcggggtggtaatggcttcctgctgttatttcaggggcatcactacccatcacctgttcccctggtcctgcctacactgctgtaagcagttccttcagtgaagtctcctaaacctctgagcaagattctgtttctactgagaacccttgagggacatagtcgtctcgcctgatcacaccccaaggtgtaccatagctcctctctgctgggtggaggtacctgaagtgggcccttctcaggaattgaattgataaagagcttcctataacttcttgagaatccatcttgaactccaccccactccacagggctcccctagtgatacgaaga

SEQ ID NO: 1884437 - DNA, 4001 bp, Homo sapiens
gttgttgattacttttatgttaaatgtgaggcctggagcctccagcccagctggctagaacctgcacacacagtgcagtgggagttagcttccctgagttcccgggcagttgggtattttcatctccagttctcagatgctgaacttgagactcgctaaacaattccacatggaggagaggatggaaatcgttagtctagggcaaggggaggggggcgccattccttcaaaagaatgtccctatgggaggggaggaagcaggaggaatataagctagacaagccagggagtccagaggtcattcccgggcaccctcccctcccaagcctgctgggctttccagtctctaccccagtccctgacggaagacatttagcaaccacacaaaggagcttcctgtgagccagactaatgctttacctaaattaccttgtttattcctcacaatagcctcttctacagttgcagacactgagtctcagagaggttaggtaacttgcctaaagttacccagagctggtaagtggcagggctggaacctgaatcctgaccaagcttggccctcacccgatgctgattgcaggtctctctcccatctaggccaggagcctttagagaggggagggaatgggagggtgggaaatgggaggggcccgactcctctctatgggtcccaggggttgtggagttgaatccctgcagcccttttaagcccaacagtgaggaagacactggataccaaagggcccatggtgccatcccaaagactgataaggagtgtgagctggatgatcacagaaggactcctagttctgaaagctgggattctaatcaggagaggacaatgaatggagaggagagacgggagttctccctgcttccacacatatgagaccaggctcctagccttttctctgcacattcctaactggcagggtccacaggtgtcaacccaagtgcatccccaagaccacacaatggctctgagtgcagaaaggacctgcaagaccagtttgttttctgggcagcagatgattttgctggcctgaggcctggggcagtggtctccactcctacctcaccacctctctagtgtcttccttcttccccaagtagaccggcatgcatgcacacacaggcccaagcaactcctttttttttttttttttttaatgaataagaaaaagtaataaggaaagaagcagcaagcagactgggtgtgttaacaagtctgggccactgcaggaggtacattgcccaatttctgcaccccgaggccctccaaagtctaggagaagctcctgggaggtccagggcccaagaccaaagcctctatcaactctcccacctgtgaactgcccctctcccaaggtaggcattgtcggggtgtgtagactgggagccacccacacacctgactctcccctcctaggaaatgcgtccaccaggtcatttctcctgcaaaccctcattttaaagtgtcttggatgctttcctgccctttttttttttttttaacataaagaggggtgagagcccaagagctacagcagggggaatagactgaaactgctgcctactcacacgccagtttcccttcttagaactctaaccagaagccaatggtttcctcctaaaagaaaaactcaatctgttgactttctctctcctctcctgccagcttttctgcccgagccgggctctctcttctctgtgggttcgtctttcagccagtctttctctgcttcagattcttggtttcttgctcccggtagtccctgaacctctttcactctttaaaaaaaaatggggaggggcggtgaacaagcaaagaggaagccctcacccacccaccaaatctctttcttactagcaactaattccctctctctttccacacacacagtcatacacacacatacacatacacaggcacgtactccggcgacctccagatgttcccgacagtgcggccatctgcttagattgctggggcgcgcagggggagggggcagggatccgggatgcaggaagctgtgagcgaggccaactagagggggcgggagcagcgcacttttgagacgctccctagagtggaacccgggctcggctcaggctccgcgggcggggcgcgcgccgagagaggctggcactttggcgacactccctgagccgccccgcggccggcccgagccgccacccggcgcccggcaggggggagcctggctgcgggcggggaccggggggcgggccgcgccgcgcggagaaaagcgctggccggagggcccgcggccgggccgccggggtgagcgtgccgaggcggctgtggcgcaggcttccaggtgagtgcagttccccgggcggggcgagagtccgcgctgcggttgaagatcccaagtccccgatcctagcctcgcggccccttcggagggcgggctggggacgccgggcgcaggggcggggctgggtcccgccgaggcccctcaactttcgtcggacgcctagggctgggcgggagtggggaacgccgacccaggggagaggtcttgcgggagacaaaggctacgcccaggggccgtgtgggtctttgtgcggacacgtgcatctcacgtttgtgggtctttgtggatttgcggtcggggacgcgccgctgtcggtgcctttgtgtgtccgtggctttgcgcggctgctttgcgcccgtgtccacgtttgcgggcctgcgcttggctgtgggcgtcggtgggcgcatcgcgtgtctccgcgtacgtggtcggtgcctgccgacgtgtctgggctgggtgtccgcagagggtgtgcgcaccgagagcccaacgccgccccacccccccgctcccccgccgtcccctcgggcccacgacttggctccaaacttttctcccggttcctcgggcaacagccccagtcctccccaccgctacccggccgggggcgcagacagccctccccctccccctcctgaggtcccaggacagcaaggggctgcgacgggattggtggtcgggggatcggcagcgcctggggactggctgggcaggggctgggcggagcgtgcggactccccctcagaccccggctgggaggaagaggcgagcggtgggtcccaggctccggccctgggctggggagaggaagggacagggcggctggcgttgccctccccgcgcttcttggaaagagtgtgatccagagttgcgtctgtttggtagggagacaggctccgctttgagacccactctccgtttgcagcccgcccccggggtagggggccaaccctcggacccggtaggggagagggggactgccagtccagatctgggcatgcccgaggcgccggctcacaggacccggagctgggctgggggccgtgggagcctcacatacacaggtttcaactgggacggccactggcccctgtgcggcgctggcaagttgctcagcttcgcggagtcgcggtcactctggcacggacagggcgagaactccctcgcggctcggggcgtgcggtgggaataacccgcgcctctggagccgggcggagagcagcgccagcccacacttggcctggcgaggaggtgactcaagaccttcgattcttctttcatctttgtgcgccctgcccttcggataagtctagacttgcagtgcctggggctgaccggaggtgggggggggggggtgctcagagctgcaggagcctgctgggcttttgagcctaagtcgcaaagataaccgtaaacaccctcctccccactgctcactccagtctttaacctagaactttgtcggatgctgcagacatgatggaagggcacaggccgctaacctgggaaagaaacaactgtgggcattttcctttccctctccggcctcagtttcccttctggaaggggaggtattgatagcctcttctgttctggctgactgcttcagatcccagaacccagaaacactttgatgtttaacctacacctccattctga

SEQ ID NO: 1884438 - DNA, 4001 bp, Homo sapiens
ctggcaggaaacaattctgcaaaaataatcatactcagcctggcaattgtctgcccctaggtctgtcgctcagccgccgtccacactcgctgcaggggggggggcacagaatttaccgcggcaagaacatccctcccagccagcagattacaatgctgcaaactaaggatctcatctggactttgtttttcctgggaactgcaggtacattttttttttttttaattctcaatctggtttgctaattaccccttcctcctactcctaggaggaacgctattattttgggtggttttacgtggactgctaaggctggtcattttcgtttagctgtgaaaggagcgcgtcgcccttgctgcccagccgaaccccgctccctccagggctgcgctgcacggggctgcctccccgagccgccagcgcccggcgcccctccggcgcgtccgcccttcccactttgtgcgcccgcggcggtgggagcagagccggccggctcctggggactcagcggccgcgctggtgatgggcagcgctccttccccaaaggcgggcggcggggcgggggaggtcgcggctcgggtggtgccgccgcacgggctcggattccgagggggaagtggcttgtcagccccggctccgggaagagtgaacaataaggctagggcagccgccccagatcgttatattcctgggtctaataaagtcaggatcgctgctttgcttcccccgccccagaagaataacggtttgcaaaatggggcaaaatgggcagaatcgcacggccgttgttgttggtgtgaccgttgttgcaccccagtcgacatgacgttagtttttcatttgccaaattgctggttagttgcaaagcctaccctcggccgcgagcactgaaggatgggagggtcgagcgccgcgttttgacaggaggaagtgcggaggggcggagggcgaggagggcgtgattggggctgcctggtgtgtgcgcgcgcgtgtgcgcgcgtgtgtctttacacgcgccgcgtgcccagtgttgcacggggcgggagaagaatggcaggtagccgcccgaaacacctcgccctgtctcctttctttgggcgaggttcccgatcctggcaaagtgtgaacaatagggagctgggaggaagacagtagtgatgctgccgcgggtggcgggggttgcgccgccgcccagagaacctcggcagtgtgcagggaggtgcatttcattttggctatttccatcccggcctccctggaaaattcttctgtgcgtgcccaccctcccctccagctgtcatccccccacctccacccaaggatttgcgctttggctctgatggacgggagggaaggaagaaaagcaggggccgcagagagctgggtgggttgggcggacattctgggcggggggcgtgtgctgggaagcgatcgaggaaagccgggcggaggggctgtgtgtcgcggtcgcagctccaggtaccgttgtacctgccctggacggccgacccccggttggggagcgcacggggcgggccagggagcacccagtgcgccccctccgcgggcggcacaagagcagcgctcggccgccgcctccagccaactcgggtccctcccacggcgaccaatcagtgcgaagctggctgggcgggaagccgcgagaggcttttattgcggcgcgggtggcggccaggagctgccaggacagtctcccggtgcttcagcctaacggtctcgctcactcaccgccaagagaaaccccgccctgcggccggtcccccgcctgcccggcagtttccgaggaaataaaatggagactaggtggtcaccgggagtgctcctggtccggccgcccgtgctcgcccactctcgcctctttcacgccgacttggagcatcccaccgcccccgccagcgctcactctcgcgccgcggaatccgggcctgagcgcgtcgccggggagggcatcctggcaggcacacctacgcgcgtgcgctgaccggccgaccgcgggccgggggctctactgacggcggggcggggccgtggcagggcccggagaggaggggtggggaccaagcctagtccgcctggccctgggtctccgctgccacctgggcgggggccaccccggttatgcccctttccgcggtgcccgtgggtgccgcgacgcgacctgtccacatggggcgggggaaggggggtgtttttgagacatcctcgcccccgggtgggagcgtgacaatggagcccggatatttggtgggccttttgggggatcgcctggcggtcctttccatcatcgtgatgggtacagtcatcagtatttggatcccgtggaagttgcaggcccaggaattcccactgggatgttcctggatgcccaggcaggggaggcattctaaccagtgttccctggaatgaaagcgacctctttcctggcccggtaccttgaggatgggaagaaggcagaacgtgaaacacatacaaggttgcttaacaaaagaaagaagttgaatggttttccaaagagaaataatttcccattaaaatgtcttttgtaccatagtttttttttaaaaaaatcaaagaattcaagtcaaagggttagaatgaaaatgaaaacataacaacaagtatatatacatatgtatatatatctgaggttttttttttgttttttttttttttgttttttttttggactcaaatgtagcatgtccagggcagtggtaactgagtttgtgtgctcggctgggtgcatatgaaaatttacatataaggcaagctaaccttaatacgtcaagtgagtccgatgggctgcccctctcctctttctgtgtcctctgctctttagaaatacaatgaaaggttgtgcaattgcatagtaaatttgagtttattctagtataaattttggatgttttgaagaattgttcgcttgaacgatctggaatggttaagtcacatgtttacttgataattttgcagtcttctgccagttaaacttgcaagagtcaaggaatggataggactgggtttctaacaagataccatcggttaagaacaaagagctactttacaaaagctaacattgaaatcaagtagtatatataatatctctcactaagcaaattaaggtgcgcttccacaaagttgactgtgagcacagttatagtgagccatatatttttgttgattttcatttgaagactgagaatgtgtgtttttaaacagaatttcactgaatgtaataaaggctatataagaatgtggaaaacctttcacaactctaaccaaaccctagaaagattattttctttcaataaatactagcatatttagaaatattaataactgataatttgttttaaatccaacagagttattaaaaacagggaatataatccagacattgtagacgtgtgggctatgatttatgtaagtttttgagttactattccctctataaaggtcttaaagatctgctaacctagctaagcttccattagtctttaactgttttcttaagttaatgctttatgaacgccctctttctttccctaaattgttgaacctgataacttccttccagatacctttatctaggattttttttttaaaaatggaataccagaaaatagcaggacatattcttgtttagtaaaggagtttcctctaagtcttacaatgataattgattaaactaagaatatgttgatttaactggtgactggtttcttgagtttgatagttcaagaattaagatagtaattgcaaagaaaaaaaaatcccacatcaaaactgaaaaaaaaatgatgtgggtgtgctatttgtaagggatgtgggtgtttactgaaggcagcaataagaaggagaaattagtctgtagcacccccaaattccaagttttgaacagtgcttctgtttggaatccatttatcattaattgaattcctcagataggtaatatgtaatttaatggaagtaacctatat

SEQ ID NO: 1884439 - DNA, 4001 bp, Homo sapiens
cgctgaaggagcataacgaaaggagaaagtctggaagccattgtccaacccttggtttcctgaagtaaaaatgatttcaacactaacacgtgaaaatgcggaaatcctagctgcattttggagtgtcaccactcttgaaataaagcctcataggttcagaaaatgtgatcagagctgttaatattttgattctgggtgactaagaagtgacaggtgtgtagcctgagaaagccacccaagcccatttacaggcatgtggagacaagcaatgttgagtcagggtgcagggtacaccccagctctatcggcaggacaggtacctgagcaggggacttttaaaatcttctgttgagagctactaacccatcagaagaaaatcagtcaagaactaaatgacagtgaaacttgacacaaaaatttccatatcggatttttaaaaaaatgattgttgatctcaacaaacagcccactcctactttttgagaagcattaaccagcacaagtttgtacttagtaaactagatgtaagttgttttcaatacaattgacatatctggctggggggtggggtggagaaaggaaggggaagcacctggatgttgatacagtactaggcatagaaggaaccagagtgggagattaacacttgcatagaaagaagaaaacattaggagaagtggtggggagaaatggagtgaggaaaagagataaaagttgagaggtgtggtagtttctacactgcaagggttccaaggggtatcactgcaggctggccttcccatccttgatagagacacataaaaaccagctcaagcatgcagagaaaacaggtaacttcttcaatgagcagatttgtataattattacttaccgtttagtgtaaaaatattaaaatctcactgcaggtttctcagtacagaattaaaatacttacactagaattactcagggtgactgtttaaaacaatgtaaattgtgagctagttccatcacagacctactgaatcagatcttctggtgggagtaagataatgtgaatttttaatacgctccgcagtgattcacatacacagtaaactttgacaagactgtacagaatgggagtctctgagagcagggagtatgtcctatttgtctcagcactcatagaatctagcacggggattgggagagtgagagctcaataaaagtttattgaactaaactgaatacacctaatatacctaagagtctttaaagcaaaagtcactcaattccactaccctgtaatccattttttccatattctagtctatgtacacaggttttacactgttgtaattgcaaactcaccattttagattgtatttttcaatatattttctcttacaatttttaatggctgtaaaacattccacccaacatgaataagtatctctgttcatatagattttgagttttgaaaaggttttccttaggggaccttacatttgtgcagtgcttgtcagtttatgaaaccctttcacacaatcttcattgctttcacaacactctgtaagataagcattatcctcattttgcagctgggtatacagactcaaagattaattaacttgctcaagcttctacacctagtaagtggaatgtcagattaaaccaggatcttctcactatgcatttaatgccctttccaaggcaccaaataattggacccaacagtttcctgatgcaaaaacctgtaatttaaaatgtggcagatggaaattacatttaaagagaacattggtcagctatatcctaactatataggaatcagctcctgcctcttggggtatggcaaagaaaatgcatatattagttgacaacttctgtgtaagaacttactgttcttcagcaatgcctcataacgctgtctgtatacgatccaagcccatttctgcaatcctcacatgaagggagttgggactgtccctgaacactctgacactgtaattaaagttcttcggcaaccaccacaggctgtaaggcagataggaaggaggcagtggagacttgaaagctcttctaagattggtatcacaggaaacttgggtagcagctgagtgaacaggagagggaagcttttatgtaccaatagaaatgcccattataaggacacacgacctgatgaataacagaggggtgcagcacttcagggaaggacagacagtccacctgagcagttagaggttctatactggaaaacaggaggagttgtgtttctattttattccatttgcatgatacagagagacaggtttccttattctcaggtagaagtttctaacaaccagagctctctgaggagagaaaaacttcttggctgggtgtggtggctcaaacttgtaatcccagcactttgggaggctgagggaagcggactacttgagcccatgagtttaagaccagcctgggcaacaaagtgagaccctgtctctataaaaaattagctagatgtggtggcacatacctgtgatcccagctacatgggaggctgaggattgcttgggcccaggaggtcgaggctgcattgagccatgtacacatcactgcacttaagcctgagcgacaaagcaagaccgtttccaaaaaataaggctaggcacagtggctcatgcctgtaatccctgccctttcagaggccaaagtgggaggactgcttgagcccaggagttcaagaccagcctgggcaacatggcaaaaccctgtctctacaaaaaatacaaaaattagctgggtgtggtggcttgtgcctgtggtcccagctacgtgggaggctgaggcagaaggatcacttgagcctgggaggctgaggctgcagtgagctgtgatcacgtcactgcactctagcctgagtgagagagtaagaccctgtctctaaataaataaataaataaataaataaataaaagatctctattaagatagtgagttcctattcagtgaagctacaataggtaaattactaggaatcaggagaaatacagaggggagtagttcatatatcataaacgggaagaattatcttctttccaagatttttcaaaactaggttcctaggaaaatggcaaaccagcaattcttattgagctagtgtgtagagaaagttatgaatcaaagaatcacagttgtagatggctcaggttcggcaaaatacagttccagctgtgtacatgggcacctgttgcagaaaaaaaacctttgttacacaggctcaccatgtatctattttcagattattaccttgaaaaatcaaaggtctgtgacttcgaggaagatattaataattcctatcaaagtttctttcatgtatctttctatccacaattcaaagatgatcctaaaaggaaggtggcaaatgtgagtataaactgataacaaattgaggcacaatgagcttaagtacattgctgggtctaggatcctttaccccatttttagtgtttctctttactccaatgtatttgagatcaaacatcatcttccttcacattctcctgtcccttcaccctgggtagaacaaggtcaaggtgagtattttgcgacacattcagtaaactctggggcttaagatgcaagattctttggttattaggttttatgttttttggtttctctggaagctgagggcagtgaattttatttgcagtctttctctcagtattaggaactttcgattttttttttttttttttttgagacagagtctcgctcttttgcctaggctggagtgcagtggtgtgatctcggctgactgcaagttccgcctcccgggttcatgccattctcctgcctcagcctcctgagtaagctgggactacaggcgcctgccaccacacccggctaatttttttttttttttttttttttttttttttgtagagacagggtttcaccgtgttagccaggatggtctcaatctcctgaccttgtgatctgccggccttggcctcccaaaaggaactttgaatttttataacaaa

SEQ ID NO: 1884440 - DNA, 4001 bp, Homo sapiens
gtggggtggagttgatggtactggtataaggaggagagtggggcagttatgccgtaaggggaaatgtgaaaccttgtcttgatacacttctcaaccggaccctcaaatgcttatcagctattttctcacagtcttggaagaagcccgggggtgggggcgtattttattgacattttgatatatccatgaaagagttaggtggtttgctcaatgtgcgtagaattctctgtcctccaatttcatcaagtacatttctatccttaagaagtgcttgatagagaaacgagtatatacaacatatatctaagtacaaagtacaaagcatacatcataaaatgaacatttataaactgcccaacttaataacatttccaattctgttggctacctgtgaactcctccctaatcccgccccctgcctacctcccagaagtaactgctgtcctggattttgtgtttatcatttccttgctttttaggatagtttcatcacacatatgggaccctaaacaatagattgtttagtttggcttacttttttagatttataaaaatggtttccttcagtgtagagtagctgtgacttgctttttgcatttcacattgtatctctaagattcttccaaattgccgagtgtagctgtacttcattttcacagctgttgattaattcattcaataaacattgattgggtccctgtaatattctattaagtacatatatcacaatttctttatatagtctcctatcaatgaatgtttatgttgtttgtgtgtgtgtgtgtgtgtgtgtgtgtgtgtgtgtgtgtgtttgcctttgtcagtaatgctactgggaacatccttgtacatggctcctgaaacatatgtgtaagatttttctcaagagcactggttttccaattgggattcatggcctttagtgggtcataaaatcaatttgatagattcaatcagtgcttaaaaaaaagaaagacagaaacagagcagaaactgagttcctttcatgtataaaccgagttcctttctaagtatctccatgaaacttttgtttcagttacgtttgtgtatcctgggttatgatgtgaagggattttctttttttttttttaattttctttctttctttttttttttttttccgagacggagtcttgctgtgttgcccagaactggagtgcaatggcacgatcttggctcactgcaacctctgcctcccaggtgcaagcaattctcctgcctcagcctcccgagtagctgggattacaggtgcacaccaccacgcccggctaatgagattttcttactatagttcatagaaaagtttgaaagcacttgctctagggtggtgcttcttaaactatctatgtgagttttaaaattttttccaatctgtcacagactgatacttttgtaaaatacaacaaaaattaactacttggaaaatgaaattttaagaattcaaagacatacaaaatataaacctgaatttttaattattatattcaacagacataaattataatccaatgaatatagtgtggcagtttttcacaaaagacaaaatatggaagcaacccgagggtccattgatggatgaatggataaacaaaatgtggtagaaacatacaatagaatattactcaccctttgaaaggaagtaaattctgacacatgctacaacatggatgaaccttgaggacatgaggccaaatgaaatcaaccagtcacaaagggacaaagctacatgattccacttatatgagcacttagagtagtcaagatcatagagacagaaagtagaatggtggctgataggggctgggagaaggggaagttgttggtacatgtatcagtctgttctcacgctactaataaagacatacccgagactgcgtaatttataaaggaaagaagattaattgactcacagttgagcatggctggggaggcctcaggaaacttacaatcatggtggaaggagaagcaaacacatccttctttacacggaagcagcaaggagaagttctgagccaagcggtggtgggaggggaaagccctttataaaaccagcagatctcgtgagaactcactcactatcacgagcacagcatggaagtaactgcccccatgattcaattacctcccactgggtccctcccacaacatgtggggattatgagaactatagttcaagatgagatttgggtggggacacagccaaaccatatcagtatgtaatttcagtttgggaagataaagttctagagatgcatggtggcgatggttgcgtgacaatgtgaatgtacttaatgtcaccaaattgtatgcttaaaatggttaaaatggtcaattttatgttatggatatttcactatgatgttttaaatgtctaaacaaataaatatagtgtgtcagtatcaagttgctatgaacttttttacatgcttactctttctgtatttctatcagattcttcacatatcagcaccaggaccatactttgagtagcgttgcttcaggctgtacatctaagaacagatcaactggtgtataggctaggcacatgtttacctttacaagataatcccaaattgttttccaaagaggctctgcaattttatactcccaatagcaggtgtattaagaattttctttgctcctcatccttgccaatacttagaactgtcagaattcttaatgtttgccaatctggtgggtgtaaaatagtatctagttttggtcttatttgcatttccctgattattaataaacttgagcatctttttatatgtttattgactagttgtgttttttattttgtgaaatgcctgtttaaatcttttgctcatttttctactgggctgttggtattttattattgatttgtaagagtttgtttaatcaacaaatatttactgagcacctgctatgtgccaagcactcttgtgtattatgtatgcagtgagcaaaatacaccaaaattcctggtctcatttcaaagtttatagtctattggggacagcaggaggcaggcaatcaaatcatttagttaaataggtagtatgtatggcaatgataaatgttgaggttaaaaataaggcaggagctgggcatggtggctcatgcctgtgatcccaacactttgggaggctgaggagggcggatcacttgaggtcaagagttcaagaccacactgaccaatatggtgaaactccatctctactaaaaatacaagagttagccaggcatagtggcacatgcctgcagtcctagccactcgggaggctgaggcaggaggactgcttgaacccaggaaactgagattgcagtgagccgagactgtgccactgcactccagcctgggcaacagagcaagactctgtctaaaaaaaaaaaaaaaaaggcaggaaaggcaataggcagggagtggtgcagggagtggtggtgagctttgcaatttttgaacagtggtcaggaaaggttttttgaaaaatatgacatttgagcaaagatcctgaaagagatgaagacatgtgcagatagatggctataggaagggttgattatatatttatttgtcagttacatgcattacagataccttctcccactttgtggcttgccttctcactttcttgaagatgtattttgaaagaagttcttatttttaatatactgtatcagtcttttattttatggctagtacattttgtaccttgtatagaaaatctttacctgtccaacatcataaaggaattccatattttctctgaaagttttagagttttgacttgtacattttgcttttaatttatacagaatttacttttggagacggtatgatatagggatctatctttccccccatgtgaataacaaattgtgggtaccacttactagataatctattcttttcctgtggtctgtgatgccatctttgtcataaatcaggtttttatatatgtgcagatctgctttgggggattctgttcaattcc

SEQ ID NO: 1884441 - DNA, 4001 bp, Homo sapiens
gccacaatgtacaaaaaaattctgcagtttatttctggttgatacagttatatggctacccagttaactggttctacttattaaaaagttcagctttgcctcactgatttgatataatacttttatatgtgaaagtctgtgtttaggctttcagttatatcccacaggtttacttgtgtaccactaatatactgtattaatttagaggctttatactatgttttaacgtttggttattcaaacatttcttttattgctgtattccttggattacattattccttaattcccaaggattaacacaaatggaggtttttttccatgctctttccattgagaaatttgtgtcctcgctcagatttaggtatctcccatatttccaggtcctacttcaattcgtttttcaattgaagaaatatttactgagtaactgctattcccaggtaataggctagatgcaggatccagtaataagagagaccgtgtcccttaggagccccaatatttcttaatttgatgagataacactgtgaaacaaaaggtatttagtatgaatctttgatcttaagaggtttgagaatttgtgaatgtatctggaggaggttacactgacaaagttctgatttattcactcattatcagtcagtcagcagcctaaaggaacttacagaacattccccatgtttcttactttttaggtgtaccaacattccaagaaattctggctcatagattcctaaaaaaaataactgctactcagtgtaatggctgaaggtagtagtgtatgaaccatgtgatccgtagaaaatgatgcacaaagcacactaaaaagccagtcagtaccactatgtacctattgagcggccaacatccataacactgacaacaccaaatgctgacaaggatgtggagcagcagatttaacagccactttgcagtatagtttggcagtttcttgcaaaactagatatactccaaccataagaaccagcagttctgctccttggtatttacccaaaggagtggaaaacttatatccacacaaaaacgtgcacatggatgtttacaaagcagctttattcataattgccaaaacttggaagcaaccaagatgccttttattaggtaaatggagaaataaactgtatctgttacatccagacagtaaaatattattcagcactgaaaaaaaatgagctatcaagctatgaaaatacctggagaaactttaaatgcaaattactaagtcaaagagaccaatctgaaaaggctacatattgtatgatttaaactgtgtgacattctggaaaagacaaaactatggagaaagtaaaaagatcatggtttccaggggttaggggaaagggagggataactaggtggagcacatatttttagggcagtgaaactattctgtatgatactgtagtggtggatacatgtcagtatgtatttgtccaaatcctgtgggactgttacatgttatgagtgatatgctctgacactcctgggagactccttggttgcctaaggtgcctttcagccaggaggtacagttccccttgtctttgggacttttcttgtgctcataaagtcttttataaactttggtcactcaaaaggaaattttaaatgtgccaaattgaatggagctttagatctggccagtttaagaaaatttgcctaagctgtagacattcacttcctcttttcaaagagaaactgctttctccatgataaaatttcaaatgagagaaaaggttacaaactgtagtgaataagacaagcaagactttttaatctcagagaaaagtgaaaaaatcacaaatatacacaaataatggaataagagaataacaaactaaacgcctaccttaaagtagtgcttcaattccagtctcatcagttgttgaatcaggttccataaagtctgaatctcagtcaagccagggagattcaaccttgagagtagtctgaccaagggcttctgcagtcttcagcgaggtcagttggatgcaacggtccatgctggtgctggggctccagctgttggcaaaacagcaggagtcaatgaaggcctaatttgggtcccatctggttcaccaaaatgtcaccctgaaataatcaagaggcccagaatccaattttaaaagagtttgttcaagtgcaaaatttgagactggccacccagaaaaaacaagactccagagtagttgggtcattgctgagaagtggagaagctgaggcttcacttatataagtagaagcaaagaagtttacaagtattaccacatttttaatacaatgctgatttatgagttacagcagtttgattggttacagcttattctttttcaggaaagatatatttaaaattgcatccctatcaatttggtagtcatggggcctttcgccatctggtctgagctgggtacatgaaaaaggaaggatgttaatctataacaaagaattagtaactaagaggtaaggggcaccatttaatctttcacaacgttttacagggcaagaaaaataagaaagaaggttaatctgtaataggaagaaacaaaagttgtagtgacttgcccgtatgagctaggtcttacaatcaatcacattttattcaaggctcagagtaatttaaagtttcagcagctttcatttaaattattttcacattagccatttgagtcttcatttctgtatatcttctttctcatttggggagcagattattttctctttttttgttttcttggcaggagttccttatatattctgtccattaatcacttggcggttttagatgttgcaaatatttcattcataatctgtcatttgtctgttaactttgcctatatcttcctttattaaatagaaattcttaattttaacatatataaattcatcagtttttccttttatcgttggcaatttggagcttttgttaaagaaatccttccccactgataaagtcacaaagttgggtgtttaattcatatattgtattgtttctttatcactaccataagtacgtaagattacaaatttaagattacaatcctaaatcttaaatttgcaatcctaggttggtagtttttgaagctactaagattcaataattactttcaagaattgaggtgaaatttatgtcataaaattaagcattttaaaaggtacatttcagtggcatttagtacattcatagtattttacaactgccacctctgttaagttccaaacatttttaccaccccagaagaaaaccctgtgcccatttagtagttacatcccattttcccctctacacaaaccatgactctcatccatctgtctctatggatttacctattctgtatgtttcatataaatgtaatcatacatagccttttaagtctgtcttctttcacttagcatgttttcattgttcatctatgttttaacatacataagtacatgctaaaacatttaattttaatatataggtatatacattccttatggctgaatgatattccattctatgtatatatcatattttgtttattcatttttccattgatggatatttaggtggttttaccttttggctgttgtgaatggtgctattttgaacagttgtgtgcaagtgtttgtttatgtacctcattttaattctttttggtatgtacctaggaatggaattactgtgccatttagtaactcaattttaactttttaaggaaccaccaaacttttttccctagtaaccgcaaccccttattgtacatttctagtttcgttccatagttatcaaagaagataccttgtgtgattttagttttttaagatttattgagactgttttatggcctattatatggtctactctggagaatggtccctgtgcacttgaaaaaaacgtatattctgctgctgttgggtggagtctaccatttttaatttgccttttttttggctcagcatttgcttgattgctataaacctttaactctcttcga

SEQ ID NO: 1884442 - DNA, 4001 bp, Homo sapiens
taaaatcactggtttcaggatgatttcctgtaggagtcctggtaggagggagctggctgggatagtcattgtcatgcatgccaatgcaggagaggacagagcataattgcttcaatctgtgtctcttttgcctactgaattcctactctccgtagactgattatagtggagaaacagtcaagagcctaaggaattctaaaataatagaagccggtgggaactggaatagtcatagaaaaacatttgtggcagaggtagatgacctgagaaggctagtaaaaagagtgagagaagggcttttaccaatatctctgcttgattctgtatatctgtacgcagtcactctccaaagcctaggaccccagcaggcagtgcagccaccagcttggagtctttgtccttgggaggagggaaggaaggcagaaggagtgacaatgctgtcactctccagcacccacaacttttgacttcctgggtgggtgttaataacaccccagcctttccagggcagctctaatttcaaatgatctgtcccaacgtcttggaagaatggtagccataagaaaagaaccgaggagccataaccaatgccattgctccagtgctgtctctttgctagctgcactgtgggtccttgattgagtcacttctcctctctaaccctgtttcctagtctgtagaaagaaagactaatactgaccttatgtaagcgtgacatgcactgctggctttcctttttccctccttccatagtaacagaaatgcagccaggcacagggctgaccagctgggccacctttccccatcttctgtgaagaagatgagactaagttctctccagaagaatatgatggaaatggtgccttccttttccagcctggcctcttaataccagaccaagagatatcataagctttcctttttccactggctatgacccaggtgaggcacctacacaaaattggacaaagaaagaagatggtgaagactctgttccctgaataattgaagggaagagagctgcttgctaagctagtttatgaaataaataattttgcttgagcaattgcatatttcaagtccctaaagttcaatcttatcctaattgggtatatctcacagaactgttggaagccaaggagaaaaaaggaggaggcaacctcttacaaactgtaaagtattttacaaatatattatagctgctatataattgaatgaaccactaatggaagcaacaattgtgaaaaactaaaattaccccactgtctggctgaattatccagcctaatcttactactctgagcaaattaggcaaggatggtaggcacattagacacattaggtgtttgatatcaagcctctgttcctattaaaacccctcctttctggggagtctcacaaggtaaggaccatggagcctaaggggccacatcccccgcccctgccttggcatgcaaccagcctaatatgaggctagcaggagttcatgtccattacgctgcagagtggcagaggcaacctggaccatgcctggggcttcccctgtgctccagaacaggaaccttgactgatgccccaggcagttgtcagctctccacatctaagcttactcacagacacaacctaagcaattaaacaatatctgtcttgaaaatctcccaattcccttcattacagcctttcacgaatcctctcaacatccctcagaaagtggaaagcaggtgtagctttcctaacttgacagcaagcagatgtttgggaaaagaattaggcagctcatgagggcacacaggaacagagctgagccgagcgtggtacagctgccctgggcacctgcatctgaccaaggctgctaagcccaatctctacctaaaaatagtgtcttccctgcctgccaggaggccaaaaatactaggcattacactgctggagataacagaatcattcctttacctttcctaggaattatctttcttaagatgcaaaaagctttggagaaggggtctcacacaacccttaggtaagaatgaggggttgaatgagacccttcattcttacctaagttaatgagtcacaatggaggcgtggagcccctgggaggaggggcacgcaaaacacccatttataaatgacagagctgggataagaacccatttctctcccacagtaaagcctagacatgccctttccatgttaccacacttggtccctagagctgaagaggacacaagtcaagagcattaattgggtcctctttctgaaactccctccatttattgcagtggaacctcctgaggaacagatttgtgcttgaggtgcttttctgttaagtcaacttttgctgtctcctcatcaggatgttctgtcactgagcagtgcaaattatgaaatcttccttaacagctccggcaacatgaggcagctgagggaccaaaggaggctggacccctggatgcagtaaaacagaagcacgttctcatctgagcgttctgctattgctatgctctccaaaaagaggtatacacaactttatctttgatttatgctccggccaccaactcacatgcttagacaaaacaagacacagtctccgagcgctttagaccagttttgaaaacagaaatcttttccttttccctcaacttcctatttgacacacttatgtcagcttctgatctttctttaaattctctccactgccgagggccttgattctcttaaagatcagtctctcctcccagcttacgaagacttgatctttctttgagataagtgtcatttacttctttagaggggaaaggaagatctaaaaacttgtttctaacttataccttccctttgttctatgtcaagactgaaatatctttaccaaaagaccacactaattacacaggctgctgcttgcactgtaggcagatgtcttgaaggagtttttctgcagaggtagaacttgaaatgagctcttgaaacgagcaggcagacctggatctggagctgagcttggctactcactagctgtgacaatatgggttagtaacttagtgactcagtttcctgctctgaaaaatggagataaagacccctttctcacaggcttcttgtaataattaaagtatatcatacatgttaaatacctggagctccataactagtttccctcattttccaacatcctgtagataaagaatttggggttgggtgtggtggctcacacctgtaatcccaacactttgggaggctgaggcagatggatcacctgaggtccagggttcaagaccagcctggctaacatggtgaaaccctgtctctactaaaaatacaaaaattagccaggcgtagttgcgtgcacctgtaatcccagctagtcgggaggctgaagcaggagaatcacttgaacttaggaggcagaagttgtagtgagctgagatggcaccagtgcactccagcctgagtgacagagcaagactctgtttaaaaaaaaaaaaaaaaaaaaaaaaagactttggagggtgaggtagcattgagacaacactgtggtttagctgcttgagatatggtccaggaccgcttccattgtcaaatataaagaagcattacagaagagattgcacactccctgtcagctcttggctctcacacagtgagatgctgtagtcttagtgggatctcatcaaataaaacaacaacacagtgacagcctagtttaactgatactctaacaagttactcccacagttattctaaaatcttaaactataaaatgtcaagctggagaagaaaatagaatgtaactatttacttgttcttttttgaattttttttttaaaaacttctgaataactacatttaaactctcttaaatcaaagcacacttgaatttttatttgggttcttaaagataaactatgtgtttccaaacagtccaacatttggcacgttaagtcacttaattttgtttgactaaggaaggtatccatattaacagatgggatgaggtataa

SEQ ID NO: 1884443 - DNA, 4001 bp, Homo sapiens
tacggccccggccccggcctccccctccgcaccccgcgcgagtggtgcgtgccccccagtgcagacgcggaactggcgcccgctcggagcggcgccgcgctggggagcgactgacgccccgctgccgggggacgtcgggctgggcctggccagtcccccagagcttgggaggtaggagagtctgggccggtggggtcctgggcgagcgtctggggactccgagcgggagacgggctctgagaggacaccgtggctcttggaggaaggggtctctcaggaggccctgggggagtgtgaaggggcgtggggacgggggtctgccgaggaggggcggggacggggatgggggcgccccgggcagaggagggggctcaggctactgggcttggttcctgccgagcgggcggctcgggttcaggttcggggcgggggcgggggcgggggagaactgtccagcaggtgagggggcgggcagagctggccagccctggggccgaacccgcacagcgcttggcgggtgtgcttgtgcgtgtgcgtgcttgcgccttatttttggctagaatttggagaaacacgtttggttctcaagaaattttttttttaacttgatatttcaaaattgacttgctggagagagaacaccatttcatctttctgcaatcgctctcctccccatcctcgtgtatctaccttcttccacctttccctgccctcccctctaccccaaccctgccagctgccagcctccttgctccagttctcccatacgctggaccagtctgtgctgatgagcttgcaaggtcactgcctggggaggtagaggaggggaggagagcctcctgttgtgttcacgtcagcagagatgtcatatcgctctctggttcctgtggttttactgtgagatcctgtccaaaatgagggacgaatccaaagggttggttagcatggctatttctgctgaaaaggcatagataacttaaaagtttgtgaatcctaaatctacctctgggtggagctgatggtgatgtcggacttcagcagatagatatgcattttgagctggatgcttttggaatacaggaagataggaaccagaggctctacgttagtaaacatggttgaggcaagaggcagagtcggagcctcgttggttgtgaagacaagagtgtgagttgtgggtgatgttagaggatttagtctttagaggagttaaaggtgttagtctttttggggaggggagagaggagagaatgagaaggaaaatcttagttatctttgcaatctgaataactgaaggcagtggctgctgatcagatgtgaactctggctaaaaatttatcctaccacccgtagctagaataataacaagatctcagggtccttgtggctctggaaggaaatgattgtgagtgacttgagtttcgtcagatagttgtcagtggagagggactgagatcccaccaaggctagagaggcctgatgcgtactcagtaggaggtgcttcaggcctgatctttgagattttggttggagagggctccgggttttcaatgtaaacatagattgcaaggtgtagtctagagctctggttctataaattctgttttactttaagatactttggctctcactctagtcatttctacataattcttttttttttttcgaatcccatgacaggttaactacataattctttattaaaacaaattatgctttttactcatatcccatttcatttctctatttctctcccccttggattctgctcaggaggagctgagtgcggctctgttatagtgccccacctcctgcagtttgctcatgactctattgcagttgggagaaccaagggactatttgggttcgttaagcagtggtgatacctagaaatgaatatatggcgtgctcagaaacctggtggtgttctagagatatcactatcaaaagccagaattaggacgaagtacaaactacagacagatgagggagaagacaacctaattcttagcaggtactgtcagtgggagaagtgtctctaggttcgaggagagtgaattgttatgggccttggctgactctggagtagcagctgctagcactgtgcggtcaccaagcaggggaggggctgtggctctgctataaatagtgctgggagccagagtcgctatagagataaaactgaatcctattacctgcaggtcctctactgggagcaagggaaaggagaaagcagtattttgaggatttgagaggtattgcaaataggtcttgtttattgttaggtaggggagaaaaaacttctactcattacctaaaccaaatagggccttaagcatccagggagtgtgtatgtctgtatatatgggagtgcccgcagcagcaggtgagggagtagagggtgtgtgtgtgtatacgataatgggtttctctccgtgtgcattgaacaaggtcttaggccgcatgtagagcacagaggtagaatcctggaacactagaaatatgagaaaagaacttctactcatagaagaagtagccctaccagaaatagctgtgcagcggggtgaaacgttttatttagagaagtgtatagacacttaacacgaaataaattataattaagaccatgaaagcttttcctaattttaggacatagtttagaaatttctctgagcacgtctccctgtccttgcagaaatcctggtatttctgcctctaattcatagcctctgtaatgtatagtaggacaaggactcatctgtgggtattgtattactgattctgagcctgagatcaaaatagaggagagattatgattcagcaccaagggcagagctagtagcagtggcctctgggctcctttcttgcctgaaggagggagaaaagtggtgcagattaggcaattggggcatggacattttcatttgagatcacatgaggtagaatagccagctgttattgtctgagcatggttaactagacagtctatgtggtagttttacatcaagctgaatgtagattgttgaaacagaataattaagtttccatctagacctagaagtgcaggttagtgctagctagttgaggagtctggtttgatcctgatccaccctggagggatcctgagagtgacttcaatttttgttacaatgactgagtccagattagatggcctaggtctgtttttcagaaacagagccccaggcgttaagctggaaattaagtcattggtagggataggtaggtgaaccattatttatctacatttttttttttttcttgagacggagtctcactctgtcacccaggctcgagtgcagtggtgcgatctcagctcaccacagcctccacctcctgggttcaagcgattctcatgcctcagactcccgagtagctgggattacagatgtgtgccaccacacccggctaatttttttgtatttttagtagagatggggttttgccatgttggccagctggtctcaaactcctgacctcaggtgatccgcctcggcctcccagagttctgggattacaggcgtgagccaccatgcctggcctatctattttttaacattcgattctgtgagctcatgagcctagacacgaggctaggcaagcgtcaagttctcctatcattagtatgaaagtggaagaccttctgacctctgcctctggccgggaagaagttgagagggatgagtcccttaggcacagcagtggatcttatcagtactttttttcctattagacttcgattttcagaattcctcctgggaatgctgactccttgcttggtgccctgatgcttctctgagataaactgatgaattggaaccatggtgcaaaagaagaagttctgtcctcggttacttgactatctagtgatcgtaggggccaggtaaccaagaagagattgacttttgtcttaatatctgggatagccataaaatctgcagttgttcccttctccgatttccatgttgctttgcatagctcat

SEQ ID NO: 1884444 - DNA, 4001 bp, Homo sapiens
gcgcgagtggtgcgtgccccccagtgcagacgcggaactggcgcccgctcggagcggcgccgcgctggggagcgactgacgccccgctgccgggggacgtcgggctgggcctggccagtcccccagagcttgggaggtaggagagtctgggccggtggggtcctgggcgagcgtctggggactccgagcgggagacgggctctgagaggacaccgtggctcttggaggaaggggtctctcaggaggccctgggggagtgtgaaggggcgtggggacgggggtctgccgaggaggggcggggacggggatgggggcgccccgggcagaggagggggctcaggctactgggcttggttcctgccgagcgggcggctcgggttcaggttcggggcgggggcgggggcgggggagaactgtccagcaggtgagggggcgggcagagctggccagccctggggccgaacccgcacagcgcttggcgggtgtgcttgtgcgtgtgcgtgcttgcgccttatttttggctagaatttggagaaacacgtttggttctcaagaaattttttttttaacttgatatttcaaaattgacttgctggagagagaacaccatttcatctttctgcaatcgctctcctccccatcctcgtgtatctaccttcttccacctttccctgccctcccctctaccccaaccctgccagctgccagcctccttgctccagttctcccatacgctggaccagtctgtgctgatgagcttgcaaggtcactgcctggggaggtagaggaggggaggagagcctcctgttgtgttcacgtcagcagagatgtcatatcgctctctggttcctgtggttttactgtgagatcctgtccaaaatgagggacgaatccaaagggttggttagcatggctatttctgctgaaaaggcatagataacttaaaagtttgtgaatcctaaatctacctctgggtggagctgatggtgatgtcggacttcagcagatagatatgcattttgagctggatgcttttggaatacaggaagataggaaccagaggctctacgttagtaaacatggttgaggcaagaggcagagtcggagcctcgttggttgtgaagacaagagtgtgagttgtgggtgatgttagaggatttagtctttagaggagttaaaggtgttagtctttttggggaggggagagaggagagaatgagaaggaaaatcttagttatctttgcaatctgaataactgaaggcagtggctgctgatcagatgtgaactctggctaaaaatttatcctaccacccgtagctagaataataacaagatctcagggtccttgtggctctggaaggaaatgattgtgagtgacttgagtttcgtcagatagttgtcagtggagagggactgagatcccaccaaggctagagaggcctgatgcgtactcagtaggaggtgcttcaggcctgatctttgagattttggttggagagggctccgggttttcaatgtaaacatagattgcaaggtgtagtctagagctctggttctataaattctgttttactttaagatactttggctctcactctagtcatttctacataattcttttttttttttcgaatcccatgacaggttaactacataattctttattaaaacaaattatgctttttactcatatcccatttcatttctctatttctctcccccttggattctgctcaggaggagctgagtgcggctctgttatagtgccccacctcctgcagtttgctcatgactctattgcagttgggagaaccaagggactatttgggttcgttaagcagtggtgatacctagaaatgaatatatggcgtgctcagaaacctggtggtgttctagagatatcactatcaaaagccagaattaggacgaagtacaaactacagacagatgagggagaagacaacctaattcttagcaggtactgtcagtgggagaagtgtctctaggttcgaggagagtgaattgttatgggccttggctgactctggagtagcagctgctagcactgtgcggtcaccaagcaggggaggggctgtggctctgctataaatagtgctgggagccagagtcgctatagagataaaactgaatcctattacctgcaggtcctctactgggagcaagggaaaggagaaagcagtattttgaggatttgagaggtattgcaaataggtcttgtttattgttaggtaggggagaaaaaacttctactcattacctaaaccaaatagggccttaagcatccagggagtgtgtatgtctgtatatatgggagtgcccgcagcagcaggtgagggagtagagggtgtgtgtgtgtatacgataatgggtttctctccgtgtgcattgaacaaggtcttaggccgcatgtagagcacagaggtagaatcctggaacactagaaatatgagaaaagaacttctactcatagaagaagtagccctaccagaaatagctgtgcagcggggtgaaacgttttatttagagaagtgtatagacacttaacacgaaataaattataattaagaccatgaaagcttttcctaattttaggacatagtttagaaatttctctgagcacgtctccctgtccttgcagaaatcctggtatttctgcctctaattcatagcctctgtaatgtatagtaggacaaggactcatctgtgggtattgtattactgattctgagcctgagatcaaaatagaggagagattatgattcagcaccaagggcagagctagtagcagtggcctctgggctcctttcttgcctgaaggagggagaaaagtggtgcagattaggcaattggggcatggacattttcatttgagatcacatgaggtagaatagccagctgttattgtctgagcatggttaactagacagtctatgtggtagttttacatcaagctgaatgtagattgttgaaacagaataattaagtttccatctagacctagaagtgcaggttagtgctagctagttgaggagtctggtttgatcctgatccaccctggagggatcctgagagtgacttcaatttttgttacaatgactgagtccagattagatggcctaggtctgtttttcagaaacagagccccaggcgttaagctggaaattaagtcattggtagggataggtaggtgaaccattatttatctacatttttttttttttcttgagacggagtctcactctgtcacccaggctcgagtgcagtggtgcgatctcagctcaccacagcctccacctcctgggttcaagcgattctcatgcctcagactcccgagtagctgggattacagatgtgtgccaccacacccggctaatttttttgtatttttagtagagatggggttttgccatgttggccagctggtctcaaactcctgacctcaggtgatccgcctcggcctcccagagttctgggattacaggcgtgagccaccatgcctggcctatctattttttaacattcgattctgtgagctcatgagcctagacacgaggctaggcaagcgtcaagttctcctatcattagtatgaaagtggaagaccttctgacctctgcctctggccgggaagaagttgagagggatgagtcccttaggcacagcagtggatcttatcagtactttttttcctattagacttcgattttcagaattcctcctgggaatgctgactccttgcttggtgccctgatgcttctctgagataaactgatgaattggaaccatggtgcaaaagaagaagttctgtcctcggttacttgactatctagtgatcgtaggggccaggtaaccaagaagagattgacttttgtcttaatatctgggatagccataaaatctgcagttgttcccttctccgatttccatgttgctttgcatagctcatcttctcctgttattttaccctgatgggagcatcga

SEQ ID NO: 1884445 - DNA, 4001 bp, Homo sapiens
tttaaaatgcatattagggcaataaaagttacaaaaaggcatacagtcaagaaaccagtttaattttgattagctataaattttcctaatttatttgagcatggaaactcatgtattctctgtaaattaccttatacatcacccactttggaaaatattgccatacttttttctcttgagtcaataattataagtctctttgacttgccattgtctacttttttatctgaatatgacttgcttaattactccaccttctaaagcctatcttaatggaaatggtgccacccttttttgaccagaaagctcctattgatagatgagtaaagttgtaactaaacaataatcttatctccttacactcctccccttccttatcatcttccctccatcccctgtcttggaccttactaattttgactggatcttgaagttatagccaagacatggtctgcaccagaaggtctcccagaaacacattacccttcaggttgaatgagaatcttatctcctatggtactatggtacatagttctgaatggtatgtggcttttaattcagctcttgaacacgtcagtatctgctacaaagaaatgtgtagaataaggagcatggaatcacaaaatttgtagaattcctggaggcagtgaatccaacataaattttacactctcaaatacattaactactctggcagatcaaacccctttatttcttgaaaaggtatttacaaattaaaattaaaggtcttcacattggcctttgatactgttagcaatatgtaccctatcaactgttgcggctttacttagatttgtaattctttcttttccaactcaagtcttttcattctttttctacacatgcagcatgaatattagaatgaacatagattctagggacaggcagaataccattaagcaaaaaagcaaacactaccaagttaatttgctatcttgtgcctcattttccccatctgtagcctaaacaaaaattaactttcacaattgttattgttgtgaaatcacctggcacctaattagtgtttagtccatgttagcattcttttcagtgtcaaaacttttattcatgcccttcttgctatctgaaccataatttgctaagactctttctgaaagtttaaggttgttatgagcttgtttatgaagcttacctttaaagccaaacaaagtgaagcaatagaaaggatgtagtatttgcaatcagacaaacctaggcctgaactcttgccatctccatttcttgactatgtaactgtaagtaagttatttagcctcccaaaagttcagttttcttatctctaaagtcaggagtacaacatccacctcatgaggttacatcaggcattaagtagaatagcaaaaaagaaatgtctagtattgtgctactgttaatctctatcatttcgtgcagtgttcaaccatagcattatttcttgacaaatgtagtgactgagtaagaaaatgtttcttccagttaatgctagagattaaactgaaggaaatctaccacagtgtcctagaagttgatgagatttaccagaattgattttagctcttccatgtaggtttggggagtgctgcagtcaggagggacagaagaatgtgaaaatagatgaatattccaggcttccagggttcatgcaacccaatcatcaaactcatattcccagagcaaggctacttatccctgttgcgcttggcagaggaacaaagaattcatgagctatctttgccacagaattagacactgaagcctggaattaaatcaaagatggtcttttgcccttccccttggtagtgaagccatgtacttgtgtaatgtcttgtttcttcgaaatttcagaatgcatttctgagagtagggacatgggaagaaccttttcactcaatggatgagttactgcaactgatgcttcagtttttctacttgctgctaaagcttcactttttcaatccatccagcaagtatcattctagattgaccttcttcagtttcctttatcatggcattccagaactgacttacatcacaccaatactgattggcctagattccaaaaccatatataatgaccctgatatttttattagcatattttccaatttccagacttcttagtcaacactcagaacaactgtaaattgctcttctaataagtttctgttctaaaaataataaaagagcttactgatgctgtgaacaactgcttcaagtaaaaacaacataggcacaattcctgtatagtctattttttttttttttttttgagatgaagcgttgctgtgtcacctaagctggaatacagtggcgcgatatcagctcactgcaacctccacctcccgagttcaagcgattcttctgcctcagcttcctgagtagctggggttacaggcacgtgccaccatgccaggctaatttttgtatttttagtagagacatggtttcgtcatattggtcaggctggtcttgaactcctgaccttgtgacccgcctgccttggcctcccaaagtgctgggattacagacgtgagccgctgcgcctggcctaatacattattttctaataccttactttttaaaatagctttattgagatacagttaacatatcttacaattcatctgtttaaaatgtacaattagttttagtatatttgtagagttgtgcagccaccaccattttagagtccattttagatttttatcacctcaaaaagaaaccctctacccattagcacacactctgtcatccccctcccaactagacaaccactaacctactttaattctctatggctttgcatattctgaatatttcatataaatggaaacacacaatttgtgatcttttagaactggcttctttcactaagcaaaatgtttatccgtgttttatcatgtatccatactacattcttttgtggtgtcaaataatatcctattgtatagatataccacactttactttttcattcatcagttcatgtacatttgtttccattttttgaaataatgaataacgtgtacaagttgttgagtgcatatatgtttaatatttggaggaaatgccaaacaatttctgaattggcttttgcaagccaatgcctcattcgaagtagaaaagaaagttaattttgtaagcttaataaattatggtttttattattattagaaaaagatgaaccagagggattgacaacaggttacagaaacagtgagaagcccagtgttaaaatttatttttttaacctctagtcatgtgttcttccacctataactttctgaaagaagcacattgcaatgtatgatgatgttgcttaggtcttttcaccttattttgttccaagcctcatttaaactgcgtaaaaggacccagtatgatacacaaagcaatttgtaagagagaggacagaataagaaagttccaggttatgcaataataaactaaaatgatatttctccactttctaaagaaaaaaccctctcagatatagtgaataaagccaaattagtaagtctttgtgatgaattgaaatgcttaactgtggtgagtcttatataattttgagattttgagagagagcaagaatactcaaggtgaagtgaaattattatcaggctttagtgtatatgaatacaacctggacttacttgttagaattggatattcctggaacttgtgacatgcatcccgcagagattctgacccagtatgtgtggggtggggccaagcaagttgcactttaaacaagtacatggggattgtttaaatcagatgttctatagatagtattttttggtaatactggtaggatagactgagctttgaaattaaacaggtgaaatttaaatccttgcttacccattggcttggtaacacctgccagtttcatagaatagatgcacaaattttcaatttcattaatagtcacttcacagagcttccgtgaaggtgcaatgaaaaaacccatcacatat

SEQ ID NO: 1884446 - DNA, 4001 bp, Homo sapiens
aggagatcgagacaatcctggccaacatggtgaaaccccgcctctactaaaaatatgaaaattagctgggcatggtggtgcgtgcctgtaatcccagctactcgggaggctgaggcaggagaatcgcttgaacccaggaatcggaggttgcagtgagccgggatcgtgccactgcactccagtctggcaacagaaagagactcccctaaaaaataaagaaagagagaaagagagaaagagggaaggaagggagggagggaggaaggaaggaaaaaagaaagaaagaaaaagaaaaagaaggaaaattactggccagattgtgggcaatgatgaattcaccaaaattatttttttttcttctaaaatctcagaggcttccttccccacatgatttttttatgagaaaaagatatagttaatttgttcctctcattgataatcattgtgtacctaaattgtgaagtccaatctttatcttagttttttcatcccgtttctaaacctccgtactattttttgactacttaggtttcccaagaaggaagaatataaaaagtatacccttctccctctatcaaatggtggctaggaaacaccatgtctttttcagagacaatggaacattgttctaggtagaacaattattaaatgtgcattaaatggcaaggttatacaagaagatttcatcataaactcagtaaaaatcttttgtttttctgcttgcaattatcaacatttcttaatccccaatgtagatgtttaataaaatctctggctccaatttggcaaacacagaaagacccctactgtgcgggcagtacaggatctgcaacataaatctccaaatgggtccttgagtcaagccacagatgacaggatggccccagagctgtctgctgaccagccatgtgctgaacataaaatgtaaataactgtctccatgatgaccacagagttctcctttgtcgtccaaatgtactgcagcccacttagcaatacagtcatccagttcttcatgaatataatataaaaattttgttattaaaactttccaaaacaatgattgttagttgaccactacgaaaacagttgagaattgcttcagccacttggaaagtaaaaaaaaaaaaaaaaaaaaaaaaatcaagaatgccaagtaactcacgctgtcagcgatgtggtgggacgcacaaagagtttataaaatcagcctgccagcatttgcccctcacccacatataagatacatgagggaaggttagggaaattgttccagaggcttcaaagttaatctgtacttttggcatttacccaaatagtagctgggggaaattggccctaaccaactgacagaaattaccctatgtggtctgggtaattactgatcatgttctctgatgtacctgtggttattgcctactgggagaatcaaatgggtagtgattgctttcctcaaggaaaaagtttaaggaaaaaaaaaaggagcttgcagtgtcatgaagaaaaaagtgcaaggtagaatcactcctaaaaatgtaaaggaaatgtacaggtattagacttgataagataacgggtccatctggaaatctgtgaggagaaaacaaaaatttggactttcaactacagacacatggaggtgagaagagatatgaggaaagcatgtggaaatgatatcctttatcgagtttttctttcattccattattgcctgaggtcccaaaagtaggaaagaaattcaagaatgccaataacttgcactcacctcttagggaggggctagatcccatatacaaaactgctattgagaggtgacagcctgctagcagccctggcagccctcgctcgctctgggcacctcctcagccttggcgccaactctggccgcccttaaggagcccttcagcccggccctgcactgtgtgagcccctttctgggctggccgaggccggagccggctccctcagttgcggggaggtgtggagggagaggcacgggcgggaaccgaggctgcgcgcggcgcttccgggccagcgcgagttccgggtgggcgtgggctccgcggcccagcactcagagcagccggcggagccgcccgcccggggcagtgaagtaaggcttagcacccgggccggcagctgcggagggtgcgccgggtcccccagcagtgccggcaggcgctcaaattctcacctggcctcagatgcctccccgcggggcagggctcgggacccgcagcccgccatgcctgagcctcccccacgccgtgggctcctgcaccaaccaagcctcccggacaagcgtcgccccctgctccacggcacccagtcccatcgaccacccaagggctgaggagtgccagcgcacctcacgggactgacccacagctccaccagctccccggtgcgggatccactgggtgaagccagctgggctcctgagtctagtggggacttggagaacctttatgtctagctaaggggttgtgaatgcaccaatcagcgctctgtgtctagctcaaggtttgtaaatgcaccaatcagcaccctgtgtctagctcagggtttgtgaatgcaccaatcagtactctgtgtctagctaatctagtggggacctggagaacttttgtgtctagctcagggatcgtaaacacaccaatcagcaccctgtcaaaacggaccaatcagctctctgtaaaattaaccaatcagcaggttgtgggtgaggccagataagggaataaaagcagaatgccgaagctggaagtggcaacccactgtggtccccttccacaatgtggaatctttgttctttcgctctttgcaataaatcttgctgctgctgagtctttgggtccacactgcctttatgagctacactcaccgcgaaggtctgcagcttctctcctgaggccagcgagaccacgaacccaccgggaggaatgaacaactccagacacaccgccttaggagctataatgctcaacacaaaggtctgcagcttcactcctgaagccagagagaccacaaacccactagaaggaagaaactccgaacacatccaaacatcagaaggaacaaactccggacacgccacctttaagaactgtaacactcaccacgagggtccgtggcttcattcttgaagtcagtcagaccaagaacccaccaattccagacacactatgagatcatgaaatcagtttttccagcactcacacctcatccgcatctaagcagcaaatcatgagaaaaaaaaaatcactatttaacatcttccacatctcacaatcactatgttagttagcaatatattgcctcttatctcagaatacacttttcaatatatgctctgtgatggtaaaatttccttaagcatttatcctttaaagtgagcacagtatgaagctatcttagtagaggaatgtaggaatattgcaggaggaaaagtctgccctgtagttttcaccatcggtcaggggtgagtggcatgagtgtgaggtcatccagtgaagcactgccccagctatcggctgagaatgtagtccctctgtgacctttccagtctcgcctggtgataacctttccacagcctggaaaccagagccccactcagacctgtgctctaaaggcctcctgccaggacctgtcccaggccccactgtgagcccacacccccagctgctgatcccctgctaatcccactggcactgtggaaagttgtctatcacttgccggcaactcctgccagctccaggctaaccaattgagggaacgtctctgctatctagtgggctgaaccattccttctcttacaagaagacctgaatccattccaagtttgctgtcggttatgcacattccctcagccctagcatgctgtataatttccttacatctcatagttactcttttatcatccttaattctttatatgaaacatcccttgtttagtctactgtgttgtttctatctcctgattagacccaggatgctacagt

SEQ ID NO: 1884447 - DNA, 4001 bp, Homo sapiens
cagggagacgtggcaggtaaggggagatgccctgtatcctctgcaaaagggcccacgggagggcacagaccagaactgaagtggctgtgcggctggggtggccttgctaaacccctgtggagcctgtcttcttacctataaggtaggagtagtatcaggggacctgctaatatcatggggttaatgtgaaattcagaagagactgcattccattgattaaggaacagttaatgagagcctactatgtggcagtaggctggtgctgaggacactgagataaaaggtatatggatcaccaacatttatatagcagtcactatgtaccaggcattaatcactttacatacaaactagtaaatcaatcctcacaacaaccctaaaaagtatgtactattgttatccccagtttatagatgaagaaactgaagcatgaagaggctaagtaacttgcccactatcatacagtcaggcagcagcagagctgggatgtcaaccaggtggtagggctcgagtgtgtgctcttaatccccacatgatactgctcctcgaaaagctcccagtccaggaggcagggcagacacataattctgagaccagcaaaacaagttcgagaggggtcagcgtgggacctgttcctgaagggcgagttttgaaggatgagtgggagttagttggtgggtggagaaggtacagtctgtagaggtccaaaactcctgctgcattcaggttattctaattaagtgaagacaatgggaccatgctggggaccaaagatgaggctaatgtgaaggtataaaccacggaaacctagtactacttgactgttaggagcagtggtgacacaggtgctcccagaaccagcaatgccaggctagggagttttgagtccactccaggaacaatgggaacctcccaggagccccttatccaggcttatctgccccagatcactggagacagcctgcagaccaaaaccccagagagatgcagtggtgattccaactggagattcctccagaccagctcctccgagggaaaccaaggagtactgcattctgagcgcttctccggaggctcaggctctttgggggactagagaacatgagtgaattgaagcagagcccgaaagaagccagcctggtggactttaagaaggtggctggctgcctgaagttctgagttcagagttctgaggcccaacccaagtattttatgagaataataacaataaaaatggtgcaggccagctctggctccaggaccaaggaaattagatacatggagataaccaaagaatgatgaaaggcaatcagtccaggatacaggggagagagaaggtgttctaaagaaagcaatggaaaagagaaaacggccctcaaaaggaaaacaatgagaaactgtcttgattgtacttgtaagaaatgattgtgcggttaatattattttttgaaccctgacattcagagtcagtcacctggcacatagtggatgcttaataacaggtgtggaataaattggctgctacttgcccgggcagtgggccagactcataaacatagtggccattcagaatcctgcaacgttcatgttttcgtgtattagcggtggaaaataataggaacaaggcgagacctggacttcagtcccagctctgccactaagtggcttggctgtagagcttaactcttccacagtcttcatctgtgtaatgggaataacgatccgtacctctagcaggtgcgaggcgggttgtaaatggccacgcccgggagccgcaagaaccacggtgatccgcgcggccgcaggtgggctggggctcgggcaaggccgccctggcctccgctgacccccgccccgcccgtctcgtcggtcccgcaggcgccctggaggatctggaacgcgcggtggagctgagcggcggccggggccgcgccgcccgccagagctttgtgcagcgcggactcctggcgcggctgcagggccgagacgacgacgcccgcagggacttcgagagggcggcacggctgggcagccccttcgcgcggcgccagctggtgctgctcaacccctacgccgcgctgtgcaaccgcatgctggccgacatgatggggcagctgcgccgcccccgtgacagccgctgagcgccgcggacccgggcgtccgcgggcgaggggacgggactgggccctgaaccaataaagccgtcgggcctcaccgactccgcctgctcctgcgtcctgcccgcgcccggagagaagggcactcgggggtactcggcgcgggctggggaccagccggggggtggtgagccgcggccgcccacctgccgggtaagggcccctcgggcccgtggtcgggcatcgattggccccgcctggcgcagcccccgcccctgcagcggactgcggtgctcatcagacctgagcagttgctccggcggcgctcggggagggagccaggtgagccgccccggtggcggggggcgggggcgggatgctcggcgaccccaccctccgaccctctcctcttccgccgacatccaccggagccaccaacatcaggaaagggggcgtagggcgagggatgggagagagaacagggcaggagagaggatgggaacagggcaggagagagaataggattaggagaaaggcgatccctttgggggaggggcgcgtggagtatgtgtgtgagtgtgcgtgtgtgcaaggtgtggttgcacggatgctcgttgcttctgcgtatctgcgggtgtgtgcctctttgtattgtagcctggagtcagtgctcgcttctgcgcctgcaggatgtccatgtgtctgctgggtgggtctgtgcctttgggctttgccgttcgtgtccgtgccttcgccactgggggctggtctacatttgcgtttccgtacatggttctttttgtttctggagagtaaattcctggagcaattgctaggcctgcctgctgtcacctggctgacaggcccgcccccttctctcagcagcctagggcctaggcccgggccaccatggcgctgcctccaggcccagccgccctccggcacacactgctgctcctgccagcccttctgagctcaggtacacccctgttcagtcgttgaccaagtccttctgggttccaaagccccctctctcccctgtctgcacttctgtttgggtacccactccaggccccaagccctggagtccctgtccccttcacccacctaccctaggtccaaccagccagtccctggtgagaggactcaggtgccctttcctttggcctgctgctcttctcactgggccaattcctggtcacagcacagtaccaaccgtgcctgagcccttcccagaggcctcctgctgtgttccaggttggggggagttggagccacaaatagatggtcagacctgggctgagcgggcacttcgggagaatgaacgccacgccttcacctgccgggtggcaggggggcctggcacccccagattggcctggtatctggatggacagctgcaggaggccagcacctcaagactgctgagcgtgggaggggaggccttctctggaggcaccagcaccttcactgtcactgcccatcgggcccagcatgagctcaactgctctctgcaggaccccagaagtggccgatcagccaacgcctctgtcatccttaatgtgcaatgtgagtggccctgaggtgggcagggagataggttctttgcccagggacccccagcacccaccaggcaggtggtccgcaggacatttagcagacacttaagcactttgcaaatatgaactcatttgatcctctgagtaaccccatgaggtcattactattgtcgtcaccattttacaaataagaaaactgaggcagaaagaggtaagcaatctgcccagggtgatgatcccgctggtaagaagcagagccaggattcacatctgggcatttggctctagtatttacactcataatcactccgaaatgctgcctctc

SEQ ID NO: 1884448 - DNA, 4001 bp, Homo sapiens
tgtaccaggcattaatcactttacatacaaactagtaaatcaatcctcacaacaaccctaaaaagtatgtactattgttatccccagtttatagatgaagaaactgaagcatgaagaggctaagtaacttgcccactatcatacagtcaggcagcagcagagctgggatgtcaaccaggtggtagggctcgagtgtgtgctcttaatccccacatgatactgctcctcgaaaagctcccagtccaggaggcagggcagacacataattctgagaccagcaaaacaagttcgagaggggtcagcgtgggacctgttcctgaagggcgagttttgaaggatgagtgggagttagttggtgggtggagaaggtacagtctgtagaggtccaaaactcctgctgcattcaggttattctaattaagtgaagacaatgggaccatgctggggaccaaagatgaggctaatgtgaaggtataaaccacggaaacctagtactacttgactgttaggagcagtggtgacacaggtgctcccagaaccagcaatgccaggctagggagttttgagtccactccaggaacaatgggaacctcccaggagccccttatccaggcttatctgccccagatcactggagacagcctgcagaccaaaaccccagagagatgcagtggtgattccaactggagattcctccagaccagctcctccgagggaaaccaaggagtactgcattctgagcgcttctccggaggctcaggctctttgggggactagagaacatgagtgaattgaagcagagcccgaaagaagccagcctggtggactttaagaaggtggctggctgcctgaagttctgagttcagagttctgaggcccaacccaagtattttatgagaataataacaataaaaatggtgcaggccagctctggctccaggaccaaggaaattagatacatggagataaccaaagaatgatgaaaggcaatcagtccaggatacaggggagagagaaggtgttctaaagaaagcaatggaaaagagaaaacggccctcaaaaggaaaacaatgagaaactgtcttgattgtacttgtaagaaatgattgtgcggttaatattattttttgaaccctgacattcagagtcagtcacctggcacatagtggatgcttaataacaggtgtggaataaattggctgctacttgcccgggcagtgggccagactcataaacatagtggccattcagaatcctgcaacgttcatgttttcgtgtattagcggtggaaaataataggaacaaggcgagacctggacttcagtcccagctctgccactaagtggcttggctgtagagcttaactcttccacagtcttcatctgtgtaatgggaataacgatccgtacctctagcaggtgcgaggcgggttgtaaatggccacgcccgggagccgcaagaaccacggtgatccgcgcggccgcaggtgggctggggctcgggcaaggccgccctggcctccgctgacccccgccccgcccgtctcgtcggtcccgcaggcgccctggaggatctggaacgcgcggtggagctgagcggcggccggggccgcgccgcccgccagagctttgtgcagcgcggactcctggcgcggctgcagggccgagacgacgacgcccgcagggacttcgagagggcggcacggctgggcagccccttcgcgcggcgccagctggtgctgctcaacccctacgccgcgctgtgcaaccgcatgctggccgacatgatggggcagctgcgccgcccccgtgacagccgctgagcgccgcggacccgggcgtccgcgggcgaggggacgggactgggccctgaaccaataaagccgtcgggcctcaccgactccgcctgctcctgcgtcctgcccgcgcccggagagaagggcactcgggggtactcggcgcgggctggggaccagccggggggtggtgagccgcggccgcccacctgccgggtaagggcccctcgggcccgtggtcgggcatcgattggccccgcctggcgcagcccccgcccctgcagcggactgcggtgctcatcagacctgagcagttgctccggcggcgctcggggagggagccaggtgagccgccccggtggcggggggcgggggcgggatgctcggcgaccccaccctccgaccctctcctcttccgccgacatccaccggagccaccaacatcaggaaagggggcgtagggcgagggatgggagagagaacagggcaggagagaggatgggaacagggcaggagagagaataggattaggagaaaggcgatccctttgggggaggggcgcgtggagtatgtgtgtgagtgtgcgtgtgtgcaaggtgtggttgcacggatgctcgttgcttctgcgtatctgcgggtgtgtgcctctttgtattgtagcctggagtcagtgctcgcttctgcgcctgcaggatgtccatgtgtctgctgggtgggtctgtgcctttgggctttgccgttcgtgtccgtgccttcgccactgggggctggtctacatttgcgtttccgtacatggttctttttgtttctggagagtaaattcctggagcaattgctaggcctgcctgctgtcacctggctgacaggcccgcccccttctctcagcagcctagggcctaggcccgggccaccatggcgctgcctccaggcccagccgccctccggcacacactgctgctcctgccagcccttctgagctcaggtacacccctgttcagtcgttgaccaagtccttctgggttccaaagccccctctctcccctgtctgcacttctgtttgggtacccactccaggccccaagccctggagtccctgtccccttcacccacctaccctaggtccaaccagccagtccctggtgagaggactcaggtgccctttcctttggcctgctgctcttctcactgggccaattcctggtcacagcacagtaccaaccgtgcctgagcccttcccagaggcctcctgctgtgttccaggttggggggagttggagccacaaatagatggtcagacctgggctgagcgggcacttcgggagaatgaacgccacgccttcacctgccgggtggcaggggggcctggcacccccagattggcctggtatctggatggacagctgcaggaggccagcacctcaagactgctgagcgtgggaggggaggccttctctggaggcaccagcaccttcactgtcactgcccatcgggcccagcatgagctcaactgctctctgcaggaccccagaagtggccgatcagccaacgcctctgtcatccttaatgtgcaatgtgagtggccctgaggtgggcagggagataggttctttgcccagggacccccagcacccaccaggcaggtggtccgcaggacatttagcagacacttaagcactttgcaaatatgaactcatttgatcctctgagtaaccccatgaggtcattactattgtcgtcaccattttacaaataagaaaactgaggcagaaagaggtaagcaatctgcccagggtgatgatcccgctggtaagaagcagagccaggattcacatctgggcatttggctctagtatttacactcataatcactccgaaatgctgcctctctggcagacccagccatcctgttcctcagcatcccctctgaggagaggcccaggcccctggctcccatctgggtttgggaagaaagggctagaagtatgaggggctgtggtgagagcatattggcctctgctttgtaccagtcaagccagagattgcccaagtcggcgccaagtaccaggaagctcagggcccaggcctcctggttgtcctgtttgccctggtgcgtgccaacccgccggccaatgtcacctggatcgaccaggatgggccagtgactgtcaacacctctgacttcctggtgctggatgcgcagaactac

SEQ ID NO: 1884449 - DNA, 4001 bp, Homo sapiens
cactgcaagctctgcctcccaggttcacaccattctcctgccacagcctcccgagtagctgggactacgggcacctgccaccactccctgctaatttttttttttttttttttttagtagagacggggtttcaccgtgttagccaggatggtctcgatctcctgacctcttgatccgctcaccttggcctcccaaagtgctgggattacaggcgtgagccaccgcgcccggccttttatcctactttcaaaaaacatacccagagtctgagtgtttctccttacctccagcgccactccatggcccgagctctgtttcacctggttctcacctggatcgcggcctccaatttgcgcagtgacccctacagtctattctccaaacagcagctggcgtggtcattatgaaaagcaatgtccacctgctgctcaaaaacccacgaatggctccccatttctttcccattaaagccaaagtctaaaacatttacaaagcgttatatgatcagttcctacctgctttccttatgttggaggctgtgaagctccttaatatataaacagttctcaggagaaggaataaaagcacagccacctcctcagcagagccagtttacactctgctagagacaagaggagctgggaccttctcccctaacccttactgcatatgtgagagaagccagacctgctggatcgactggaaatgcccagtgcctgagacggggaggaaagagaagccgtggggaggaaaagactgtaaacctaaaaggcattgaagtcccacctcaccagttaggcagggaggagaaagaggcctagggcgctcgggaacttggaataaggttgccctctgcgggtgaaactgtgaaatatctcacagtggaggagggcggagactgttcgcagaggggcccggcgaaaacgtcaccctactggaggtacgaacgcatcgcagactgggggcgcccgagcgcatcccagacgcgagggcaaaggcccaggaggactgtggggctctcggaagtatccgatcaccttgcgaggagtccgccggctgtccgagcctgatgtcactgcaacttcgattcctccgacgcccctactcttacttcccagtcttcaggcaacttctccgcttcggcctcccctaggccttggccccagagaggggacgcactccacaggtggattcgcacgtgtgggccctcggcagcactttctcgtgcaaattaacaggtggccctcattgtggaagcaccgcccagcctttcccggggaggtcaccagggcgaggccgctcaaggtctgcaggcgcccggcgttagcgggatcctccccgcgcactggtccgaggaggccaggagagggcgaaccagtccccgaccagcggcccttccgggggtgggctctgaccccaccgagcggttagagggtccaggagctccaaagggtagggcagaattgggtagatgagggtgcatttttctgggaggagtctaaggcgtcgctgactctcaaaggcccgcatccggagaaagggaaagagccccgtcccgggaggaaggacgagaggctggcccgcgggaaggagccctggcagtccctcctggcctaggtctacctctttgatctcaccgtccccgtggcggcgagtgccaccaaagatgagagaggccagcaggtatcgggagagagctgaggggtcggcgccggcgggaccccagattggagccgccgtcgtcggacgggcagaccctgctgtaatagctcccggccggccacggtaggcaggtggggcccaccgcgagtcctagtgaaaaacaccttcctcttgattctctcaaaggaacccgagccctgggaagggacatcaaggcgctcccgagactccggagacggccaacagccccaaaagagagtactcggctatccagccgcccttatccaagcggagaatctctctccacctccgccctcccgggactcaaagttgtttgtggagcctccaggtttccttgtagatgggcacgatatgcactgtgtgcgcgcgcgcgcacacacacacacacacacacacacacacacacacacacgtatatgtatttttccagtggccactgcaggattgccagctttcggaaatgagcatccgctctctctctcgggactgggcgtggggttcaccgaaaggagaggaagagaccttgcgtttgcgctgggcctgctcgatgccaggccattctaggcttctgtctatcctggtttctggtctgtgcgttgtgggtagcagcattggcgtattacgccggagggagcaggctgagcgaggctccagaaggtgcgcaatagccggagaggaaagggcgatgctgtcacctagccccctccctgagactccattcagcccagaaaaaggagctgctttctcccccatctaccctaggagaaaataaacggtcgctggcattttcctgcgtcttttaattttgccagaactgttttgggttggctattgtgggccaggatggaggccttctcctcccgggagcaaacctgcccacgcccaggccggcagtggagtcagccttgccccagcctgccctccagggaaacaatgcccctttgtccctcgccctcccggggctgatacagcccctccccttagcttagggctccctcccgttagagcattccaatgattgccacaagtcacacttttctttgaggtctctgcctgggaagaaaacaaagcagccctcctaatcacacggagggagtggaacttttcctgccctctgactatgtgccagccttggctcctccctgaagccctgtctagagggcttattaggtcacttatgttttgtacctcgtgtgaagtcccacaatcagtagattatagaggggagcacaaacccagcagtgtctgacatagagaaattacacatacatacatacacacatacatacatacatacacacacacacatacacacatacatatacatacatacatacatacatacacacacatacatacacacatacatacacacatacacatacatacatacatacatatatacatacatatatatagtctttccaccacccaggattgaaaattaatgctgtttttgacattgtccgttatccacccaaaccctccaaaaaggctggctggcatttgcttggctctagttctacctgcccaccttctcctttgcctaatcctgagttttccccttccccacgtgtgttccccttgagcacttttttgctaacttcctgcatgctactgtcatctcagagactgattcctggggagcccaacctgtaacatggagctcagtggaaagcacatggaatgtggactgagacatgactgtgttcaaaccctggctctgtcgctaagtggttacttggtttggggcaaggcatttaatccctctaaagttcactttcatctggggggaaaagataactgtgaggattaagtgagtttatatatagtgtatgagtgcctggaccactgaagcagtgcagcagatgttagctcctccttcagtaatatttattgaacatggcatcccaagtgttactagaatttatatttctactttataaattttactagaatttatgttttcatattcttgatactaatactgcatttttgaaaggggtgactccttccttattaaagttttagaacactatcctaagtgaagtacaatggttactaaattagatgacatctggatctggctgatcttgaacaagcaggttaatcatataacttagctaggtcattgtgaaattttctcctgtgtagaaagagatattaatagtaactactgtggcagatggcattttccataaatgcctacaaaatactttccatctcagctgctcttcagaaatgaccttgccattcctccatcaacagatgaaatctaattccccttcttttgcatctgggctggcctcagggactta

SEQ ID NO: 1884450 - DNA, 4001 bp, Homo sapiens
tgtcaggacaagtaaggcctgggaagctgtagagtgaaattctacaatgatggggacagagatgaggatcaccagtgtcccctttagcatgttctgtgccccacaggtgtcggggcatgcaatattatagtccttggacaaaatgagtctcaagtacagccccccaggccacaccaaggccacaagtagccttctgtccctctgggcttggtgggcctgctccaggatccctcagacttctcatcccgcctttcccaacttcaacttcagctctgttccttctgcattccaccccaactctatcccccttccttgtggggggtgggggctgggggaatctctgaagccagggaggacagttcaagttgactgcctgagtgtcccaggcttcacctgctgctcatctgcaaccctttgtcctaccccagctttgagcctcagtttgtcagactgaagacctggactcaaaagttccaatcggtccccctggggggttgcccagttcccgccagccactcgagggttaaatggcactggtgaccccggtgcaacgtgcaggcgcccggctccgctcttctgggctctggaggaggctctccggctcagtaggctcctcggcggctcagtgctgctgcccctggggcgtgagaagcccgcggggggagtttctcagagaaagagggagactaaaaatagccccggggagcgggcccatttcgctctccttcggcccctgccggctccctcactctggcctcggagagggctgtgggccggaagggtccctttcttgggctgtcccagtgtccttcgatcagacccaaccagactccttttctctcccagtggctccgtggaccctgggaccgaaaaaaacggaccagttggtgacttccgagccagcagacacccaggagggagagcagaaaagcctcaggccctcttctgttcctagtttctgacagggcgaagggcaaggagcatgtgcccagaccccagtgtgtccgttactatctcttttaactctcctctaccttctggaaagtggaattataaatgtgggacctggggaggtcgctggtggtccacaaggtgaaggaagggcgcgccccttctgggccccaggcagtttcccggcggaaaccctttctggccgccgggtgtgtgtcgtagaaaggctgggggagagccggcagcacctgcaggctccaggcgtgcccggcctcagcggaatggccagcgggccgggtccccagggggcgtccagctccttgaggcggggattgtttcctcccgtagagcctccggtctagtggcccccccttcattgtcttctgccttatcactgggtacaaatttcctgcccagaccacagagatcctccaggaaatgggaagggggatgctgcgaaggccaagtaacagaggtgggggttctgtacggcgcagccgggaagcggtgggggaggcttgcatcctggccggatcggctcccagcccttagaggccttcagcctggctctcctagggcgagggtggagagcggggcctggctgcggcctcttcccgcggcgttggccgcctgctcgccacgcggaggtggcgtcttccgctccgaggcagagggccgaggcctggagggagtagggcccgggactggagcggcgatcatcctcaggcctggccgtgtgcaagcccaaggttattccccaaagggcttaccagttggctgctctgttgcctccccgaagggcaaaggatgagtatttctggacgccgtggtgcaaacgatggccccctccttgaaaccaacaccccggtccaccccctgagcgccggacacactcaggggaggcttcatacttgtctagagaccgtcgttcgcgctgcccttaattccttgccacccgagagttctctgcccagatcgcccgaaccccagaagggctccgaggagctttctgggtttcaaccctccgttttccgagggaagcccgcctctgagattgcgcgggagggcggggagcatcgcattcactgggtcaggcttgggcgctgggctgctctgctctctccagctcctggcaagctcagaaggagccgcagggttaataggtaaccagacggcctcccaaacccctccgccctttgagaactcgggagtgagggaccctggcggcccggagcagcatccctactctccctcaggaaaactagggaagcaagtgggctacgtggcgcgtacgacagaaacagtcggtccaccctttcttctcatatcttcccctcctcgctggaaatctgccccctctctttgatgctcagaaatctgcgcctctggatacgaataaatgcatataaatgtgtccccatccccgctacaactgcagaggctggcggtggagagaagtcgtgatgaaatgggaagcaggacactgagccagtggtccctgggcaccccttgaggcctccaggggccggaccccgcaaggttcctctttccagttaaagcgactttcctcgctctctggtgaagccgcgtagggcagggtccgcgggcggagctgggagccggtcctgggcactcacgcctcgctcttgtctccagcgcccccctcgcgggcccagctgcaactgcacttgcccgccaaccggttgcaggcggtggagggaggggaagtggtgcttccagcgtggtacaccttgcacggggaggtgtcttcatcccagccatgggaggtgccctttgtgatgtggttcttcaaacagaaagaaaaggaggatcaggtgagggaagaacgcctgtcagccagcggcaagttgcgcccagagggggttgtaagcaaagagctggtagcggtgggaggggtggagagggaatgggggccggggaaggagtttcagggaaaagcagaagtcttcaccagttcagtttttgttctgatattggagacttcccaaacaattatcttttgccggctttccctaaaaatccagcacacaaaatactgtaaaagtgtgagaggcattttacttggttatgagggaggagaggaggaggggaagaatggaagttgaggactgggaaacgcttaggggaagtaacacacacgacttataaaagttagcatatttctggcctgactcagtgactcatacctgtaatcccagcactttgggaggccgaggtgggcacatcacttgaggccaagagttcgagagcagcctggccaatatggtgaaacccccgtctctgctaaaaacacaaaaattagtcggacatggtggcacccgcctgtaatcccagctacttgggaggctgaggcaagagaattgcttgaatccacaaggtggaggttgcagtgagccaaaatccagccactgcacttcagcctgggcgacggagtaagactctgtctcaaaaaaaaaaaaaaaaaaaaaagttagcatatttctgttttcacattctctgctttgaatactgtcaagtcacaggccacttctcttcccaaatgattctcatctgtcaccttgcccccctgtataccaccttgagagccaaggggccatctcctcccacaatctcccacccatctgttttgacaccgggcttacatccaaatacagatttaccccagaagagaatgaaacaatgttcagaacccctgaaaactgtgttcaaggaagtcagctggatttttttgagacaggggtcttactcttgttgcccaggctggaatgcaatggtgcagtcttcgctcactacagcctctaccgctcctgctcaagtaatccttccacctcagccccctgagtagctgggactacaagcacacgccaccatgccaggctaatttttgtattttttgtagagactgtgtttcaccgtattgcccaggctggtcttgaactcttggactcaagcaatccacctgcctcagcctcccaaagtgctcacaggcatgaggcaacgtgcccagcctcatttgatacttttaaaat

SEQ ID NO: 1884451 - DNA, 4001 bp, Homo sapiens
caccagggtggagagcagtccaccctaaaatgcatcttggtgaaaactttcacaaagtaatggagctgctctgctaacttctacgacttgactgccctcagggtcagaagaaagaaatagctgaaataggagacaggagacagtgaggacaattctttacggtcaaagaatcttgaagagactgcccctgtgtcacatggagacattcactgactacaaatcattggttgcagctttacttcccatgtcacaagtcatttgggatctgaattctgaaggaaaagttagctacagggaatgaatgttgaggctacaccttatgtagcacttgatcaggataagcacagcctgtgtgattagatacttggtgtttctgggttagaaccaaaagactttgtacttcctctcttggaaggagttacttatttggggtgacttgtctggaaacaaaggaggggtgtttacaagagatggtttgcaatgcagactaaagccaagaaaaatttgagtgtgatggaataggaaaaccaaaccaacagcccccaaccccaccacacaatctgcttggccaagtccaagtttgtagctccctacacaagagtgtgagactggcaggtatctcttcctgttgtctgtgcctccactgagctgccaagtactagattctagggtttgcatgagcagttttgtgtttgcataggcatttctcaaagccactgcatggcaggtatttgaagaggagccaggcaggtcacactagaaagaagcagctgagagggcatatggggcactgtatagaaaaagatcttgtgtgaagtgtgggcccagggactacactctgttaaaacagcaaaactatgtgcagtaaatggaatcccgcaggcctggctgcttttcttcccagacagctctgcccgcagagcgggcagcgtcaggaattcgttgttatgctttcttccctcactgacctttgctgggtggttgagctgtgctgggatgtttgaagcattttttttttttttttttttttttttttttggctgttggacagaaaagcaagaacaggtgcgtgcctttctgtaagggagcggcggccgccagagggcgcagaggtgccttttgaccgaatggcgcgggaaggggggcgtaaaattcaattcacagcgaccaagatctagtctcgggaattaaaggatcagagcgcgcctgagcctttcgctgcggggatgggaggcactgaagatttgggggataaagaagaaacggagggactgtcctgtcttccttcccgcagccgcccctcctccccagtcagcatcaggcccgtacgccgctcatttcaggggctaagctgggagcagcacgcacgttgcctcagtttcctgctcagctcccgggactaccttgtgccaaccttccctgctcggagtatgaggcacaggccggggtaatcctccagcctgggctggggtctgctgaactcgcggagcgctttttcctgcccgcgggtgaagattccccgctggcgcgtcccggggcgccctgggctcccgcgcgacctctgccgtcgccctcgctgccgcgctccggtggccgcgcagcccccgcctccaggaaagccacagattcccgctgtgccagggagcccgcgcggccggcgctccggcctctccctgcagctggaaaacgctgctcccctcttcctccttcaggaagaccgccctgattgggccggggatgcggcacccccaagtttggagccagagcccaggagcgtttacatgtcaggtgttacgggtggttctgacttcggatagtccccaaatttcccacccttcctggtcacccttcctatcccaccccggcggaagggaaggttacggctcaggatagttctggagcctcctcttccccctctactcgtacctggctggctcgtggggcatcagagcttacctcacccctccctgcgtccagacctggaggaggccgcagggtcccgccgtccgcgcgctgggggcgcccccgggcggcggaccccgcgcgccccgcccgggaggacggcgacctctccgccccctcgaatgccccgccccgctgtcgccgtcggtccccaccccgccaccggcacacaggcgcgcagacttgggctggagccgccctgggtgtcagcggctcggctcccgcgcacgctccggccgtcgcgcagcctcggcacctgcaggtccgtgcgtcccgcggctggcgcccctgactccgtcccggccagggagggccatgatttccctcccggggcccctggtgaccaacttgctgcggtttttgttcctggggctgagtgccctcggtgagtgaaacccggacctggaggggacttgggatgcgggatggggtgagttcgaccctgagggagaactttggccactgctgcggaactgggtcccacgactcgccctcctcccctgacctcctaatcccactccagggcatcactggctggcgctgacttctcgctttgtcggggacagcccccagtttgggtgtgggggcggatggcggggggaggtaagggcatctctcggaagacctggatacctctggggtgagttatcggaaccattcctcaccctgtccactccccaccccccacccagcagagccggatgagctgagccgctagatgagacactggctaaagagcttaaggacttaactctagccccctctcatccccgaccccacatacaagctgatgaggaagatcccccggggaaatacccctggtccccaggcttgacacacgcacttcgtgtcaattccccagcgcagatgctctctcttgccccctcctgcttcctgccctgggaatcaagggaggtgccccaaaaggacgaccgtgaggtcatttgggacacaggaaatgggggaggggttcaaacgcacagagaaacagaattgtgaccaccccacccccccaaggcccaccacccttattggtttccagagccaaagggaagaggggaaattgggaggagggtggccaagggtcagagaggaagggaacctccttggagcaagtgtttgggaagtgttgtaggcctccaggggcgctggcttcagctgaagctggggtggctcagaactccatctgggagaggacccggcaggactaggcccttttaaactatttcacttgctgtccctcagctttcttgccatctcccttcaaggatctcgaatgggagtgaagggtgggtttagctatattgactttaactcatttctcaggttggaggatgtcaggacaagtaaggcctgggaagctgtagagtgaaattctacaatgatggggacagagatgaggatcaccagtgtcccctttagcatgttctgtgccccacaggtgtcggggcatgcaatattatagtccttggacaaaatgagtctcaagtacagccccccaggccacaccaaggccacaagtagccttctgtccctctgggcttggtgggcctgctccaggatccctcagacttctcatcccgcctttcccaacttcaacttcagctctgttccttctgcattccaccccaactctatcccccttccttgtggggggtgggggctgggggaatctctgaagccagggaggacagttcaagttgactgcctgagtgtcccaggcttcacctgctgctcatctgcaaccctttgtcctaccccagctttgagcctcagtttgtcagactgaagacctggactcaaaagttccaatcggtccccctggggggttgcccagttcccgccagccactcgagggttaaatggcactggtgaccccggtgcaacgtgcaggcgcccggctccgctcttctgggctctggaggaggctctccggctcagtaggctcctcggcggctcagtgctgctgcccctggggcgtgagaagcccgcggggggagtttctcagagaaagagggagactaaaaatagccccgggg

SEQ ID NO: 1884452 - DNA, 4001 bp, Homo sapiens
gcattgaagcagtgtagaaaaaagatacacaatatccattgaccttcaagagtctgaggggctcagacctctcacgatgtcggctgtgtggttgcccatgtggagagggctcaggatgtgggccaggctagacaacccctccagacagatgcaggacatagcattagggttactgtgctctggggtgagggaaggacatctatctgaagcaaaagcgcttcctacattacacatgctcttcctctttaactgttacccgtagtttcttctcaatggaaacccctttcttagaggtcttcccagaaaggccaatcctatctccctccaccttcaacatttcagaggcagatgcctggaggtaggagaaaaggagaagctgcccatttaaaattcctttcactgttgcattgcaatatgctgtgaaaaaaaaaaaaaaaaaaactttcagtttaggtatcctagatccatcttctcggggttgactttacattctatcactgaagtggtaaaagtcctagctgctaagttgctcatcctttagcaacttctagcaataaaatcagtgtccccagtggaggtcttccccgccacctgtcaggtgtcccaaccacgagccctcgctcaccagccttgtgaagctgaatgcagataccgaaacacagccaaactgattctcaaagtagaaattcatgtgtccagaggcccttgaaactgggagcccgtgatagggagattcaaggacatcagattctagaatcgagggctgtggcctcgctgtgactgagggtgagatatgtgctgggcgtgggggtcaccctctaggcagaagtggtatcaccttcccctgaatcgcatggaggcagctacaaggtctatttttcaactcccccctttggtgcaactaaaaatggctatagaggaacaaaggtgacattttctgtttgatagcaccagagacaaaaaaagtgccaggggcatccctgcccttctccaccttctcaggttccaccgtgcactttttatggaatgtccgtgaactttggggcttggcctcagccttgccatgtctcacgcagcccctcccgtttctcattgccctggcgtgtcacattgaatgctgccaggagagagtcgggtcagagtgtccgtgtgaccttgaaaagagctccttcacatgtggtcctgggggattggagtttgcaaaatgccacttccggtgccgcttttttctcattccgtatctggtgtttatattgctctttacatctttcagaaccatttcatatccatttcctgatttgaatttcatgacaaccccatgaggtatcattatctccatcttacagcaaagacggtgaggcgctagagagtgattccccacaaggtcaaatgcctacttacaaactgaggcagcacaggggcttggcttcctgggcgggtccagctggtgcctcttctgccaccccaagtctgcccatccttcactgagcaagtcagtcgttcctctgcctctgcaaagccgtcatcctctgccaccacgggccccagtaccgcctcctccgttggattctgtagatagtgcactgtctgcctctctcacttgcctagttattccatcattctcttgtttacttaacttttcagttgtgtacatatattcctcacaagacaattacaaacaaggtgtctggcataagctttattatacctgctctctttttcccctcccccacccccacaacccgacaaaacccaattaagagtgtaggagacatttaacaaatactggctgctgaatgcatgaatgaatgacttttttaatcaaatataaattaaactgatgtctcacccaaagcagaacttcttcttgcattaatccttgtagggctttttctactggcaacagaggaccagtgaggtggctggtccttttgttgttggttcacggaggaagatctcagggaggaaagttgaaaggcctctgtcctggtgaattgcctggaaagtgaaaatctgagattcagatttcaaaaaagagtaactctttggtgtggtaagggtaagggtaggtgatggggttgtaatgacagcattgatgtttgggagactgtggggattacagaaggtcatggagcacagagatcaaggaccaggcttcagaatcagacatccttaggaacccagccccgctacctatagattgagtggaggactttggcaaatggcctgacctcttgtccacagccccctgacctgtgaagtggagataatgatattctctacaccatagggctgttatgaggatgaaatgtgtgagccaaatatctagcacttgcctaccatttagaatgggctcaaggcatggtagctcttgttcctaccacgatagactccctaggcaggcttggcccaggcttcctctcctgtcttggttcttctttgtgccctaagtaaagaagatggtttatatccatcaacccacagagaccccaacccgggctttttggccagtgggtgctggtttcacacaaagaacaaggggtggggggttaacagacaccggaactcaaccaaagaagcccatcccttcactctgaggggctgaaattccagcctgccagtgacctccagaaccttgggtttttttaaaggaatcctccagacagatcagacctactagtgcctatcttcctcctggcccagaattgatgagccctcaccatttcatcttttctttggttagcacaaggatgaactccgctttttgcctcattctcccattggcataatgacttaccctaccatcatttaaatatctgaattcagaaactttcattagggacttcccatgactttatggaggtgtcatgattagacctgttattaccaccccaaatgggaaaattgaacatccactgctttatgaacccttcatcacaattaatgctgtctccaaaacttctcatttattgggttctctggtataatcattcctaatatgtgtttcaagaccttgtacaagtacaaataatttaaactaattagcttattataaaaaaggaatgaaaacaaatggcacatgaatgaattgtgaggtttcatatggaattaatatctccataatacccacaaatttggtaaattcattatgcatctataatcaaacctgataaatcccctagataattcagaagtaattatgcatgaactgctgccacttatttgaaagtgctaccaaaataagagatttattcccaagatccagttaggctccaggataactaagactaacctgacatctcctgtcaaaatcagccatgagaaattacactgactctgcccccctggatgctgtccactgatatctggaaagagcatgcatggttctcaaaaatagtccctgtttgagacatggagtggagtttatcactggaatttgtgagatttggggaagatggagagggattcccagttggaataattatcaagactcagtgaaacacgcaaactgtgcaccatcccaccaattcccaaaagactttcttagtctagctgagaaatcctatagcaaggaaccattttctcatttagacgtggattgcagttcttttctgatatggttttgctgtgtccccacccacatatcatcttgaattgtactcccataattcctatgtgttgtgggagggacccggtgggagataatttgaatcatgggggtggtttcccccatactgttctcatggaagtgaatgtgtctcatgagatctgatggttttatcagggattttcacttttgcatcttcctcattcttctcttaccactgccatgtaagaagtgccttttacttcctgccatgattctgagatcttcccagccatgtggaactgtaagtccagttaaacctctttttcttcccagtcttgggtatgtctttatcagcagcatgaaaacagactaatacagtaaattggtaccagtagagttgctaaaaagatac

SEQ ID NO: 1884453 - DNA, 4001 bp, Homo sapiens
aggagaaggaggggctaactcgactcctccagaaatgggagagctgtgacagacacaaagggattgggtgagcagccccaggctttggcaatgccatcttctctgtgaaactgatgggatccgggaggagagctctgtggactggtcatgaattgcgctctgctgggctgggtggtcttgatctggtcaaattaccttcttgtctcttccggtagatagcagtaaagcctgattggaatttctctgaaaactaaggggaagcaaaaggggaaaaagccatagaactacaaaagcattacagtgactgaacacagcacaggtttctacatggacacaatcagagttgcgcaggtccacccagaccatgtgcagaaatgccaactgagtctcattccctcccaagctagcgcagtcctctttgggctggggacggactgtctctgtgtcattgtctccatctccctactccacctcacccccaacccatctacaggccctgagttcccacacgtcccagccccacactgggtgagaagaggaatgacactgcccttctttgctaaacagcttgtcccactctggccttggttcctccagcactcacctctcagacctgtgccctgccacatatggaggtttctcctgatccatgtctttctgggttggtttgcttggttactaaaacatgttaactggctggatgtcatcagggctctacttttttggaactggcccactatttctctaatattttaaaccagcagttgtctaactaggcccctcagagccttgagattccatgaagatttatttatttatttatttatttatttatttaattatttatttggaattctcattttattctcctgagagattatgcatgatctattataaaatatataggtaatacaaagttcaaaagcctgtcatgtttatagaataaacaaatgaaaattaaacacaatacagtgtgagagaaaatcatggtttcatttattttttctgtttttttttgtttctttttttttgagacacagtctcactccattgcccaggctggatggagtgcagtggcatgatctcagctcaccacaaccctagcctcctgggttcaagccactctcatgcctcagcctcccaagcagccaggaccacaagcacacaccaccatgcccagccaacccctgtattcctagtagagacggggtcccaccacgacagccaggctggtctgggactcccagccccaagcgatgcacacaccttggcctcccaaagtgctgggaccacaggcatgagccaccacgcctagccagtttcatttattttcataagagataggttatgagtacatgatgtcaaagcttaaaagtcatcaccaaactgtgctaaagatacggagaaattatgcagggagaaatctgtgcaaattcatcttcttactcagtataaggtggtaaaagcatgaagatttaaactgcccctgtgggtaagacaatcagtgcaggggctgggcaggcggtgcccaggagcacgcaaccactgtcacctgctgccttatcccccacttatgccaattttgtatgttgagattccacgtgaagtctcattttataaaaatctacttaaggtgaaaggtttggaaacctaggttttccagagactccaataataatattattctattttcttgccaaaacatacaaaacaattataattttgaaggcttattgggtgctaagagttttcaacatattatcttatttaaattattttgcaaatgaagaaactgaatcatggaggttatggttaagaaaccagcctgatatctcacagatatgaacggcagaaccaacaggcatctttctgacttcggagtcctaactctgtagccctccctgacctcactcacctgcaaacattgctcctgggaacatctgtgttgctggttcccgagacagcactagtttcttattcctttgcacagcatagataaggtatagtcccagaatctagtgaatccacaggactctcctggctcaggttcccatttccacacacttctagaggattctaattagcttctaaggcctcctcccacccctccttcagccccacccaccttttagattcaacagtgtttcatcatcgtgatatcttagtcagtgcaaacagtgtcaggaacaaaaaataagagaaagtcacgttgtcctggaaagccagacaagaactgactgttgctgccctgctgtcttgctattgcttctcccattttggtagagtggacagaatttttatcatgctgttgccacacagaaacctgagccaagacaagcctaagaccaagccaccaggactgtccccctaaatctgcagccccctgaaatgcttgagacacagccttcataagcctctcccagggtggacgggcacacactgctcccgagatgacaactgcgttgtgaaaactgcagatctgcgctctttgcaaagtggttccagtccccagggggacacacagtagctgccttccctgggcaggaagagaaacaacttgaggtgggagggagagctttcgagttgacaagtgaagtgatttttaaccttccaaattcagttgtttgtggggggagtggaggggtgaaggagaaaagaggcaggcttttcagggagacaaaggaggcatttgtcagagcagagagctgtgcaaacccaccgaggattcaggcagttagcaccttggcaagtccctgcctctgcaagccctgacctaattttgagagatactgctcacattgttttccagataaaagcaggcaacagcgagagctctcctgggtgaggctttgacatcaggaaaaattatcctgactcaagtgactaatctcctttcttacccctttccccgtaccccaaccctgcactttcttctccatctcacaaatcttcggcagagctgccaaatcacagccaccaacacggagagagacagatgtgctccaccaccacctgcccacagtggggtgagacctgtgttcagcacagcctgtgccagctaggaacatctttcggtgtcttccttcctcctatgtaaaatctggcagtttgagctatcatgttgaggacaggataaaagcaaggagcggcctctggggtgaatgaatggtcctctgcagactcctggcctctgacccaataggctagtcataatattcagagggaagcaaagcctttaaagaagcaaatcgttaaaacactcaaggttgtaaaaaaataaaaaaataaaaaaaaataatggttgaaaagcattgaagcagtgtagaaaaaagatacacaatatccattgaccttcaagagtctgaggggctcagacctctcacgatgtcggctgtgtggttgcccatgtggagagggctcaggatgtgggccaggctagacaacccctccagacagatgcaggacatagcattagggttactgtgctctggggtgagggaaggacatctatctgaagcaaaagcgcttcctacattacacatgctcttcctctttaactgttacccgtagtttcttctcaatggaaacccctttcttagaggtcttcccagaaaggccaatcctatctccctccaccttcaacatttcagaggcagatgcctggaggtaggagaaaaggagaagctgcccatttaaaattcctttcactgttgcattgcaatatgctgtgaaaaaaaaaaaaaaaaaaactttcagtttaggtatcctagatccatcttctcggggttgactttacattctatcactgaagtggtaaaagtcctagctgctaagttgctcatcctttagcaacttctagcaataaaatcagtgtccccagtggaggtcttccccgccacctgtcaggtgtcccaaccacgagccctcgctcaccagccttgtgaagctgaatgcagataccgaaacacagccaaactgattctcaaagtagaaattcatgt

SEQ ID NO: 1884454 - DNA, 4001 bp, Homo sapiens
tgatgtgtataagatacaatagtaatactactatgaccaccaccaataactactatttttggaatttttattagccaggcattatgataagtggctcatgtgtatttcttcagtttttcctcaaaacaactttgaagtatcatagatgtcatgtctagtcagttatcttttacaaataacgtgttgtataaattattactctcctccacttctctctctgtctctctctcgtacacatacatgcaatcttataagccatctcagaacctcatttactatttttaggagttcataatctgacttagctacctcacttctgtattcctaccataccctgtatatgtccatgtacgtgcatcttagtctagtataactattgatttggttgtttgcttccttctttagaatgtaaattccttgaagtcaggcatgaccccttcccttttttatcccaaatgactatcatggtgcctataatataataagtgttgaataaacatgtatggtaaaaggaaagaagaaaggaagagagtaaataagggagaaagagcaatattttccatggaccagctgagttggttcatggaaaacagtcaagcaaaggaaaaacagcaagatcaggtggcgtattggtatctttaatctataggtagcttctaaaaaatttggacatttataactagtgagttatcgatcacttgctatatgacaatcatcctcattttatagagaaaaaactagggaattttggtgaaacaaataaccttcgtattctcagttgaccttagacaaagaactcttttacttctaccctattgctttaactcttggatccaacacttctcactgacagccccattggtctcttgcatgctttatttctccaagcaaaagtgggcaggaccaatggaaattgtgtatgtatctatttgtttaataacatttcttactatcaattatgttccaggtcctctaccaggcactggggacacaggatgcaatcctgtaagagcttttcagaaaggtaattgtacaccattttcgtgcagcctacgattgagaccatccaaagttatcacatcaatggtggaaacacctatgtgctcaggtagccaatacagcttttaaacctacttaagagcaagcaaagagaaataataaacacctgacattgaattggcctgggattttcgcctatgatttggagtgactttgggggaaacaagttaggcatagacaaataaatgtaacgtgtccacatgatttttcccacatatattaagctatcattttatctatgataaatgcatttccagagaaaatctccagatttattagaagccacttacaaaaaccaggcaacttgcagttcctgctacccatattttgttatctgacttgtagccaacctcctgcagatcccaaaactcatcatttccctaagacacagagggaggggtgggttgaactcatagctccccatggaggagaatactcagagtgggcccacagtcctccccggatctctttctccatcttttccactaataggtacaatgcaataggtgcatcaccctcctcccagttcccaacttccacgcgaggccatttctcaaggttggtctagtccccaaagagccactcactaactctcagctggttagttttacatggtcagccagattcccacctaagctgaggagaaggaaatccagctcctttgggggtagaagcaagcactttccacccctcaccccactgccccatctagaggcactgattctcttatccttcaccctgtgacctctcagacacctgtgggaaggccccaagcaagtatcaatggatcacccagtacctgatacccaaagcgctccccacccacctgggctcctcagacagcaggaaggggattataacctgtaatttctcatctcggttagcaggtgacaggctcccataacatggcatccatatggcgtcaccccttctgttgagcacaattttagggcaagattcataccgcttctctctgtgctcaaaatagatgcccaaaattgggatagaatttacataagttggctgaagagactgtgttcaattaaaaagcttttgttgccaaggaatttttttagttgatacatatgctcctttattgcagtgctttagggggaaagatttcagcactctctcttctctctctccatcttcctcctgctctgcctcccccacttagtaaataaggaggtgggtggatatctccccggaagcctgagtgagcagcaaatgaagaaaccacccatatggaaataacaggaaccctgacccatgagaaacagaagccagtgatgccctcttgcctagcctggggcaacgcaagccaaaaagctcttctctgtgtgtattctggcctctgccccagaaagaatgggtcctcccacttgcaagcaccataaatccaatgggatgtgttttccacggcactgacactgaagtatgcatttaaaaatattaagtgtgttttttcaatcatgaaatgataccgttcctgtgcaaaaatttgggaaacagaaaagtataaaggcagaaaaaattcactggcaattttaccattcagagaactcttaacacctcggagtatttccttccagcctttagtgaaactgtgtatattcacacaaatctgggatcgtcaaatataaatacttttgcattttggcgtttttgtggaacatcgtattgtaatttcctgagcatttttctatatcaagtacgttttaggagcagcacttttaatagcaaaaaactataaggtacttaaccatttctctattgtggatatttatgttatttccaatattttgttgctattttacttaaatattgctgcatttaacagccttgactcttggtatgcatctggggttacttctttaggataagtttgcatgggttatgatattccatagagaagacgaggtgccctgagctttttacttgctgcaggattggttcatcttatgattaatgtgtgcattttttacaatgcctgtttagcatcagaaatgatatcagtgttaaagaaagtagtttggttgtggaatatattttcccatgaaaagctaaataaccctaggtcagatatctgttgttcttgcctgctcagcctccattcccctcatttctgtttaagagtgtacacttcggcagggcgcggtagctcacacctgtaattccagcactttgggaggccgaggtgggtggatcacgaggtcaggagttcaagaccagcctgactaacttggtgaaaccccatctctactgaaaatacaaaattagccgggcgtggtgacatgcacctgtaatcccagctactcaggaagctgagtcaggagaatctcttgaactccagaggcggaggttgtagtgagctgagattgtgccactgcactccagcctgggcaacagagtgagactctgtctcaaaaaaaaaaaaaaaaaacaaaaaacaaacaaacaaaaaaaaaaacggagtgtacatctctgcccactctgcattcttgcggttccaatggagcctactaagccctcaccttcgggtttggaagtagctaatcaggtcacagtgaagggtgggcattggaattttgtcaggaataggacagaggctctctctttcctctgagattattaatcaggtggaacataagcccagcaatgctaggaaccatctctgcccccacatgtaaagagtctactcaagaaccaaaccaacctcgacaaaaacagagctaacaaattgagataaacagactcctcacaacatttataaactctgatctacctgtgcctacagctagcaaaactacacccagagattttgcagttatgtgagccatgaaatccctgttattacttgaaatgatttgaatttgatttccatttggtacaatcaaaaatgtccagctaacacagacaagcttcaaggatcagaggtttgg

SEQ ID NO: 1884455 - DNA, 4001 bp, Homo sapiens
tttgaggactaagaaagatttctgtttctttattctggattatgctatccctctctcttaactccaattctccatcaccaccacacctcatgatatggtttggatctgtgtacccacccaaatcccatattgaaatgcaactctgaatgctagaggtggggcctggtgggaggtgattggatcatgggggcagttcctgatggttttgcaccattcttttggtgctattctcatgacagagttctcacgagatctggttgtttaaaattgtgtgacgcctcccccatctctcttcctcttgctctggccacggaagacaagcctgcttcccctttgccttccgccatgactgtaagtttcctgaggcctccctgctgaaactgaagtgcttacatccttctacttgatgggtctcatattttgcagttaatggtaggaaactacaattctataattacagttatagaaattatagtatataattatatttctttttataatattacttctccttttaccttatttgatatagttggctagccactatgcttcctgtatggcctgcagaactgtgagccaatgaaacctattttctttacaaattacccagcttcaggtacttctttatagcaatgcaataatgaattgatacatttcatgaatatcccatgtgttggcatatgcaaaatacacagtgctgattgattaggagagtgccagggtcaggtatcagccttggcagaaggaactgcttttcgtctgaaattgtgatcataagttcgattaaacattatggaacatctttttgaaagagaatatccaagcaaataaagactaaagagtgagctgcatagagatataatatctagagtggtcaaacagttgtaaacataggtttacgaggtcttttatagaagttatttatgaaatgcagagcagagcacctctccaggtagatgaatcactccagcatgtttcttctgcctcatctcttatttcttttcaggctccatcctctttctcacctatatgccctatgccatggccactaatattactgagtattgcttaaacatcacctcttctataaataccttctctaaccactgtctgcactccccacacctccacacgtcccctgacagctgtacagctgtctctcgtgcatccaagttcccatgacactttgagttgagctctacttgatcttctattataatcaattcgtattcatttaaaaaatttccaatgccaagaacataaagtaggaccatagagctcataataagtgtttagtgaacattcgagatatgagttgctgaatgaagctgactagtaagtcttatttctcctaagctgggttttatcaccatgtcattctcctttatgtttctactctaagcacaaactgctgaaactggagtccttccctccttctacctgatgagcctcccattttgcgattaatggtaagaaattacagttctataattacagatacagaaattatagtgtataattctataataatagaatatatttaataatagaattatataatagaatatataatagaattatatttctttttagaatattagttcccgctttaccttattatatatatactcacacacataaaaactctagtatgatatagttgcattctgcctaggtggatggggaagtcctcttggattgtgtttgaagggttaggtaatttgtctgagagatatggggagaagagttgatattatggagaaagaggcaattaacatcacaaggtcattaaactggcaatggaagaaagcactgatttacattccccccaagccatctgggtgccttaaaataggagacagtcagtaatgaaaacaaaaaaaaaatttgaacatacccattttgtagaccccttgggtttggatttcagtagaatctgcatcttgggaggactctgagtcagtctgctacactccgatgcctatgttttcagagctaagtgacacccagagcaggaagagatggcagacgtgctaagaggggaaggggaagttaaaatgccaagaagagcaaattgaaaaagtggctactcagtgagaactataagccaaacaaaatctggggtttggagacagctggagaagaagacattggtttttaaaattttgcaacaaaaattttgatcaggcagttcatcttatattaaaaaaacagaaaccatcacatataaagcccctcatcctctgaacatcatatgggcaaatacatttttcctttatttatcttcttcttccctcatgtaacaaaacgcatcccatctactcatttactctagttaaaaaaacaaaaacgaaaaacaaaacagttatctttgattcctcttgtctttcttccccatcaaccattgaaacagtaaattcttaataccccttgaatctgtttcccacgtggtccatcttcacagtcattacctgtatccaattggcctttctctctcgctctctagcctggctgcaatgttgctaacccttatgcatccctaagctttccctaactaccctatcgaaagcagatcccttccacaattgtctatttttcatagacttctcacagattgcaattattaatgtgtgttttttaacctgttcttagatcatacattaaaatgtaagcttcctgaggacaggtgccatgtggaactgtattgttcactgtgttatccccagggaccacgattgtgccttagacatagtaggctttcggatagttgagtgaactcaggcaatgcagataaattttaaaatcaaatgtgaaagtattgtaatctttttacaatgcacttttatgactttcaggacatataacatattcctgatgagacctaaggtattgaatggataagactcatttatagttggcagcatctatttgtacccatctgcatcccagtgattaatgccaagttcttagaagcagtctgctcccttaaggaggcagaatttatgtttaaatctgatgcaagtggactgagtaataggataacttgactatatattgttttgaattgttctctaggtgtctcacatgtgagagccttttcaaactgattgtaagatcctcaatagggaggagtttgccctctaatttctctttattaaaattctagaaactgcaaactattctttcctctaattctaaacaaagagcatgcatgaggtaaggggtgtgtgtgtgtgtgtgtgtgtgtgtatgtgtgtgtgtgtgtgtgtgtgtttgatcgcaatgctccactgccagtgtcccaatcatgcctatgaataatgtgtgagaatctcgtaggatcttttaatctaagtgaagaatgcatttctgctgtgcttccctgttattttctattgctattcagaataaaattgaaaagaaaatgtggcataatttcatataaatagtctgaaatattaattctatgacgacaagaaacaacgtctgttttgttcattgtggatttaccagtcagcacagagcttcatgtctggtgcattgtaggtgctcaataatagcagctgaactgatataaaaattccttctggtttggatgatttccatagaatattgggtcttcttcctggcccagtacttacttcactggtctcatagtaggcacttgcaaaataaactcctgttgatttcctttgacagcttgggttccatcaagtcaataccttcttatgggtcctgtctctccagctaagctcttttggggaaatgatatcttcccagcagtttcagtggctatgtagtttatctgtaggcagctttaaaaacaggccaaccaaacaaggggctcagggatctaaaaggatctttaatatagccaagctcatgggggcatcctacaggtctgagccctgcaggatactcagggaaggacactgcccatctcaactccctctggcactcccagagttaacacttcaagcctttatccctgtaccttttct

SEQ ID NO: 1884456 - DNA, 4001 bp, Homo sapiens
aacataaaatcactgtgactctacctcctcatctcctccccttctctgtcctcgacttacacttccattgttctcagaggacttcccttccactacttcctcctgtaccaccgtcccttttcctttcagggctatttctcctttttgtgctccacttatctctgcttcttgatctctggggtggtaaatgttagtcttttggggcaattgatttggcattttaaatgaaagtagtggggagaggggaaaagattccacagtgaaattgtcttaatgtaagattcaaaccacaactgcagagaacatctgttttgaagtttgatgttgtctttgtaacccaagagaaaagcagagtaagatcagaggaaggccttagccttccaccaggatgaaaccacctgcagccttggacagtgggtgaaatcctgtagccctgggatgcagagcttctaggagactggctgtcctcttctctcatattattaaaggatgttggttctcttgccatctgtgctattgccattatccctctacctcctcaagagtccaattcaggacaatttaaattggaatcccaattacatgatccccaaaggctcacagagtagcctgcattctgcatttgcagcaattccaggcaacatgctcagcctgcttcagggaagcacacaacactgagtgtggatgagacctcagaaccctctaaccttgggcagctccttacctcttcctgtctgagccatgtttgatttgctgcaagaggaatacgtgtctaaactgctggattttaaaatgtcgcttggtctgtggattaggccaatccaccccacattgttggggctgcagatgcagttgaatggttcataattatagtctaaagaaactgcagacagcaatagagccaacccaggccctttctctcctgacagcccatgccaagctgtctcccacagggaaccatagtgtggttatcctgcaatgtatttgcccaaagacaatacatccagtgtagagaagttggatttctagaaattgagtctgctcatctatctactcccatgtccattgtatcctgtcttgtgtctcaagggtgtctggtacttctcctgccaaagtgaaatgcaaagtaaatgcaaggagatgccagggagagaactgctatcagggcatctggttctagtactgacactgacttttttagattgtgtggccctggaaataataatttcctcactcacactcatttttcacctctggtaaataggagtgctggacttggagagcactgataaactcccattgagctctaacatgtgacaaatccaagacctaaggttttgtctccaaagaggcactacaaatgtgatcttctttcagaatttaaactgtcacttttctgtgactcaaaacaaatataaatctagttctcttctccaatcaggtagttctcgaatttctcaagtgaggctgatgctgggcaggttgccagtttaagaactgaggaagggtcttgaagagatttttaaatgaaatgtggtgatagttgttctatctctcgctggagatcgttcaggaaaattgagcatccaagctattctgcaaagagatggctgtagacagacatttaatgtgatttcccacatattctaccgtatactagatcttaataacaataatcaaatactaattctcacctagacactgtgctaaattctttgcatacattatctcatttaatcattcaaatagccttaaaaggtgtgtgctgctattatccctagttgaaacatggaggaactgaggttcgggattgtttaaatgacttacctgtggcaattcagctggctagttggtagagtaagaatttgaacctgagtcttattccaaagcccacactactatcctctttgttttcttatattgagctttccagggcaaacaggctcccaagtcctcccctctcccccaaccccaccccaccctcccttcttccctcctgactgcagctcctcctaccctcattgtttattgtgccttctaaacaatagccaatgagtctgtgttccattctagggagagctagggctgattttattccctgaaacagagatgaggttgtgacacaaaaaggttaagtggctttggtgaggtcacagagccagcctgcagtcagcaacagtaccatctgagtcccctggcttgggtcccttaactgaccctaaggctttttggcatccaagtttaattaagagagttattttaattttccttcctatctctaattttccattttattgctgcttgataatgtagatattgaagtgccaggcatttttcttccctagtgtgacttttaatgactaaacttctcacatagaaaccacttgccttagaagtaagctttcaaagcttgtttctgtgtatgacagagactgttgccttttctcagagaaaaatgagaccacaaatgcagctcagacaggttgttgttaattgagggcttttttttttttttttttttttctaaatcttacatttataccagtaaatcaacatctgtgagtcataaactggttctggatcagccgttagtggtctgaatgtttttgtacctaccttcagtaaagcatattttagctcaaaactcagagattctttgttttgttgaagttcaagactcaggagtagataacatgctaggacacttctggagagggaaagtctgtcttccatgattgttcaacattaagtgtatatttatatttcttttttattgaagttggggtggagttgagggaggagtataaataaaaaagaaagtatgctttttacatactccatgtgcttgaggaattcctgtatgaaggtgactattttcttaatattattgtctagctccactcttctgttccccaactcctgcggacttttcttggcccttattgacttcacgttcctagtgtaaggcaattcagcacttggtaggatataattagccgaagtctaaggaatgcttaaaaatacaattctgttttttcccaaatgcaggaggaacagactgctgcagtacaagcacaagcacagaagtatttatttgattgatttttttttttcctgagtgccttaaaaaccagatatggtattgaagtatcttgcccaagtggatgaaaggcaacgcttggctgctgttgtttggctggtggggacactgaggcatacatgtaaccgagtggacgtgagtgctggggatagaggttctgctctactatgaagggaaaagggcacagcctctgacactttttagttcatcttcacaagccagagcatatcaaactcacttaatcattgaattaggaagcccatagtgaccaaaaagttgatagttcatcattcaacacatatttattgagctctgtaatgtcttaggcactaggctaggcatcaatgttttagcgtatgataacatagaaatatcatttaaagtccatatgaacatttagaaaaatctacttgtgtcctaaagagaatgaataaaaatttcatttatcaacattgattagattaatgaaacatgaccctggcagacctgatcagattattatatcttaaatatgtaaaaaatattttaacatgaccttattagtgctcttcatccaaatccagggttcgatgcataacttctgatggcataaatattcataattaatatcatctggaggtaactttcctggcagcctgtggtggcgcctggctatctctccaaactgctgctttacgcaaccctattccttgatttggacattcactcattttgtttctgtgcttcaggactggattaggaaacggatgattgactatctgagttgtcactatggaagaattagaaagaataattttcctcattgctagagtggaaagtgtttacagtttaatcatggtgggcttttttagtatctaatttgggtggatgttagcagcagtgtttaggctagtctggggaa

SEQ ID NO: 1884457 - DNA, 4001 bp, Homo sapiens
aatgttctcaccataaaaataagtatgtgaagggattgggcatgttaacttagcttttttttttttttttttttaatttttttgagaaaaggtcttgctctgtttcccaggctggagtgcagtgatgtaatcacagctcaccgcagtctctacctcccagtatcaagcaatcctcccacctcagcctccttagtagctgggacttcaagcgcatgccaccatacccagctaatttttgtttgtttgtttgtttttgcagagatgacgttctacaatgttgctcaggttggtcttgcactcctgggctcaagcaatcctcctgcctcagcttcccaaagtggtaggattacaggcataagccaaaaagccaatccatcaaggagccaggaaggctttgcagaagttccttctggaagaatttcagccaatagccaatattgaaggaattagagggaaggtatttcaggcagaatggagaggaagaatcaggatgtgttcagggaagagcatgtaggcgaatgtgaatggggatgaacgcttgtgcaccaatagagaaaagtggggctggaaaggggttcagtaatttatgggatgatattaattggggcccatcatgtttggggcactcttgtaggcctgtgacttagcagacaaggatgggaagcacctactcacacacagatagtgccgtgatggccagggcctgagagcctaattccatgggaccatttgaggtaagacctgaatgacaagaagaagtgggctctgagaataatcagggccagagagctctccaggcaaagaaaaggaaagcaaagggctttgaggcaagaactagagaccctgtggaatgaatagaggtggacttaccagcaggagaggagctggggcatgggagtggaggtgagaccaggcagagcctgcagtgcactgcaggaggttgaactctatctgagctactaggagaatgagaggccctatgttatctggcctctgcctctatcctggacctcatctccatgggaaaaactcatctctgtttgtgcccaagactcttccagttttagcactgaaagtctcaaatccaaggaacacacgaagttccaggcaggcgggcagttggtcaccttagctcccacctcatccttgctcactacggtcctgtcacaacaatgtgggaacatgctgtggagtcccttaaaaagctctggctgattcattagaaaatgcatagcaactcaacatttctgaaaacaggactaacataattaaagctatttaagcttgttttttttttttttttttttttttttttgagacggagtctccctctgttgcccaggaaggagtgcagtggcataatcttggctcactgcaacatccgcctcctcagttcaactgattctcctgcctcaacctcccaagtagctgggactacaggcgcatgccaccatggccagctagttgttttgtattcttagtagagatggggtttcaccgtatcagccaggctggtctcaaactcctgacctcatgattcatctgcctcggcctcctaaagtattgggattacaggtgtgagccaccatggccagccagctatttaagcattttttaaagatactgacgacctccaaggccattcaacttacataaaaatgcctttctgtggaaatttgggcattcctttggctatggagagggtagtaggtcaattggcatggctgaatataaaaaagatcttctccgtccagatgtttctgttcacatcctcttgtgcagcatagtttggaatatttcatcttcattcttcaagacttaaaggtgtatcactacagtaaacagaacttaaaggaacaggcctttgcatggcagcccagctgaatctgcacaaggcccttatctaaagccagttgtgagagaaatacagtagcctctgtgctcattacctctagaattgcattttctagcttctcattaggaagcggtgacatcagaataggaccctgcccctttaagagtctttcccaagataatgggattcatgatctcacaatcacataaatcactgccagcccccttgagtcaattcatacttctgtagttcgttagtggcacgagaggaaattgcatttattataattgcctctaattgcaccagattagtgattacaattattgatggcagctgattattcattaggcatcaaatcaatccccgtgcttcttcattactcgaaacagtaactctgatgagaggtctaaaggaggccatgtccaccctttccactaaatggcaggctgcctccccgtcctgcctcgaaacaaacacctgaaaataatttaggacttaaagtgacagagaaccatccctcgccttccgccatgtaatgcctcatcccgaacccagcactaactgatgaaattacggaggctgttaaacatcaccaaagactatttggaggtcccagaacgctccagaattgctagcttttcctggatgcccttcttggttgcaaaatgaaaatttcagagtttcctgggttacttctggaatatatgttacctacaatacataaagagagtagaccttacagccacacaggccagacttaaatgagctatgtaaacctagtcgattttgtgagctatgtaaagtcagtcaattttgtgagctatgtaaagccagtcaattcgtgtgtgaatttttgggagctatgtaaagccagtcaattcacgtgtcctgtctgaactgtagaatagttgctagattgtgtataaacaagcaatgagatctctgcttctcttgttcaccatcagagtctatcatctaaaatagggcctgtagagaaaagaatacaatagccatctaaggagttaaatacctacctgcaggggttgtgatgatggctgaattagataacatatttaagactttgtgttgtaccaggtaaaaactagttgctcaattagcgtcatttcctctctcccctacttcctccatgctataacatctaaatttatatcctttatccagtgtgtctctttatacacaggctcaatgttaactaaatttatctttttggtgtgttcttcttggtgaacatcagtatatgtgtaatagaagtgcagcttccagaagactgttgcctcatttactggtagctacagcatgccaggcaccagatctagagggttagagagatcaacagagcataagtattgaccttgaacagctgacaactaaatgggaatgattgtccattctatttccatgtgttgtttgcattaaaggaatatccaagttctaatgagcccacaggggatggagagacccggcacagctcggaaggtcaagaaggcctcagagttagcttttgagatgagccttgaagctgcataaatttttccaagtgcctaacaggtcactagccttccaacacaccatgtagcacctgaagagacaagaagagagaaatgagcatgtcttcagaactgcactgtgaacttctaggtgcttgatacatgaagacagtgacaatgttaagtgccattttccagacgctcccatgggtaaaacttctgtaactaagcaatcttttcttctcttagctgctgacatctcagaaatgtggcgacatcttgaggttttcttctatgaacttctgtgaaaccttatgctgcctttggtgacacagaaccctaacctatcctttcctcaaattcccagctgacccaaatgtaccccctattttagcacccacatttatcagctccctctacttctcacaatcccccctacttccactagtgagttagttcaagagcctaagtgtctccaggtagcagagacattcagagcacaccattgtctatatcaatgcaggatttcctgaaaaccagggagggagggaaggaagaaagagcctctgggtgaggaggtgtgcagcctggctctttgtcaagtctttgtcccacgtgagagtcggtgctaatttccc

SEQ ID NO: 1884458 - DNA, 4001 bp, Homo sapiens
ctgattacttaatcttttatctaaaacaaaccatactaatttgtacaaatacctttaattctgtgtgaaattatttttatattctttatttaagaaaatgtgatgttgtatctctgtcttaaatcatcaaaaatataatgacagaaaaattaaaagaaagaataacagaggaaacatatggataacacttgaattaattcaccattccagtgtcaggaagatagtttctgcaaacatttaaaaaatctatgtattctgacgagttgatgtcttgtgatggttttacaagaagaatcaaatataaatatcatgttgtaaaagattaatatgcatgcatctgctttaaatagaacaaggctaaagaacattttgttcttgttactgcttctcaataagtttggtagttcagtttaactcaggtaagctttctaaatgtctagcatcttgtccaagctcataacaaagatgttcaaatgccttggcaccctcctattattattccttcctgctctcctcataaccttttattttctcatttttcatttaaccattcctggacctcactctcatcttgcaatatctaataagcctttactaaggactgaacatgtgagggccagatttgtgaactggacttttctctctgtagatttttcaattaggttttcacaatgccctagtttcactgagtcagtaaaactcccagatgtttccattctttatgtatctctccttgtatccctcatctctgtcataattttagagaccctcttgacatttaaaaaatttggaaacaacagtttcttatttctgcctaagaagacttaagatatttctgtaaagatttggttggacacatatagacatttattccaaattaaatcagtggtcttcttcagattgagttccaagctgtaaacttcaaaggataagttctgctttactaactgtaatgccaaaccaattattttataaaaacaattaaattgtcatgaacataagatttcatatcctgaaagaataggaataagttctattttcacaattagttttctatgtatagtcctcaaccacaatgcctgtgaaccaccatcctgggaaataaacttttcttgagatctcaaagcaaatgaagacaagtaaccagcatggcacaaatgcttctctgctactacgtggattcttttatagacactgattatatattaagatattaattttatccatttacactcatcaaaaaagaaatatatggtccacatacttaaattcaacttctttcttagaggcaatggactaagtacaatcacaagcaatagacaaacatcataactttaatttttggctgtaaaaatggaataaaaacagtaattgtattcatcatcgcttgatgaagtctttaaaatgttacttttattctaggaagaatgtaggcaacctctaaagggttgatgtggcaagaaagacactgatattttttctgggaaaaaaataccttggctctgaacgaaaaagaatattgctgaaattatagttaggagcctagttctcctattgttagagctcttttaggacattttatgatattttctacaagcacaggactgtggctatttagcttggtttctattatgcctttcttggcatcatgtaggataactagcacatcttataggacaccagtgaaagacaaaatagacaacacaaaaatcgtatggcattcctcaaactgttttatgtgaaaaagaaaggctgtcttatactattcaaatccctagacgaatatgtcaaaataagagtacgagaggaaggggttatttcaaggatatcccacatatagacaacatggtgcattgtgacatcgttatataaatattaatagtgccagaatactaatcccttcatcggggaggaaatattctaaattcacttacctcttgcagcactttcctacatagtactgtagacacagcccattggcatcctagagatggcattctgaagagaaagcaggatctcaactcctctcaaggtgttcctccctcccttgaaggtcaggatgtcttgtgctggcacatcctttggtgggtcagtagatggcagtgtgtctgaatctagtatgtatggtaggggaaagctttttagcatttcccaagaaaatgaaggttttgaaagctgtgaggcagcatggggcctagtgcatgggccagaagacttgatctttatttctggctcaactcctgaatacatttacttgagtaaatggacaccagccacttaacttttgtgttctttgctttcttgaacttgaaattagacaaaatactctgcctcttcccatctccctcacaaggaccctgtgagtttaatcagacttcagattagtttccgttctttgaagaaaagactccttatgaatttgctatgctatttataatgtcagtggcaaaattgatctgggttgttcttctgggacttgaagtaaataaacacagaggcatttggcaagaaggatcttctgtatttctgtgccataaaatgttggtgtattttggttttaagtagcagcactggatctcaggatgcaaaattattcttgttacttggaattaaaataacttcctccattccatggaacttgacaattacggaaggaagccaataggcctctggcaccttcccaatttaaatttaaactgttcactgcaagtacagattcaatcagatacaatcattttcacttttccctgctattaaacataagaattttcacttcagcattttactacaaaggtggcactctgataaatgttaaatgaaatggtaagtaggaaataccattgaagggttgaaagatgattctttttcccaacaagatccagctgtgcatgaattcactggaagttagaatagttagaatcctcaaccaaaacataccttcagctgcatggcaccaaaatgggtcatgacaagatcatgttggggcaaaacaaactttaacatctcacctgtcaacctggctctggtcacgatcaaagctaagcttctttgaagaagccttgctactttgaggctggtaacaaggatcaaaaagggatacaataaataatactatttctggacaggtagattctgatagggaggtctagcgtatttctaatacagatgcctacctcatctggtcttcttggaaacaaaaaattatattgtgtaggatagccagaaatctacctgctatataaaaagataaaattgtaaaatgaaatggatgtcatgtttgaacacatgccataccatcatttttaggtagcagcctttcaggatatagacaaatatatttgggatggtttctgggtgtataatccattggaaaagctattttaatataaaaattcactgtcaaaatattaataaacaactagtcttttttcaaatctcttgtgcaataaacatagattcaagacaagtgatttttgtcgtgtcatcttatttgtaagacatgtctctctagttggatagtgattggcttgttggtttgaacgtcaggaggttaaaatcttaatttaaatatgcattagtattaaaatatgttcaagagaatgtcacatcaacctcaacctcaaagtaccaattatgttgtttgggttccacatttgacactgttctgactaaactgatatcccccgttcagaatttctaaaaatgcctcagatctcagtttcataatacattctatgtaaagtagaaacattaagaaaaactgaattatagaaacataatttcatagtttcaaggacatagaagtcaaagcatactgcttgaagctaatgaacaattataaagatgtagaagccagcacattattagcattaggttagaagaaatagacaattctgtaaccactcaacaggatggattcaaaacaaagaaattgttaagtttggagtttaattataaacactaatttgtaacttggatgagaacagtaactgtttttaatc

SEQ ID NO: 1884459 - DNA, 4001 bp, Homo sapiens
catttaagatcagaggatcaaagaagcctgacctaaagatggagagagtgcagccgggtacagtggctcatgcctgtaatcccagcactttgggacaccaaggagggcaggtcacctgaggtcaggagttccagaccagcctggccaacatggagaaaccccgtctctactaaaaatacaaaaattagccgggcgtggtggcacacacctgtaattccagctactcgggaggctgagacaggagaaacacttgaacctgggagacagaggttgcagtgaggtgagatggcgccactgcactccagcctgggcaacagagcaagactctgtctcaatgaaataaaataaaataaaattaaattaaattaaaataaaataaaataaaataaaataaataaaataaaataaaataaaataaaataaagatggagaggatgggagggtaagagcagggaacaagaagacattggtacatctgggattgccccttcaaaccatgccttcagctcctgcagtgtgcctggcacagagctaaaggccatcacaatgaattcaattcaaccctggcccttaaagcactcagcagccagatgggagattcccagctgccacaaactaaatctgatagcgtgttccccagtttaaaaccctcctagcagctaccgggcatgattcacgaatctgcagacctctcctttcctcaagtcttaggctcaggctaaaccagtcaaccctttgtgggccccctactcacctgactattgcttaccttcattcctttgctcgtgctgaccctctaccttaaatccagtctcttttatgtctctgccctccagcacttaccttggtctgatagatgactcaccgagaccctgtgttcgcttccctgaagcctttacaccaaccccaccccgggctaaactgggcactttttctgtgacccaccaaacccacacaatcccatattaaatatttgtttacgacatccgtttctatgtctgtcttcccccacccttcaactagattgagttccttcaggacaatgatgatgtctctgtatccccaagccaggcactgtgttttgacacaaagaaagcccaggttacatttgttaaatgtaaaagaccatacagtgagtgggtgagtgttcatgacaatgccagatctgactacttccgcgagaaaccgagacactccagggccggattccagacagtgggaatatggcgctgtctttgccccttctccagtgaggaaccagaatttacgtgttatcagaaacagccacttcccctctgctcctgcccgcctagagggctgggcaaagggtagagggagcagtgtccggccagggtctggggagaattcggctctccttagtgggaaactctgtctgtcttcctcccccagggggaggggatggggataggaggaccagagtaaggggaagagggaaggcccggagggcgcagtcgccttggcagaaatcctaccacacccggatgtagtgggtggtgaacgggatggggcggagagtccctgccctgccagggacactgactggacgatccactttcgcgggaatcccacaaatctctcaaaactaaggtcctggaaactggaggagagctcgttttcaggctatgtttgggcaagggcggggcgcggggtgcttcaatttttggaaaaggaacccccgaagggagcagggattagaaaagaaactctaccagaaacctcagtgggcccgtctcacccactcatgcccaccactgacttctctggcagctccccgtcgccccgcgcaccgctgcctctccgtggaacgtccaagtggtgcagaggagagggatctccggagactgggttctgttgcgagctatgccacgttccgtcccgggcggaactcttctttgggcctttgtttcctcgtctgtgaaatggggccagggtgggagcagagggcttgcagaagccctgccagctcccacgctgctagccgggattctccatcccgccctctcctccaccgccgcccccggcccggtcctaactccacccccacccgccgcgcctcggcgccgccggccgctaggggtcactgcctgcctttgtcagcggaggaggagggcagcccgcgctccagccggctccccagctggaaggcggccgaggggtagctcccgagcgagggtcctgagccggaccccgcagcccgcgctcgcgatccgcctctgcttcggtcgggaaggcgcgtgcgctcgggctccgaccgggccccggcgggcgcgcatcgaggccaggagggggttaacgctaacccctcccctctggctgacatcacgggcgagcgggtgagaggctggagctcggcgagtgagagaaagagagcgagagcagcgagcgcggctccacattgttgcggatcgccggcacccggcagagcggcggcggctgggacgcgcggcgcctccgacccgttctcctcgcgcccggccgcgcagccagagccacccgggccgccgaccgccgagccccgcgcccgccgcctgggccccgagccttctgcgccgcccgggtgcgtcccgccaccctcggaggacggccggccatggacgcctgcaagttggagccgagcgggagggtgtgagcgggccggggccaggagcccgcgccgcgcaaccgggcagccgggcgcgccgggggtgggtccctctccccagccccgctctgcgtggaagaagagggcggggaccggcgccgggaggagagcggaggaggcgaaggggcatgactcgtgcaacttgcggcgggcatctgccgagcctctgagccggcggcggcccggggcccggactgcggccgcgcggatcccacccagcccaccccgccccggccgacggctgcagctgacctggatccttcgagcgcccgccgaccgccagcgatcttccctcatcttccgggctggtttctgctgcgcgaggagcgctgccctcgccgcccctctcgccggacccccggcccccgatggctcggatggggcttgcgggcgccgctggacgctggtggggactcgctctcggcttgaccgcattcttcctcccaggtaagagcgctcacctctgctgtccccacccccatccaatgcctccccggggctgggagccggatggcgggcacgactggattgtggggagtgaaaggagccagaaaagttgggtcacggcttgggtaaagggggtgggaggtggcacggcggagaaagaggttgagaagccgaaccgcctgccctgcagggaagcagtcagatgcacgtctctatgtagcatgaaagcactttctccgctcagttctttacaaaaaataataatatgtaatagcgttctgtttatttaataaccagctctctgctcgggaagcagtttggaaacactgcgtgttacataaatgcaaaataatcaccgtaatcaccgtcttggggtgggagacaacagccccagggggagggcgtcagtctcggagctgcgggtttggagtatggcgggggggcttcgtctctttcggcggcccctttgccagacggctcaggacgctcgggccccctcccgccccacaccgccccacagcgggcgcggagagtcggctgctgcggcagaggcggctcctcgctcacctgcggttcctttcctggagggtgaggccggggcagcctcctcccggcctggcgcgggaccgggctccccctcggaactctgctcccagctctgggggctctccctggaggagacaccgcgggcttcctgccatccaagtagctgcatgacccactttcccgagggtgccccgcgtgtccttcctcgaggtgcgggctgccggcagccgaggggttaacctcgcgcccgaccccggggtggccctggtggcccattctgacgggtggggtggggacggaggctgggaccagcccaggcatattgtgctggggaatgaactggaaa

SEQ ID NO: 1884460 - DNA, 4001 bp, Homo sapiens
ttcagggctgcagtagctataatgatgcccctgcacttcagcctgggtgacagagcaagaccctgctcataaaaagattttttaaataaattagaaaaaagaaaaaaagcccagtgagttctgggttccatagactgactatagggattaggtctggactcactcaaggtgagatgaaactattttctgagcaaaatgcagcaggatagaaggaaaagagctgtagctttggaattgaggattctgggtggtggtgattatactgttaataatgataacatagtcctaactatgagccagacactattccaggcactttacatatgttaattcatttatccttataatgtctctatgaagtagtgactactaattgttgatttatgaagattgcagagcaattctggacttggttctactcttactaattgagtgaaccgagggcaagatgcttagccttcctgagccccagcctcctcctttgtgaaatggagaagataccttttgcatttaatcctattgggcttattggtagactcaaatgagataatacgtgaaagtgtttttgaaaagtataaagtactctaaagtactttgcattggggaagaagggaaacttgcaaagtaattgtagtttagatactgggctcatacttaatgcagatgctgctctgagcatgggccacagttgcccttcacagctacacaaggtgggctactggcagtctctttgattaaatgccaggatttgagctgctgttaaaaaaatcaagaaatctttttttgcccctttctttcttttttatgttttgtagagatggagcctcactatgttacccaggctggtcttgaactcctgggttcaggtgatctgcctgccttggcctcccacagtgctgagactacagtcatgagccaccgcacttggcccaagaaatgagttttattggggccaaatgtatatgtgaaatgtcataagggacagattttttgtgctaaaccagtccttctttcccagccaggggaacagtggtaaagctgggtggtaggcatttgcatgggggaggattaggatcagtgtggccactgcaacaggtggcaaaaaggctggctcagagcggaggcacagcagctgactgcagggtcccatgagcagcaggtgtgtgaccccttttttctaagacgagacgcttatgggagtttttagaagttgctttatgaccaggcgcagtggttcacacctgtaatcccagcactttgggaggccgaggcgggtggatcagttgaggtcaggagttcgataccagcctggccaacatagtgaaactccgtctctactaaaaatacaaaaattgtctgggagtggtggtatgcctcccatacctgaggcatgggagcctgtcatcccagctactcaggaggctgaggcacgagaatcacttgaacctgggaagcagaggttgcggggagctgagatcgcaccactgcactccagcctaggtgacaaagtgagactcttgtctcaaaaaaaaaaaaaaagaagttgctttacgttgctgttaccttggcagtggagactgtgtccctcaaagtggttctctgctggcactagatacacaaatgtgtcagcacttgggcttggcaggcattgctgagtcaggcagtgagtgataagggagatgaaggggacatagggggagtgcctccaagagcagcaaggaggggcagtgtggcccttctaagccacattactacagtattctctggagcttcttagagccaagtggcttcttccatgaggttcctgcaggcctgagagttgcctggattgaccatgatgcctgagtgtataattataggtcactgaacagaacccctagtcagctacatccctcaaaaatgcctaattgtaggctacaaatatgaaaatatacaagagcttagaaacatgtcatacctcattacaaagagcaatggcatgagtcagctgtgacttgggtggctttagtgtgcttggtgagcatgctgactagtccagaagagggcaggaggcacattccccaagcttcctacagggagattgaggactttgggaaaagggagaaagtataagctgtgaccatagcctgctagtcacatctactaaaggggtctgctcacctgatggtagatttgattcctctttgggaattgtttcctgaccagtttacaaaccacattagaaaatagcacatttggccaggcacggttgctcatacctgtaatgccagtgttttgggaggcaggaggatcacttaaggccaggagtttgagaccagcctgggcaaaatagcaaaacccgtatctctacaaaaaatttaaaaacttagctggctatggttacatgcacctgtagtcccagccactctggaggctgaggcaagaggatcacttgagcccaagttttaggctgcagtgagctattactatatcactgtactccagcctgggagacagagcaagacctaatctctaaataataaataaataaataaattaaagatccttgagggaagtgaggtcatatgtaataccttatattacctaactgggccatacagattttattgctgggttgagggagcccactctgtctcagggtggggaggggtacttggataagtgcccagcctggttgctctcgtccggtctggcagtgctttctcaccgagaggcctctcccagctcagaaagaaggaacagctcgatctagatctctttcttttgtccctccctgttctcccaactccccttggtatagatgagtctatacacacccttgctgccagtggcttgccattccttttctgagtcactgcccttcattaccagatctctagtggtgatagtagaagggagggttaatctgtggcccttggggtactctttcctctcagttttaaactttttagtcaactctaagaatctaggaatctcagtattgaaagcgaccttaggtgccacccatgcccatctcaaaggcgagggggtagactaatcttatctacctttactgtggtattcccagcatgtaactgagtggagtgtggtaggaggtgcaaaaaatacttgcggaatgagtgagtccctgtaaatagcagcagcttcacaagaccactgtcattgcctcatttgttcatttttttgacgaatattagtaagctccaattatgtgccagttccttttaagttctggaatactgtgatgaacaacacagtccttgtcctctggaacgtattctgtaattgagaaataaggaattaaaaagaattgatagtctccaaatggaatttaagaattaaaacttcttcttcattttggcctctcagggtctctcattttctgaggtctccttgggggaccctagaaaacacatctaatccctttttcacacgagagcctttccgaattcccaagccaatgatcaccctccccgctccacagccttctcttctccagggtaaacattctcagttccttccgtcatttctcctgtgacatgcttctgagtgccctctccatcctggtcactgtccttaggactcagtccaaactgatagtctgtccctctgccagttgggagtccacaacagaataccacctcccacgcattaatttccagggagtgttccagcctggagcctctccttactctgggctcaggcgataggtgagggaaagagaaggtcctggacttggccagactgagatcatcttcatatttggccaatcctggaattcgaaattcttttcttttgtctcctccctgcctccccaccatccttcccttggtatagacgaatctacacacagccttgctgccagaggcttgcctttccttttctgagtcactgcccttcattaccagggaaattagcatgaaaaagcgaattccagttctataactgtattctattcttgtcctctgtcacattctccaacccagcacccccacctaaaa

SEQ ID NO: 1884461 - DNA, 4001 bp, Homo sapiens
ttttaaattagagtttgtttgtatacatataaatatttccagctaatagaagatataaatgaagtattctctattctagttttaatatttagctgttaattctctaattttaatctgtattgattactgtatagctttcaaaaactctcctttttactgtggacatttgcctatatgcatatgatctccattataatgcaatattcattccagctcaaaattcacaaacctgagaacaaatgctaagcctgtactcctgtacttggtagtctttgtatgcaatgtattgtaaagctctctatatgcaatgctgtatgttttcttttgaacaattttttattaaagattttaccattgctaagtctatgaaaaataacaattgttatttattttcattttggtaagtgaaaagagggggcacaaagccttcaagtgactcattttctactctaaaatctttagaaagctccctccagagtttttacatacaagtgtttgtgttcactgagatgatttatgtactcaactcattaaagtattttaaaaggatcctcagcaaggttagcattaaaaaagaaattaattcagtgctgagaatataaatagaatactgtaatcataccaaataatagaaatcagctctttcttatccaacataaacttctttcaaggaaaaaaaatcaaccagcttccataattacatttttattgtgtttttcatttacaccatatttctctgttaggtaagcttgtcattgcaggcagctctaccttatgtattgaaattaaaatcaaatagactcaaggttctatgatttttttttgttctgtaactaaacaaaaaaatatttaaaatctgtttcttaagaaaaaataaaattatttgatagtctaggaatattgccatacttcaaataatgagtaaaatttttaaaaagtgtttatatgccagacatggtacaggatgttttataataattatcaaatttaattttcaaaacaattctgtgatgtatacatattttaagtatcttaattttgctacaatcaaaaattctaacataaagagatttatagcaaaaggttcaccattagctctcaaatgtagacttctgagaagaaaatgtagctgcagtttgaagcagtaaattcatctttcttctctaaatgccatattgccaatctcatgataaaacagttcttctctactcaataacttttgataacaactcctagtgctgcatactttgtttgtgtacagagaaagaaattttttccaacattccaattgtttttacatttattctatttgaattggtttgatggggtcccaaccctaacaccatcattttacccaaaagaatggaatatgataattggttaagtcaataagggcttagattaggcggtttgaagaatgggatgttacctaaacaaaattcaggtactattagttgaggagaattataaaatagctgatagattagtagataagaaatgcccactagaatattataatctacatttaataaatgaaaaaagtcaggttcaaaaaattaatttacttaacaattattgcccagaatgaagctacctccactttgatgttttgcgtaacctcaagcccataacccccaatcccatgaaaaaagactggatttaaacactgctgtgaatagtacatgccatatcattgtataggtacttggtttgtccattataacataccagatttgttaactgactttatatgaaatatgtatctatctttaaaaaaatcaatggaattattttaattttggattttctaatgaaaacaaaaataatttgacaagtaaaaaaatatgcatctatggtatgcaatggattacatccagattattaaactgttaacctaaagataggcatatataaagtaatgcggtagctggtttccaatgacagtgtctaaaaatttttctcttacctttatgttcatactacatgtcaagaggtagaacatatctaccctccccttgattgtgggctgtcctcggatgtaaccaataagatgaggcaaaagtgacattctagaaccccaggctttaagataacagacagcatccactttctgttctttaatgagtagtcataatatgagaagcccaagccacatggggagaccacatggagaactaacttgcctctgtcaatcccatatgatctccctgccaagtgccagcatcaaatgccaaccatgtgagtgagccaagtcggacattccaggccaattttagattggcccaatagcctgacatttacagccattcaacaatggcccagcaagtatcacgtagagagaaaaaaactgagcccaatcatttcatggaaaaataagagataatcagatagctgttttaggtgtttaaattttgatatggcttataatgcagcaatataaaagaaaaaaggtcaatatctgtaaaggtttcttaagttacaatccctgctcattagtccatcagtaaagccctcaggtaaaattcacatctttgtgtctggaccccattcttttatccgaggagtactgttctgcttcctactgtattaatccacagcctagtttggcctgcactttctagacccagaatcagcgtgaaaattataaaaagtcctcagtctcttagagctggacaaagttcagagtttaaaggacaactacatttatattattgtattcatagctatctttatctcttttgttacctggacagattcatgcagaacttattcaagaaaagcaaacccttctccatatgcattttggaaaatcacttgcagccattgcttagaatttttaatttattttgagctcgggtttctctctgattgaaagtttatataacaaactcgacttctgagattaagagatgagattctaaggcaagaatcatttagaagatactcctttattcaagaaaaacaactgattgttactttttatataatactataatcactctccctttccctctcttcaccactttatattcagaaagtttgcttataactatgttatatccattttggggaggtctatactagcagagagagttttcccaaaatttttgactgagtaaattcattaatatcaagtacttacagattatatgatttcacttttttcatctttagtttttctgacctatatgaggccaataaagagcctagaactcagaactgaatttggagaaaagacgttaggtatgatggtctgaaagacatcagcagtagctgacgtgggatttaccatttttagtattcaatatatattttaatgtaatgtgccatctgtagtgcaccatagaaatgcaaatctcaaatcatatttttccagtaagtttgctttttttcattgcatggacagagaaaacttttaagaaatttaccatagctaagttagattagaatgagtaagtgttggacacttacaattagtctgttggacagactaatttttcaacaggcatatgatactctactgtcttatacagtgcccatcttttctctaggccaaacataattttggactcccattgattaagatcctctgattcaatttaaggcaaatttattgattggcatagtcaacaagttttcatatgaacaaaatgtatacagcaaataataggggaccccaaactggcataaagcatttcaaatgttattgaattttgatttaaatataaaattaaataaagaaatttaagattttttctatcttgctgctcatggttattttataatatttacactgaaatttatccaaatttagcctttagaatatacaatgctctaatattgatgttattagctactcataggaagtgttaaatatattgtattctaacaaataataaaggcaaaaaatcaatacctgcttcaggaagcattttgtttttaacatgatatgtttgaaaataaatagcatagagggcatctgactgtatgttagcccgagg

SEQ ID NO: 1884462 - DNA, 4001 bp, Homo sapiens
tggtgttactgctccttcccactttagctcagcattatacacacaaaacgggtgggtgcggagccctttcaccaggaactgggttgcaaagtctgttagtggaaaaaaaagcaacacccttcttgagcccgtaatttatcagattttttttcctgtggcgatacagaggccccttcaccccagcaaccaagaggctacagctggatatgtgcttatgagatgggtcatagttaagagctgccagcctggggtctgtttctgggacatttccaccttagattagacaggcattggagtcaggagctagctggttactgtagcaacaggccttcaaagcttcacatttcaaatggaagctgctacgctatgaaacttgctcaggacaccctttttctcagtttgaggttaagtactcctccgcccccaaccccccgaccacaccccatgcccagtatactcttagagcagagaggaggtctggaggagacaagggcctaaggcttcacccttgctcacttggaactaggcattcttgctgtcatctggtttagtcaagggggttgtgaggcgtgtgggctccattgtgagtgtaggaaagatggaaagaaaattgccagatggggatgaggattccaagcctatcaggaggaaagaaatatgttactcactgccacaagaaggttgccaacgtcatttatggatcagcaactgcttgtaggcaaagtctgttacatgcctgtcactgggctatgcacccgaggatggaggcactagctgaggcttacgagttagaatagataaggtgaaaattgtctgccatggtatatgctggaaaaactctgggaaacaagacaatctgcctccaagggattaacagcccagtagggaagacagaccaacaggcaaaccctaagggcgggttagaaagaagcttgactagtgtaggtgcttcaaaatgaagacagctgtgtatgtctcagtcaagctgtgcgggtccagccaatttaagataaactctgtttaattacattttacgttttaaaaggaaacttcttcattacattgcctatcagtgcagttaagtaaaaaggcacatggaactatatgaacagatgccattaacaggtttttgcttttacatgtcatctttcccatttgagcattaattactcagtattttctcatcagttttcagaaagtttttcgaggataaacttgtagagggatttggggagaggaagctttattgggatctctaggggctattttatattttccaatgtctgaactgtttttacaacagattttccacagaaagctcaacaagtcactaaactttctgagtctcagaatctgggacttaaaatcaggggaagagatgtgaatggctaaactttctagttgtgtgaatagtttgcaacatataaagaattggtcaaaatgtttattcttagggtcggtagttattctgacttcacagaagggaatatctggccaactttcctcacagaatatcaattgtggaatcaagtatagggaatatcatgcatttaaggttcacatatagccttaagttgatgtccatattgatttaactatcaaaaaggcaattagattagtggggtagccaagtcacccacaaagactgatgagctgatatagaaaaaaaaaaaggaataaagaaaaagcaattgtgaagttccataagaataggagaaatgacagatatgaagagttttttgaagaaagtttcttctctgttgctatttagttttaacaaaggagtttcagaaatgaacatagagaagcaattgggtgaggctccctgctagatgaagaaaacttctatcacttgggaaaaatccacagaaatcctaatcctattaaaaacttaggtcattccaccccaacagtactctttcttccatgtccaaaaccatacgtggagcttgcttgtgtttcaatacaagctcttgcctcagtcctctccagattgctaaaaggaggtgtataaccctgctcttcagcagaaagaccgcaggtattcccgccgcatccacatatgcacacttacttcccttggatgtgtggcaacgagctctgctgctgcaagtgttatatgccatccgcaaacccacatgggtgcagggtgcacacctgaacagggggtagcctctgatgaaacatttgagtaatggatttctttacctcacctaaacagatccactgaaaaggaaactttttgggttcccacccacacgcaagatgtacaaagctgtctggggcaggtctggtacagactagccagtgccctccactggaataagtggttaatctcaaagaggtttacggtggtttctccacatatcttcacccttcaagcctttccataaaagtcaccagcaccctgtctctgggatgtggaaggttgggagaaaggaatcaacaaaatgaaagtaacagtatcaagatccagacttattcacaaattttgcctcttaaataaacataatctttaattaagtaaactttaatatttattttgtacctatcatgcactaggtatatacatatagttggggggggggcataaggacataataggactaaaaaagataaaagatatgttcgttgcccttgaagaattatagtctcttactgaggacttcatatacatgcacattgactagagaggcagtgtaaataactgaaaagaaagtgggaagagttttggctggtgcaatcagacagtgcttcttgaaaatggaacttgaattggtccttatgggcagaggtagcctacttgcccagctggagaagagaaggtaatctaccacgtggaaggaaggacatgaacaaaaaaatgaaagcaggaaggaacatgctggtttgggcagaataaaaaatccctagatttttttggaagtttctcgtctaacctcctgcctaaaccatctataatacattctgtccccaagaaaatgctctactgccaactaagcccatgtgattctcctagagatgcatgagtccttaatgaaagctgccctcactattcttgaaaaagccacttgcatttatagataacagagggtaaactttaaacacaactgcataaagtggcaaggaactggcctgccgtcagctcactgaatttggattccatgcaagcaggatgtgtaaaggaggtaaactccaaaagtgtttttcctcccttaataaggtctattcttcttggtgtcaaggtatgaaaagcagtatttcatatcaacgttcatggttaatctttttgatagttacaggagcaggatgattcttcacccaggggcacgggcaaaagggctgattacctatgctcacaagtcaccaaatccagttcaacacagtataaacaagccattgcttctgtcgacatttgagtccttttgtctgcaatcagggagttctgtgtttatctagctacatctttactctcatgggttaatcaaagtttctggaagtaatcacagccaactcttctttgcttataacagggtgcagcagtaacatggaacataaggtgggaaaaaagacaaaagtgtggatgattcatacattattcacaaacttaccttcttaatcactacaacactttaatattaaaattagcttacacttcctaaacaaacactgactggtgacaaagggattgggttaaaaggagcagataatgtcacttcaagaaatgttttctaagtttggatcttgattactgttaccttcgttttgtttttttaattctcccctcctaagcttccacatcccagagatggtgtgctgggggctttcacggaagcgcttgcaggtaaggcttggagaagtgaagacaggtggaaaaaccaggtttcatcaagctgttgaagagacatcaaagccaggagtaattctctgcatcctgtcacatgcttgtttctgcctccaagaaagcagagttaaaatggactttcagaccagagacaggt

SEQ ID NO: 1884463 - DNA, 4001 bp, Homo sapiens
gtcaggtgctgaagggacgttgtgagaagtgacctagaaggcaagaggtgagccctctgtcacgccaacataagggccgcttgagggctccttggtcaagcggtaacgccagtgcctgggaaggcacccgttacttagccgaccgtgaaagggagtctcctttccttggaggagtcagggaacactctgctccaccagcttcttgtgggaggctggatattctccaggcctggcctgcagtcatccggaggcctaaccccctccctgtggtgcttgaatgatcacactccttatccactttcatgctcctcccgtactcctggctcctctttgaagttcgtagtagatagcggtagaagaaatagtgaaagtcttaaagtctttgatcgttcttctaagtgcagagaagaaaatgctgacatatgctgccttctctctttgcttcggctgcctaagagggaagggccccctgtcctatgatcacgtgacttgcttcactttatcacttagaagattcaccctccttaccctgcccccttgtcttgtatgcaataaatatcagcgcacctaggcgctcagggccactaccggtctccacgtcttgatggtagtggtcccccggggcccagctgctctttatctcgtgtctttattacaatctctggtctctgcacacggggaggacacctgctaagcccccgtagggctggaccctacagaaaaccacacccctctcttgccctgctccttagttacctccacctttaccttcccctttgcagcaaattgacctgaaagagaagttggtgttcacagcccctgcgtgctctctgctcactctccaaactccagcccctggccccagcgccgctggccctcggtgagtcgcagtggcccaccctgctgcacccaggctccctcccccgcctgtgtgtgcacgccctctctggcttccagaagcccctctcctggtttgtcctccggcccccacccctagcaccccctgtgccccttcctagtctcctttgcagattccaaacctcttcaagttggagtcccagagttcaggcactggtccccagtcacaccccacatgcgattcccacatagttctcttcatccagtgcagcctctgcccactgcatctcctctgacacgtcccattcccccaagggcgctagataaaggggcacctgcggacacacacgctgaggctcctgggaaggaggaccgaccgcctgtgttcagcttagagcccccgacctccatctgtcgctgctcctcgggggctgctggtagttgtcataataaacacagacacccacgatgagacgtgaacacgctcctcagtgagcattcttgggcagtgcacaacctccccagccatgccagcccgcgctcaggcctcccccgtcttccccgtctctccggcgtcggttctcaagctcgtccttccccgcctcatttctccaaaagtccgcagcaaatcctggcaactccgccttcagcatctaccgggagccggcacttcccacacctgcgcagacccacccgggccccagcccaggcagcccctgcacggggagcccgcgggtctctggcgcccgctcgggacgcctccccagcgctccccgcagagcggccagggggtctcgcgagtccgcgccagctcgggatccccggagcctcccctggtgcgctgcagccacgcaggcctgcgtcccgaggcccacacggcttctgcgcggcatcctcaggacgacctggagccaaatccacacgggacggcacagcagcgtcctgccgagcccgcctcgtccgccagcgcgcacgattcaccgcgcctgctgcgggacgggcggacgcggggctgggctggaatagccggctcacggagggctccggcagtgtttgttcagaggagcgcggcgctggtagcaggcgacgccaggactcttctccccaggtgctcccgccgcgcgcggggctagggaggagctgcgggcggggttgcggcgtgggggcggggctgcgagggtgggggcggggctgcggagcagcgggcgtgaggcggggctgcgagggagggggcggggccgtgggcggccgtcccgaggcagggcggggctgcagacgtgggggcggagctgcgggcgcgaggcggggcggggctgcgggggtgggggcggggctacgtgcgtgggggcggggtggggctgcgggcccgaggagggacggggctgcgggcgtgggggcggagctgacgtacaggaagcagctcccattcgctctgggcggtgggcggagatccgggcggtaccagctgtcccggccgcgggggggacggcctggaccagcccatggtcgcgggttaaacagtacgagctcttccaggatattggtctccccgggcggcagtcctgcattaaagagtgtttccaaggtggaagggaggccgtttgaacgcctcgagacccccggctgcaaggagtggcaccttcctcacttcagtcatttctttcccgctctggtctcagtggttccagtcagcgagcaggacagaggagcccggaagaggcgccgtgcacttccgggtcgaagagcgcacggcggcggcagaggcggcggcggccgggcctaggagcgactctcggtcgtgcagcggcggcgagcgctcgcgagcggctgcgggacgcgaggtttccgggtaagtgcggcggccgcgccggccctgggggccctgctcctccgggccgcgggccgcctgtgggcgccacgcgctttgtctgcggcctgcaccgcggggcgaggcctgcgccgcgctggccgcgggccgggagggcgggcgggcgcgcgcgcgctgggaggccccgccgagactgggaggccccgccgagactgggaggccccgccgagactgggaggccccgccgagactgggaggccccgccgagactgggaggccccgccgagactgggaggccccgccgagactgggaggccccgccgagactgggaggccccgccgagactgggaggcccgtggcctgcgggcggacgtcctgggcttgcgaggacgcggcgagagcccactcgcctcgctctgtggcacccacgcccatgccccctgcgagtccgccctgccgcgtttgggagagagctgtgacttcgttgccttgtgtccggcccctgtgcatggttgccgtcgtgggcttctggccttgtctgcatgtccacaggcctgtgtggctggcggttttcctattccttaactcttgcagtcctcacaagagcctctcaggtgtaggtattgttcccgttttacagaggaggggattggagcccagaaaggctaagtaactggccagcgccggcagccggggatccgcgccagccccgactcctaccatgctccttttgacggggcttgtgttgccccttcttcggagtttatgtgctttacttgtttcgacaacagcagaacagcagtcagctgggtgaaccacgttctggccagtggtcaatggacaggctctgaggccgagctgaggtttgacttcgggtttggcatagttgatctctctcctggaccatccggttttctttcttattggaagaatgttaagtcagagtgctagtggatggatggcacctcagcatcatggccatgacaagcctggccttggccctcagcagggctgtgtttatctcaggcccgcggagacctttgtgcgtgcctgactttttgacttccattgcagttgacaattttgagttctcctagctgatacagcagatggtgaatacaagaataaaagtcggcctgagttgaggtgttggacttggctgcaggcttgttcagtgcctgggatgggcactcaggtgccgagactggcgtggaacggggttgcaggcaccccggacaccagaggcccttttcattccttagtaacagttgggactgccaatgcattggttcccctgaatttgaaaagagagag

SEQ ID NO: 1884464 - DNA, 4001 bp, Homo sapiens
gacatgacaccttggactacggtggggacccaagggtacactagggggcacaccacctgtggacacaggtgcacacacacgcattagacttgccgccagcgtgagggccaagcctggcttccagcttcctcctccatactgctgttctaacttgggggaggggaagaggaatggggagggggctgctgcagactcagccctgcacctgtggctggtccagctcagctccatcagggacaccttggggccagtgcaggtggggctgggcaagcaggtagacctgctccaacctgcccctcctgctcccgggtttgaggcccacagtgtgtgtctgtgggggacaagatcctgtgcagatccagaaagctctccaagcggctaggcccagcctgtggtgtgaccgcaggcctgcgaggcttcagacacctccatccactaacacccccacccacctaacactggacactcactcagctccgtcctctgctccctaacccaactctcggccttgcctgtaccaggagctcccagctcccacttcccctgtggtgggagggctctgtgtcaggtgaggcagggtgcactgcttgtctgacgggggtcagggacccttctccaggctgggccagggggagccagaggccagtggcttttttttttttttgagaaggagtctcaatctgtcgcccaggctggagtgcagtggcgcaatcttggttcattgcaacctctgcccccgctgggttcacgtgattctcccgcctcagcctcccaagtagcttggatgacaggtgctgccactgctaatttttgtatttttcttagtagagacggggtttcaccatcttggccaggctggtcttgaactcctgacctcgtgatccacccgcctgggcctcccaaagtgttgggataacaagcgtgagccaccgcgcccggcggaggccagtggttttcagggggtgtgacccacagaattcctcaccttggctgttcccaaccatgacggttcccctggttggagcagaggcttggtgggaccttcatactggcagcagggggccagggacctgggcggcccgctcgcctgctggctctgtctcaagcgcccttttggcctcaaagggtgcctgcctgtctgccaaccactccacgtggtctcaccccctccaactacagtctaaggaaaaactgcttcaggccaggcgcggtggctcacgcctgtagtcctcgcactttgggaggccaaggcaggcagatcgctttagatcaggagttcgagaccagcttggacaacacagtgagaccccctctctacccaaaacacaaaaaaattagctgggcgtggtggagtgtgcacctggggtcccggttgctcaacaggctgaggtgggaggatcgcttgaacacggtaggcagacgctgtagtgagccgagatcacgccactgcactccagaggccctgtctcaaaaaaaaaaaaaaaaaaagaaaaactgcttcaattctcctcaccaaagccagcacgcccgaggtgtccccatctcaggaagtgacactccgtcctcccaggagctcagcccgacgccccacaaccctgcaggcctccccgcgacgcccccgtcctgggccggcggagcccaccccgcctcctggaccccgccgtccccctcctagtctccggggacacccggagcttctgaccccgcagccccccggtctcccctgctcctcgggtgtggccaccggaacaccacgggcaccttcgcgccccgacaccgccgcctggctctgctgatgcccgcgcccccaccccaggccaagagccctaccccgcgcgcgctcagactgcgcatgcggccggggaggaccctcgcgaccctacctattggcccctgccaggctcggatgccgaacccgccggggccaaagcaggcgcgacctgcgaccgcccgggcgcgcggagcggcgggcagcccagccgacccggaccgggtacgaacgcgcaggcgcccagtcccacccggctccgcccccggccgccagggcacgtgacccgcgaactcccgggcgcgcccagacgccgcgcacgcgcagacccagcgccgagcccgagccatggcgtccgagcggctccctaacaggcccgcctgtctgctcgtggccagcggcgccgccgaaggtgaggcccggcggccggggccagtgtccgaagagcgtccgcgagggggctgcccggggcgggaggttcgggacacggtgggcgcgcgtcacgtggcgccggaggccgaggccgctgggggcgccgggcaggggccgggggagggcggagcggggtcggtgtcgggatggagctcggggcggggacgggggcgggggtggggtcgcgggttggtgggatggagctcggggcggggtcggggggtcgtgatggatcccggcgccgcgtcgctcctccgagtctcgtctgcccggcgaggcggcccgggcccgacgtttctagcggagggagccgcgtgcctgggcctggtctctgaggccgctgcgctgcgagaggggagcccgggtgtggggaggggccattccgggagttgacccagctctgaggtcgggcggccgcggggaccctgaccttctgagccaccggcttctgaggagacccggagccccctcctggagaaggcgccccgcggcccccgtcctggggcaagggtaccagggcagtactggcctggggctcacgcgggtcggagcgcagcggggtgcgtcccctggcgctgagcctgcagggtctcagggcagcaggggagggatgagcagcggagcacgagggtgcctggccttgttctgagccttttggagagggaagtgagcagcccaaggtcaccgcaccacggagaggtgggggccggggttgcgacccaggggtctgcctcttgaagtctgtagctcctcaagtgtggacggggagatggggctgtggggttgtggcgtcacgatgtgctgagctccaggggtcctgagtgatgcccccagactgcgggtgggaggagcctcgagtggggttcagtcctgggggggtgggttggggcttgtttccagagcaggtaggcgtgaggaggtccggcatgttgaggacgtggggtcttagcgccagcaggctgggggcagcacttcaggaggccggaagggcgggcagctgggggaacagagcctgcggcagtctactgggcactttgtttttcctcgataagtggacattttacagtgaatatgtattaacttatataagaatgaagagtctgggcgcagtggctcacgcctgtaatcccagcactttgggaggctgaggcgggcggatcacgaggtcaagagatcgagaccattctggctaaaacagtgaaactccgtctctactaaaagtacaaaaattagctgggcgtggtggcaccctcctgtagtcccagctactcgggaggctgaggcaggagaattgcttgagcctggaaggtggaggttgcagtgagccgagatcgcaccactgcactccagcctggcgacagaccgagactccgtctcaaaaaaaaaaaaaaaaaaaaaaaaagaatgaagataaaaatgaagctgagggattgggccccagagttaaaataaatgtagagagatacagctcacgctactttggaataaacttgtaagtgctctccggcaggcagggtgggcggggctgtgtccttcccctggtaggacagaggcccccagagccttctggattgggtgtggtgtgttgagtttcttttttaaaagttttttgaggggccgaaggatgctaggaagagctggcgggggaggggtataatcccagaacccttgtgaggaaagggtccctctgagcggcttccctggaaggggtgagggggggccaggacacttctgcgttctccatggtgcctgagggcctgagtccctggtggttcagtgagaggatgagctgaactctgtg

SEQ ID NO: 1884465 - DNA, 4001 bp, Homo sapiens
tgacctcgtgatctacccaccttggcctcccaaaatgcttggattacaggcatgaaccaccgcgcccggcaggtcattttacttctgtctcaattttttcatccctaaaatgggactagtgatcactctgtgctgggcttggggtgagagttcattagaataatgggtgtgaaatgtctgacacagatcctaacacagagcagggcataggctcttggtggctctcctttctagaagagacctacagaacggggtcgggactggtggtacctagacacatccactgagtcagcaaaagcaaggtgtaagaacaccaccagccttgaggggcctgggcagagcaacacatgtgtggtgagggcagccagagatgcagagcatggatgcagggcctctgacgtgggaggtggcatctggggtccagatgcaggattgggaagaaaggggtgaacacttacggggccatctaatcctcacaatgaccctgagaaaacaagagtctcagagaggggacgtgacttgcccaaggccacgtctctagaaaggggtggcaatgaggtttgcctcccagacgcctctgtgtttcctgtctccctacactgcccatcagcaggatgaagggcccagctatgaggtcaagctgtaggttgggagtaactgtttcttaagaaagtccaggcgggacgcggtggctcacgcctgtaatcccagcacttttggaggccgaggcgggcagatcacttgaggtcaggagtttgacaccagcctggccaacatggtgaaaccccatctctactaaaaatacaaaattagcatggtgtggtggtgggcgcctgtaatcctagctactcgggaggctgaggcaggagaatagctcgaacctgggagacggagattgcagggagccgagattgcaccactgcactccagcctgggtgacaagagtgaaactctgtctcaaaaaacaaaaaacaaatgaaaaaattagccagatatagtggacacgcacctgtagtcttagcaactagggaggctgaggcaggagaatcacttgaacctgggaggcggagcttgcaatgagccgagattgtgcaattgcactccagcctgggcaacagagcaagactctgtctcaaaaaaataaaagtccagcaaaagaaaggcgacagtccctcctgcaaaagtgtcccaactaggcaggtagtacagtggggcctcgagccggggaatgcagaagggcttggctgaggacagcagcaggcgggcaggcaggcaggggtgaaccggaggcacgggtggctggaggctgcctggagtctggctcagccctggggaagggggtggtcagtgcctcgccagagcatggagggaggataccctgcgatccagagaagggcatagggtgcttccccccacctctgccaatccccccagaagattttccccatacacagtaaaaggaaaggctctcaaagcaacccactgggggactcacagcaggggtgacaagagcgctttctagggcagttgtgtgctgtcttcagaggcaggaagccacttcctgtggtctcaatggtgccctgtgaaaaaccaggccctggcccagcagccaagagggccgggataggttcacccagacccattgtcctatgagcagatttgttttttccagagcaactcttcacagcttctccccttcccttggtgacaatgacagccagcaatggctagacagcctactcccagcctggcctgagtccggtggccccagcgtgagatcaccacagtgaggtctgacctcagcatcgccatggggatgctcggatgccacgctgcctgtaaagcacctttttcccccaggagagtgggaggggaccatggctgatgctgactatgtatgatgtggcctgctcctggctgctggggctgtttgtccccaaacatatgttgtcagatctcagctgaatggggtgggccagggggactcactcaggacctatgggctctattgcgtgtctatgtgtttggggtgtggcgagaggtgtttattagacctcacggggagcctcattttcttgcctccctgggctcgcctgggctgctgttcactgtgctcctaatgggcctcggactgacattcacagcaacctggtctccatagcaaccagctgtgacatcacaaggaacccacggaccctgtagctggagcagaggaagcttgaatgcctgtttggggaagaaagcctttgctgcccatccttaggcctctcctgtgataggggaagaggacatagaaacgctgagagagccagggcctccgcttctctggaggtttgagcgggatctactcaaaatccttccctccctttctttgtcccctttctcctcatccctcaaaaaatatgtatcttagtttcctcaactgtaaaatggggatattagaagcccctcttaattgagtatttattatgtgccaggcactattacaagcatcttgcatgaattttctcatttacttcataacaaccctataaagtactttcttcttagtattcccccttctgtaagtggaaggaaaggaagcacagcagaaggattggaatcaagacagcctggctccagagcctgttttcataactacgagagaatgcaccagattccttctgaacgccgcctgccgcgtgcacggctacaactctatttccagccatgctgtggcaagcagttccgggcgggcttcagctccctttgcaccaccagcacctcgcctcctgtcagcatgaggcagttttcattttctgcccaggggcttccgcagcgccccaacacaaggttggcagaagcgggctcagccggaggacttgtggagggaagttgcttccactgagccagcctcaatctggggtgcacaggcgccaccaggtgaatgcttctgccaggccgtcatctgacccataaggtccctctgtgcactgcttggaaggtcctggcagggctgagccccagccacccacggcagtgacctaataatgcaccgttatcttggctcttctgctctctcttgtttcccactcctgttcgtccctcatttctggtccctagaatgacttccaaaataaactccctgtacacaagccttggcatcgggttctactttggggggatcttaagctaagagagtcgcagccctgagaacgccactacaggagggcattctggagctgggtcacttggtgatgtgcaatgagggccctgttgtcgtgggacgtgtgatggtggccaccctggtattacggtgattaagactgtccctgtgctgggctgggaagaggtacaggtgttggtggggtgggggatcagatgaaagcactagcatctaaacaatccaggggcgatgggccttacagggatggtgaggctggctggcggctaactgctctggaagccttaaaggaagaaaacagcaggctcaggttgatccactgttaactcaggccatgcagtgaagaacaaaatccccatagtgctgttgtaagacactctctccttctgcagccaaagggtatcctgtactgaatatcaggctcggcatggaattgggggcaggagggtcacagggttgtgaaggagaaggagggcatagcttggccagatctcagccaaagccaagaaccctgctgggcagagagtgggatgctgagacctcaggtggggataattgggcagatgattctgagaatcttgggggcccagactcccctggaactttgagcactgaacccccataactcagcaaagcactccttggccagttgggccaggccaaggctgggcttcctctagggaaagctaccatgtccccccatccccaccccatctcctgcttggctcagtcccccactgagaaaccccagtcagtaatgggtattgtccaagcagaatacgaagtcccgcgcttaattcacatccagtgagattgggattaattcagtcttgagcag

SEQ ID NO: 1884466 - DNA, 4001 bp, Homo sapiens
gttcaagatcagcctgggcaacatagcaagactccatctctacaaaaaaataaaagttttaaaaaggagaaatcttaactggtctttatgcccctgccctaaagcttaccacaatgcctgccacatattggaccctcaaaacaaattattgattaattttcacaatgggactacaaggcaggcattacaaatgaaaaaaactaagtcccagaaagccagttacattccaggggatgggagggcagcaacttgaaaccaactctaccgctaaggcctaggctctctcaagtacaacctggaaaacatgagtgagcaaggagatggaggtgagaatgaggtgtcagggcacccacccaggacatgatgcgtgaggaatggagggatatgaaggtggacaagattctcaagggtggaagaatatggtcatgaggccttggcattgtggcttctaagcagagccctgatacgctaaactgcctggcaatatcaggccaggcagtttggtctgacattgccagtttagctgcccaggcatgtctgctagctaaatctaaatgctgggcctgaggtcaacgtccccacaaatacccacaactctgctgcacaaccatattcagagtcctgcacttactcagcctctgcttgctgagcaagcagatactacctctcttgagcacaagcctccaggaagttcctaatgtagatcaaggtgggaatatccatggaatatccaaattatattagaaggccaggcagggtggctcacatctgtgatcccagcattttgggaggctaaggcaggcggatcacttgggaccaggagtttgagaccagcctgggcaacaggaaaaaaccctctacaaaaaaaaaaaaaaaaaattagccaggcatggtggcattcacctgtagtcctggctactcaggaggctgaggcaagcggatcaattgagctcggagattgaggttgcagtgagccatgatggcaccactgcactctaggctgggtaacagaaggagaccctcaaaacaaacaagcatacaaactaacaaacaaagtatattagaagataaataaatatggacttgagtggacaagagcatctttgcgcctcagcctctcctgagaggtgcctcttctcccacccaccttccaggggccttcccctacaaacctaaacatagaaggcagccaatgaaagggaccaagaggcagattcctgagataagccaaggaaagcccaggcccaggagcccacagaatgaaaagaatattctcagacagtagcaaaacaggaagactgttcgacacagctgaatgcatgcatcagaacatggccgtcccctgcacacccttctctggagctcttaggctagaagatgatttcttctggacaaggaagacacaggacatggggtgaaaataattccagcaaaagaaagctaaatacaccatcccgtgtttacaaaacacaggaaaagtagcgagggtatagagaaccaaggataaaggcaggatgcccttttctggtaaacttcatgccaaacaaaggtgaagggccaggattagctcattagcggggaactcagggcaagaacaccctgccctctgttctgtcctcacctgaatctctgggacgaagccaagttgtcacctccctaaatggttctagaaacagaagagttcatgccctgcctggggaagggacttctaggtcttcagctctaatcatatgttttatgcacaggtggagacattcagatccatggccctcaccctgtttctgctctgcagactgagataagagccttacgtttacaaagtttcacaagaaactggaatttgttgcccttcttttccacctcccttcagccagctccacttttcctcggatgccatggagactcgtaaccagctggacagcatacatcccagagctggaggggagcacaagcgaccctgactcacctgccgttgctcagaagggagagaaacctgtgaaactcggaaattccctctgggggaggtgtggccagctcccaggcaccacctccgcggaatctctccaatcataacaagaagaaggaaaacaagcagttatccagtgctttctctatgccagccatcacgctccacaagtattatgtcgttaaaagttcccaacagccttatgagatgggcactgtcattctccccactttgtggataaggaaataaagcagtcgcataaattggtctggggtcacccttggtttcccattggagtgtaggcttcctgaggttagaagttgtttttatgggctgggtgcagtggctcacgcctgtaatcccagcactttgggaggctgaggcgggcggatcacctgaggtcaggagtttgagatgagcctggccaacatggtgaaaacccgtctctactaaaaatacaaaaattagcccggtgtggtggcaggtgcctataatcccacctactcgggaggctgaggcaggagaatcgcttgaacccaggaggcggaggttgcagtgagctgagattgtgccattgcactgcagcctgggtgacagagtgagactccctctcaaaaaaaaaaaaaagaagttgtttatatgacgctttgggagtgatattaagaacataaatgctgactgaccaactgaaagattcgaagcaccgtgggtatttaataaatgttattattgattgctattaaaaatcattaatatgattttatatgtctcaggaagcagtactacaaataattctgaagttactctatcaataacaaattatgtaagtgacaaaattgcatttgttcacaaggctagaaatagagcctaattgttttcaggaatgtggacattatttgtttttgttgataagaaagattagctgctatggtataagtaacgatatttagttgctactacatagtatcaaatcagtgcaaaaggaaaaatcacagatcacgagatatatggcagaagttagaagaatgtaagggaattaaatgaattaaaggctgtttctgtgactcaattaattaaatgatattgaaaagagaaggtagaaagctggattcagggctgattttcaggagcctagttgtaaataattagaccaccccttggatgtgtacacgacatcaatacctcatagcctccacaggagcagggttcatctcctcctcccagtacctgcaacaacagaaccaacacggagatgccagcacggaaattcccacgatcacaaaccccacctttctcttatcattctgctctacctttcttttccctatatccttaacttcttacattttaaatcttgttttcctgtaagctgctttaagtcctacctgaataaggcagggtatcagaaaatcaatacactcttcaggaacttaaccgaagggaatttcctgtgagagcacatggccttgactttgcccctggaaaggtgtcctcgtcacatccttgtcagaccaccacaggaacccacagttcatcctgcctgttccaattcatgtcccactcattaaaccgtcctggtttttttgttttgttttgtcttattttgtttgctgctgaatcctctggttaaacagcaggagcaatgcagccaaatgtcttgataaaatgtcacacctttccatgaaatttctaagtgtagctatgcaggacagaggaagagccacttgtttccagttactgacctaggtgggcttagttctcttcaggttcctgcagtgggtttcctctcaagcagagaattctttcctctcaaaggaagaagccacactagccatgtaaagagagtgtccaaaccttcctcttccgcagctggaaataccttcccagttcctcttctgtttggggactgggaagctctgagtcccaacttctcttgtccagtttcactttctcacccaccaacccctgctctcactctaccactaagtgccctcaacactgatctctccctaaaagtgactgaaataaatgtcca

SEQ ID NO: 1884467 - DNA, 4001 bp, Homo sapiens
atttaaatcaagtctgtgcgctcagagatgacaaactagttgggaaaacacgtcttatgcacgtgagtgtatacgcaaccacagaagccatacacaaaacaccaagtacacgacccaacaggtcagtcctgggagaccagaagacaccaagctgacagcacactaaggcaggcagggaaggcttcccggggaaatggagatgaggtcgggcggtcccacagccagtaagtgttgaagctaggttttgaactcagggagtccagctccacaaagctcatcaaattgtgattattcatcactgtctctatgtctttacaagtgctgtctttttaattattactatacgtcactgtgacatcaatggggctttcacagaaaacaaccacctggaacgcaacgcccgcgaatcaaaactgttggtcctgttcctgttcccctctagtccaatctctgccttggtacaactgttcccatgctgtttggcccacagctgctgctgaagcccgaccagcctgcccatgccagcccctgccaaggactcccaggcccccttgcacccagcgactggaaaggtaatgcctaacggcccaacatctttagagctgtaatctgtcacctcgcagaggagtgctgatggtgcccagacagactgctcagttatgcctctggagtgggaggtgcaggaggtcaccatgggctttgtgcggaaccaggagaagcagccctggctgtgagatcaggcctggcgaggacagctcctgcagtgccagctctgcaccacctccaagtgctgctgcctctggcatgggaggtgttatcatggacaccataaatgtgggaccttcaggactggtgacaattttgatgggctgcactaaaaaatctgtaaaggtggttaagatttagcatgactgactgcctaaatgcttcctttcatgtgtctataaaagtgatattatcaaagcggagctctgggacgattaatctggttgcagttctcaaggagtccaggcaatattactgccaggcctggaggtgtgaccggggggtgtgggtcagtgtggccatggccctggcaggggcagcggggaaggagggtgagctaaagacgctgggtttcattttgaatatgttgagttggaggaagaggtcagcctggaacttaggagcgatggaagagccagcattcttgccttagcttgggggtgaggttccccttgctcactgcagtttctcaaggcccgaggctttgcgctgtggaaagaagtctgaaatttcagggacagggacaagtgttgcatgggaacctccatgggaaagacaaggtggtaaggagaggtctttggggctgccgcctcccgacccccactgaagacagaaaggaaaaggggccagagggagatttgtctggggagtaacgggcaaactgagaatgccatccgctgcaagctacagccaccctgggctcttcacacgtagacagagccgccccctcccatcaagcgttgcgggccagcactgcaggaccctggcctacaaaggcaatgggcctgtggctggcgtcaccctccctctgggcagccgtgcaggcacccacaggcccttgtgactttggtcttttgagaactatgacagttctgcctgtaaggtatgttttttctctgtttctttctcagccaccatcaccaagctacttaccacttagaaaggggagtaaaagtcaggcctggaagcaaaccccgaggaaggctgggctcagcctgttgtgggcatgggagggcctctctgcctgaaagccgtgagaggtgaagtccaaggatggtcactgaggcctcaaaggtctcctcactgtgccactgagtcagatcttgagttcatccaggcttgtggggacccagaggacagaagatcatggctgttgccacccatctagaaaattgagcctctttccacgtgtccttggcctgtgagtacaagctgtctgatctgttgattggaggcttgagacagaacacagacacaatcccatcaggaattttccagaagcctctgagatgccccctccacccacaatgcccgaaatagacagctccctcagcgagcagacctctggggtcacagaccatttataaaggagcgtggtgctcactaatgcggctttggagctacagcaaagcgtagcaaaagccttgggaaaagttcagagtgagattagatcgaggctttcttgtctgggcaaggcgaggaggctgccgtcacctggctggcggggagaccttaaccccatgaacttcagagtctggccccttggcccagtgcaccctgggaaatcccctgactgctgcactggggagtgactgtggtgagggacgtgtcctcccccagggcctctgccctccatttgcctcacaacccagggcccagcacagtcgggatcaccaaggttagagctgtttcctcctctcagaaccacagagggggccctgaaagtgcaagattggaatgccactccaaatgccacgtggcttccctgggacccactaactgggcagcagggacctcagtgctctgggaggagttggtggtcctgacgctatgcacccctttgggcagaatgacccccaggggacagaggcagcgaggggcatcactcagattacctggtggaccctcacacaccactctcattaaataggtaagagaataaaagctcagaaaggttcggtgagctgtcaagacatatggggcaagcccgtgttctagcccagatctgtgtgaggttgaagcctttgaaggaagggcatggcccatgaataaaggatgtagccaaagggatccagaagaggtaggcttcagaattccacccactcatggacagccaggtcccagtgagggccaagaaagaccagctccctacaccatgagcctggctgaggagccagcctggaaccctgggaaggaagggatctgtgctccatttgggcacgcagaatcatgcctgatcccagacagactttatgtcatcagcttttcagctttactctccaggatggtggatttgatagaagaaggaattgtctgggttgtatgtccaatatgcaattgtattgtatatgggacatcctagttctcgctcctctgccccatcccagctgcttccctatgaaatcagcagtggttcccccgacccgccctcccctgctctctcccatcacccaggcactgcaatctcccactccatctcctcatccctttaccctgagcccctttctggtggcccccagatatatccccagggtttttttgttttgtttgttgttgttgttgttgatattgttgttgtttttgagacagagtctcgctctgtcacctgggctggagtgcaatggtgcgatcttggctcactgcaacctccacctcctgggttcaagtgattctcctgcctcagcctcccaagtagctgggattacaggcacccaccaccgtgcccggctaatttttgtatttttagtagagatggggctttgccatgttggccaggctggtttcaaactcctgacctcaggtgatacacccacctcggcctcccaaagtgctgggattacaggtgtgaaccacggtgcctgccccccgcccccaaccaacaggattttttgtacattacaatggcatgacccaaacccttcccaggagcagaaagggctgagactaccagccaggtcccacccagggaccaccctgggaaccctgggcacctgtacccacctcacacactgcctctgaccgggcacaagagccaagccccatgcaccaaggatggaagagaaagcctgggagatgttctctcagcaggatcgctgtcttagaggctggacctctctgtggctatgatgccccagcaacttttataaaaagttatctcagtgccgtgctgctctcagagttgctgggatcaaaagaacagctttactcagggggaaaagacaagggaccgaaatagt

SEQ ID NO: 1884468 - DNA, 4001 bp, Homo sapiens
ctatcattgtccatttagagttaactctctacataaaatttgtcaatttttttttactcaccactgtttcctctccttattttctgctcctatctgaaatctcttttcctatttgattaaattgcttcttcagtatttcctgcatgtacatatgctaccgatataatatctgaagactctcaaatccacaaatatctttctttgaccctcacaagaatataatttctgcagccttatacattgacaaatgtttgtcttttaccctcaagtgactgattccctatgacatcacattttaggatgaccaaatataattttccactttatacataaggaaactgaggtacaaagaaacaaggtagccttgaactttcattcaaggtcacaaagctagcaaaaagtggatgactagcgatgaggtcttcaggttgagattaacaaacaacatcacaggatataataggatttaacccaacttcaacttcataaaatgaatggacattccctgatcttccctccactcccacccccacctcaggggatttcaggatgcactgggcaaaactgtctccctccatccccaaccgtttctcaggcagtgacaggtgtcaagaactcctcgccgcccttcttgaagcttacattctggagcagggaggcagaagctaaaccaaaaattaaaacaactgtgaacatattccctataaactcagatgtagtatatgaaaacaacacatgatttgacgacagaagatgatggagggagaaagaacaacaaataaataggaaaagaggcctcagataggagcaggtaaaaaggagagaaaacaggaaggggtcaggactggtttccctcaaagcctgtcatttgacagagagctgcagaaagaaggaatagagccaagcacataacaggagggtagagttgcagtctgaagcacccaaaatggtccactaggatggacaaaggacatacttgaaccaccacttagattcatcttcatctaaaaaataagaaattaagtgtgtgtaatatttaattatttagtacattaattacagtagaatatatagagttgatgctcaatttgttaaaaaatagatatctaaaattaaacctcagagattactcttgcctatgacaacgagcttctgaaaggcaaggataggtctcacccatctctgtatcttcagaatccatcatattatgtggaacataataggtatcaatagtatgttggggaaaaaaatcgaaaccatgctgagcaccggaattctgtgtaaatctttttaaaaagtctcttctactttacatcagagtcccttttgtatttttagtatcatccagccccacgccttgcagataagcccctaagaaatgaatgggtgaatgaatgtgtggacagcgggatggatcattgagtgaggagcagtgattcgcaggacctgcatgcattgaaatcctgccaaagcagcctctgcaaaataaaagaccttgggctttggtttctgacacaagttaaaattatccaaggactctccttgggccacttagttgaggtttcctaatctgtgaaacagaaaatgaattcaatagaaagatgattgagacaaatttctggaaggtgccaaagcaggatgcctggcattgagggacgcttcacacctgttatctctctccctattctctcttcacccctactcccgcccggcaactccccgctgtcagctccaggaatacttacctgctgagaaaaggaaaagcacaacactgactttaccccgcgacgcttttaaaaactccaaaacacccagcgcgatggggagtaggtttccctaaagacaggtggagcagccatagttaacttagaggaaggtgaattgacaaagagggttgagccactacgagcgggagttaccttggactaacagttgtatcttcagcgagcacaagtcctggaatctcccacgcccatccctttttttagcgccacaaatgcagcctcctaagagaatgggaagcttgggagtcagagaacagaagattgagctaccattggccttaatggatgtcaatcttcacttgtctcttttttttccttcctcgcctccttgcccctccctatcccggtaggcgcgttctctggcgccatcatatggcagaatgcgggactacaccaaatgcggaaaggcaccttccccttccctgagtatctgcaaactcagggctgggcttggtttttaagagctcagctcctgtgccaggggcggtgctaaaaggggctgcctgcgcagatgtcattcccacaagatgcaagtaaagaagcaccgcggacaccgggggagggtcacagagtgacaggaggactggttgaccagctgactggcctcacttctgacaaatgcaaattacccagccacagtccaaccaagggtatcaaaacaggatctctgcagatggagctcagtgttatgtgttttggatgctcgcaataagattttcatgcaccataaactttcctgagtatctcaaccagttttgttgatgccggggtttgttcaaagctgcagattactgggcctcaccccagacctactctacttaaatatagtggggttcccataatccccattttaaaaaacctatccaagttaaagtacagagaatcacaaactggaagaactccttaatttacaaataagaaatggagacccccccaccaagagagaaaggaatttgcccaaggtctccctgaaagagcctaagaaagcgtgaggctctaaggttaaaatcctacctgacaccctttcctttccccaactagtcctgtgacctctagcaaactatcctgtcctaatctgtgaaatgggagcaacagtcacacctaccccaactggtgactgcaaatattaaatggggccacaatgagtcaactaccaagcaccaccccattgtaagttgaggttgaaatgattctagatcgccctacccccattcatctcccagtaccattgtatgaccgtggaggtgaaaccatccagccgcctgttggtcccaaaccatgttcacctccacccgtggctcagtgactatttcttttcttgaagagagagagaggctccttggagcctctggaatctggagggggatgttaccttccccctgtgtgcattgtcttcccaagataggatggactacggggtctccatgtgaagagttagctgccagggcatcaaggatggctcctaagtggttgctggaggcttagagaccccactccagctctctctcaaatgggggcagcttgtttgcagcagtgagtgaggtgggcccactacgaacccacaggaggagaggaaaagaccgtcccatctaagcttttacataacccattgcaagctccagaatgtggtgcccaggcccatatctataacccacccccagaggccagttctcctcagcctttcctgccacttctgccattgtacatccagacacttcccctgttctcttctatcaaactcctactcatctctcagccatctagtccaaatattaatctttctctgtgatatactctcagggtagaggcagtggtgccttcctctgtattcccagaacatgttgtctgcaactctaaatacagacatcatcctactattagggttcaagagcatcttttatgggttcatgaaggaatcactcttcgtaaacactggccttattccctaacttcaccagacctgaccttagtgcatgatccattcccacctctcccaaccacatgagaggccttttcctctttatgggtttgcaaaccacaatatgacctaaccaccagttactggccaaaagcattcttgtcacgtttattataaaatccagccaacaagatgctttgtgccaagggaatgttccttttcagggcaaacactctgtccccagggatgttagacaacttccatagccccgtataagcattagctagaaatgagttttt

SEQ ID NO: 1884469 - DNA, 4001 bp, Homo sapiens
agaaaaggaaacctagacaagatagcgatactgacttgcccagggtgagtgggtgggccatgagttccagcccaggcctcctccacaggagacccttctggagcaggcacgagccacagactgacctgggatcttccaggccagcaggagtcttgcctccaagagcaccctctctgaggagaggatgccaggatttactggcaccttcagtatcctcctggcttcactcctctttgcccaaaaacaaaccacacctgtttctacctcccagcctttgcacttaccagtccccatgtctccccccatcccccacatgtggcatgccactagcctaccctcagtttcctaaaaggcactaagatctttccagcctcatggcctcaccacatgctgggagctctgcctggaatgcttttctttctactcttggccaattcgggccttggggcccagtaacacggttgagagatttactcctgtggccttgagagggctgaacaaatggaagcatctctaggttgcaccagaggcatctattacctgctgccctgtgcctgtaacttctgtcattctcctctccccctgtgagaacatgataaagaccacaaaggcagggaattcctctcctcttatgctgtgaccccacagctatctcgctccagctatgcctaagaaatctgtcttatcactgacatgcttgttgtccccactcgttccctgagcctccatccaacaagtcgctccaccacatgctggtggatctcgcttcctatgctcttccctagatcaggccttccctccattccctctaccactgccgtgccttgaggctcatcctctctcacatggatcccccgcccctacagcctccccactgccctcctgacctacagcctctcctgtccatttcccataccatggctaaggacacttaaaacccacctgaccagccatttccctactaaagctctcccaagacccggctcccccccaatatctcaagagtggcactcccaaacctctctcagttcaagcacccgcgcctctcacttcagcctcattttccacagttgcctgggctccagccactccagggcccccagccctgccccaaacatgctggcttttctaacactttatgcctatctttctgctttgccctcacaccttccatctgcaaaattcctattcattaatgggcaaaccattctggaatgctttctatgtgccagacactacctaggctctttttataccttatctcatttacttctcaaagtacctcacaaaaataataattattattcccattttacagatatggaaactgaggctcaagagaggcagggcaagaactggactcctagtctatctgattccaaacctgctgtgcaccaacctctctgggaagtgcaccagcgcccccactcccccagcccagggcagagtcttctctactctgtggttccatagccccctggtttctcgcttgtcccggccgttgtcaccagtgactgtgtgcggctgtctctgctgccccccagcgtgagcatcccaagggcagaacctgggctgatctggctgggtccccagcacccagcagggtataggtgctctgtgaggtttcttaataaagagatggaaagccagaagcagtttgggtggttgagatacccagccctaacctaactaatcctgataccagtgaccaaaagcgggaccttcgcatctttgctgccaaaagacagcccctcctaaagagtaaaggcccgaccccctgcacgccctctgcctgcaccgcacgtgcttggttttccccgcccgggtactggccgccgggccgtaccaatctccgcgggggagcgcccggggtcggactgagggagcgaggggaataaccgggcgcgccccttggaagcagggctcagagctgctctcctctcacgcattccccggatccgcgcggagcaggctgctggccagccccgggcccgcgccaagcagagcctcaggtgcggttcccccacaagcaagtggcgcgggcggcggcttagaacggcccgccccgcccgccgcgtcggcgcctgccccgttgtgaggtgataaagtgttgcgctccgggacgccagcgccgcggctgccgcctctgctggggtctaggctgtttctctcgcgccaccactggccgccggccgcagctccaggtgtcctagccgcccagcctcgacgccgtcccgggacccctgtgctctgcgcgaagccctggccccgggggccggggcatgggccaggggcgcggggtgaagcggcttcccgcggggccgtgactgggcgggcttcagccatgaagaccctcatagccgcctactccggggtcctgcgcggcgagcgtcaggccgaggctgaccggagccagcgctctcacggaggacctgcgctgtcgcgcgaggggtctgggagatggggtgagtgccacggcgcaggggttatggacctgcgagaagattttctggaaagggccctgtggcaggctggtgggtactgatgagtccacgttcattctccactgtggcactcatcaatttttacgacctctgttacatcgctttccacccgccccccagcttgtttccctcatccgtgaggtgggagcggtaccacccaccattcttagttattagggatattcgagaactcctccccagcccccactgcggctggtgacccctggcacttccctcccctctcccttcaccaggtagagcgagctttggcagtgatagactggatgggcaggatggtatgggttttgccgtctcctgagacagccaccagacggggaacatgcccgactggaacaggtgtgtctgccctgtcctctgtcccacatccatcctctcgcccaggctctggagcccacatagcagcaactcttgagcctggcatgcttagaaggcagcggagaggaccctgcatgtcctccaaggtagaactgaggtcctcagtgaatcgcgcagagttgaaatcaacccccgccccgcaccccccgcagcttttcccaagcgaggaatagcaactcttccaacccccacctcccttacctagagctggagaaactgaagtgggaggaagcatgcctaagttttccttagctgatgccttgacccctggattcaagtacaaatccggtagaccctgggaagtcatcacagctgtcctggtctgcgtgtgtgtcttgcatgaagcccctctccctctttctaagtctgtattctgtttgctgagcctctctgacatggatttttctttagtaactaacggtcgcctacaccgcccacctttgttacaaaaataaagcttgctaattatggaatttttgaaaatatagacaaatgaaaaaaatttctggtaaatcgactatccaaagataccttcctattagcattttagtatatctcttgatcattttctttatacacattgcatagatacaattgaggacatgctgtagatatagttatgaatcttgttttctcccccttaatgtaacatcgaggtttcccttctgttaatcagaatcacttacaatgtcctagtggttgcaataacccaccctgcagctgtaccacactttaactgtgacctaggcattggcattgcttcttgtgtgattatcgctgtggttatctgcccctcttggtgtgggtgctgctcgtagcccttgaagaggaacccagctgctgccctgtctcgggggcgagcagcttgagctgccccatgtatccagccagtagcctctgacagccccttctctcacttgagtccttttctgttccctgtgtcctttgatgtccttagggacatcaatggatgaatggacttgcccttgttcatgctgttaaaaatgtttttgcactgggcagtgggatagggatgttctctgtggtagtgcttcctggagaccccattccgtcggctctgccatccacaggctgggagct

SEQ ID NO: 1884470 - DNA, 4001 bp, Homo sapiens
atgtgcctctgggaactgacctctgaaatggggttgaggtctggactgggaatgcccttattgtttgtggggcctgggtccaggcccccatctcgtttcccagcaggggggtgccattctgatgaaattttgagtggcactgattagcccagtgatttcctttcatacagtgaggacagaatcctggtgtttattctgctgggtggggcactgcattgtaaggtcctttctgtcctgagatctggcagcattcctttttaaaatgtccagtttttccacatttataatattttcccgttttggggtttgacccttggctccttttagatttgtcaactgataaattagctattgcttgtgctaacattgcagagtgatgaagctcagttcctacatcttgacaagctctgagaaaatttcccaagttttttgtacacctcaccagtgccagtgcacatttacaatccgtgtttgcatcctcaaaagctagtgttaaggttagcatttctgcagccgcagtatgagaaatctgacacttcactgcctcttgtaatcatgcaagaaattgcacatagggttcctgcaacccttgtatgatacataaaaaggattgtactgggactccttcaggaatagtggcccaggtgcatttagtggcctgtgcacactgctgataagcaacatctgggagtcccatttgaggttccaggtctgaataagggccattacctaatagcatatcctctgtaatgtctccatttccagcagcacagttctgtctagcctggtctgcacacatttcttgccaatttaaattccatgtcagatatgcagtagccgacaagcaaattcacgccaagtgtttcacatcaaatggtaaaagacgcatagcaccaaacacagattctagcaatcctaaggtgaatgggttctgtacgccattgtttaccacactcgcttttaattcctttaacaagttaaaatctagtggagtgtgttcatgaataacctgctgtgcattgttaggattaggccttatggaaataggaaaagcgtgaggtcctaagggctctccagctattgcagcagagcataaaattctttgtattggagtctctatttctgccaccaaaggaggcggtacaaatgtttctgcaactggaggaggcagtataggccaacttttatcctccctctcctgttttttattttcagttggagctgtgggtgggacaacagattcttttagatttttagattcagcctgctgtcccgcagaataatgagataatagcagaagtacagtacaaactaaactccaagtggagaaaacagaagaatcaacttcaagacctttttgatgagcctgttttaatccttctcctgctctatcccagttttccacatcaagagtgcctgcctgtggaaaccatgagttatgcataataactttgtgtggcttctgcaggaggttagtgtctgagaattaacctgagctccagactgtctcaacagaactttaagcaactgcacataatgtttttcttcaacagacaagttattccccctgctaccctgattcagaaagcttcccattcccagcacttctataaagcactgctcccagtacctctttagagcactgaccttatatatgctgccggcagactcatcctggggtccccgtttgccttgtcaatttcagcttctctgctccagcagatcttttttgttcacatcgtcgaagtcccgtgttcagacgccacttgttggcatccttggcgtccctgttctgagtcaccacttgttgagaacccaattgtgtcactgtttggggcaccactatgtaacctgcatggacctagggggactgaacaaagggggcaaacacgggaataaaagacaagaggcaaaagagtatatttggaagaaggggtcggagggcaccttgtctctagtggacaagggccctgagctttacactgccctccatatttattaggcaatagagatagtgagaaggtggggagtggttgttggccagcagcttgattcgcagcaggcttgcaagactgcattcttaggtgctagacttctcaatagataacttcaaggagcccagcgccagggagtgaggccctcaacaaaccttttggtggcagggcagtgtgagtttgcccacatcctgcattcatgataaacagtttgctgtttgatcctatagcctccagcgaaatgctgagttggtcacttcccaggggccttcagctccctgcacctcacattctgtatttgtcctgattagccagcaacttagaactttttaaaagaggcaaaggcagaggagaacaaaggaggaagtaacttgtggaatgctgagaaaggtaaaaacacctccaaataaggaagaggaacagactatgacttaatacttgcttggaccagtgtaagcatgccagggcaaatatttaggctaaattgtgggagctaagaacacaaagtacattgatttctttattatagctagcagatatctaagaatgttagcacaggtctttgaataaattttgtttctgagagaagttactatttattcctaattagacggggaggaaagtctctttgaagaggaacctctattttatttttacactcagaagcccgggcagctctgccgggagtgcagggaggcagctctcctgggggtgcaggtaggcagctctgctgggggtgcggggaggcagccaggcttttgttgcacttccatctactggcagcacacacagaaaggaaatactcccagtggctagattccacccatcatatcattggactgagtgaaaactttcagaactctaatttaaaaaatgaatgcattcatgaatattactaacctaacatccagctgaataataattaaatacatggggctagcctgacagagggtggaaatgctttctttaacttttctctttgaaacattgctgattattttatgttttgttttccagagtcaagaaaatgtctctttttagctaattatagcttacagcaactgggtaaccttttgtgagcaaaattaaaacatctgcatttctccctacctgatttctctaaaatttggaaactattcatgagtatttgtattttgtggcaatatagttatttgcataagatcaataagaatctgttttcttttgtaacagaacacattggatacaccggttattttaccaaggctttggctggaatgttacatttttgaatgtgaccaaactgctttgaggaattgaggctgactttataaagccaatagacatgggaaagactggcctcatgccttgcccacacggttctcttacaaggttcctcagcttgcggtaagtaaagactgtcattttctgatgcacccaggaaccacaagatattttgggtcattgagaagataggaattcactcaatttttacatatgttacaagcagtcccacagtgaatccctggcttggcttactagtctttagaggttttaaaagtgtaatctgagatttcttattaaaaattctgcaaagtcaatggaaaagagcctatatggccaatcattcttcttgttgcacattttgcaaataatcaggccaagtataatactaaaacttatttagccaataaatttgtcctactaacatttatatttggtaggaatggggaactggggagagaaaaaaattgttttagaaggaaactataccatccttcttataagattctagccctgaccattgttttttagttgttttttagtttttactatttgtctacaatttggactgaattctgaataatgtcccagctctaacaatcctccaaagaagaaattggatttaatttccttcatgatatttttagttgactccccagtagaataggttttgttgttgttgttctgatatacaaattctttttttgattataattcctatatgcattacatatatctcttgtt

SEQ ID NO: 1884471 - DNA, 4001 bp, Homo sapiens
attgtctccattgttaaggatggcaaagggagagtccatggattgcaggtgatgcaggcagcagatggaggagaatgaagctattatctgttctgagcctcttttgttacacagcttcatctagtccctgacccatgcacccttctgggaaacctacctctaacctcctcactcataagacagacacaggctgccccacctccaaaagtctggaaacaccgaggacacacggacagcctttgtgttgtctagaaggcagctcttttccccaaatgcctgtcctcccttccctggaatccttctgaggctaggacccacaatgatggcctggcccagcaccccatcctccgcctcctcaaaagcatttgctgcctgtcgggaacacaaatccctgtgacctttggctgttcctgtcatgtcctcagaaggacagaaattagcaggggaatcaggcagtgaaaaatggccaccctctccccccactccctcttctcacagtcaacagcagggcaggacgagggcttgggcttggctgctatcaggcatctatatggggtgtctttatgggtgggagggggtttcacaatccaccttttgtaaagccttctgctcatgggagtttgaggtaagctgaggtgggctggagctggcatgggcagggggcaggtgatgccatctcccaggtgccctgaggcctcaggcctgagtgagctgtccccagcagcccaggccatcccagcagtgatcttaacattggcggcagcaggttcctcaagacgtccttcctgatgtcttcacccacatccccaggtcccccctcacccagcccccagtgtgatggttaataccgagtgtcaacttgattggattgaaggatacaaagtattgatcctgggtgtatctgtgagggtgttgccaaaggagattaacatttgagtcagtgggctgggaaaggcagacccacccttaaactggatgggcacaatctaatcagctgtgccagcgaggctagaatataaacaggcagaaaaatgttaaaggagagactggcctagcctcctagcctacatctttctcctgtgctggatccgtcctgccctcgaacatcgaactccaagttcttcagtttgggaactcagattggttctccttgctcctcagcctgcagacggcctattgtgggaccctgtgattgtgtgagttaatacactcccatgtagatatattccatcagttctgtctctctagagaaccctgactaatacacctggtatccggcgggtgctcactgtgacagtgtggacagctgcctgattgcagtcttgagcacctgtctttctgatgccctttctcctctttctgccctgggggcggctccagccagcttcccacctccagagttggagttcaaaaggagagatgcagccagctccttcccagccagcagatgggccaggggccagcggaaggggagggaaaatcctcggacatgtggcctggcattttgaactccctgcactttgtgggaaaaacaggcagtacaagagtaatattcacctagaagtagaaagtcagggccgagggaaaaaagcagctacgttaggaaggcgagtccagggacagatacgttacccaccaggtccttcatgattgctgtagccaagctgcaagttcctggcggccaatgggagcgtggaaagaaggaaaggtttaaggttctcgtggccattggagaaaatactttagctgctcaggaagagtaaatctttccctagctctcatttgtgaaagaaattttccttaaggggcttcacctacaagtcatcgggagtaacggtgattggattggtcagtgttctcaagagaagctgaacccacaggatgtgctgatatacagacagagatttgtgataaggaattggcttgaaccatgttggaactggcaagtccaaaatccacaggatgagccaacaggctggagagtgaggagaaccgatgccatggttctagtctgaaggctgtctgtggtagaagcaggtggagctgacctcacagatggagcctgaaggccttctgcagcagaattctctcttgcatttgggttctaatcaggccttccactgattgggtaaggcccacccacattagggagggcacattgctttactgaacatccttcagtttaaatgttcatctcatccaaaacaccctcgcagaaacacctggaatcatgcttgaccaaatatctgggcaccctgtgtcccatccaggttgcattagtctatgttcatgctgctaataaagacagtacccaagactgggtaatgtataaagaaaaagaggtttgatggacttacagttgcacgtggctggagaggcctcattatcatggcagaaggcaaaggaggagcaaagtcacatcttgcatggcggcaggcaagagggagcatgtgcaggggcattcccctttgtaaaaccatcagatcttgtgagacttattcactatcatgagaccaacatgggaaaagcctgcccccatgattcaattacctcccaccaggtccctcccatgacatatggggattatcacaattgaaggtgagattaaggtggggacacagagccgaaccatatcacatgttgacacataaaattagccacgacagggatggggagtgttgcccccatctctacagcacacacagccctggactgtccaaatgggtcccccaaatgcactgggtgcaccatggttctgattggaggagagatgagtctactgcccatctctggggctggcgtgcatctcagggaggtctgagattcttcaactaggctgttgaccatacagtcacgtggtggcatcattttgttgtgttttttttgtttttttttaatgagatgtcaggtttggaaaagaagaagatgaacacatcagatgcttgagtgattttaagggcagacgcttaggcaaatgcctgttgggaatctttggctcccccagtcagccaatcagctccttctcacttatgagccaatggagcaaaggaagatggagttgaggaaaaaggagtcccaaggtcaggaaggagagagaagtcagttgaggagaaatggaaccttgcttcaccttagagcatttgcatcatggtggtattgtgtcccacaccaacctgctggggctgccacagggagcagggagagaggggagaaagtagctgagattctgcttcctcccagcctccactcttaccctggagcctcccatttgctgaacgtacccagaagccagagggcaaaggactctgggaaatgtagttccctttggcatgtgcacaggcagggcagggttagcaaaccacttacatacccagatgatggcttactcttttccttcaagtgtctgcccaagtgtcatctgctgggaaatgccttccttgacaccaaaccaccccctcaaccctgccaacctggcctggctcagcactctctattcttctgctagcctgcctttatttttcattatagaacttagtaccagctgatgttgctttatgtatctatttattggattgtctggttctatttttaattggattatctagttctattttttatttattatattgtctggttctattttttattaattggattgtctggttctgtttttatttattgtctagaatgcaagcccacaagggcaggccatctgtctgtcttgctctctgtcttgctcatttgagaacagtacctggaacacagtaggtgctcaaccaccatttctgggtagatagaatcttctcccaggtcttctcttctttgggtacatatccttagtttcttcagccattccccaggacatgctttctggctggcccctgcactggccggcttctcctggcccagccctctgggcaaggcaggactgatggtgagggcagtcccaaggtgccagcacatcctgccttgaatccagtggccaagtggccatcaacaga

SEQ ID NO: 1884472 - DNA, 4001 bp, Homo sapiens
ggaaaattcagaacatatgtgaaacacaaacagctgtggtttaggaggtaaacagaggaccaacacagccctgaaatgcaacagcctctgagtggcctgggccgcatgggtgactggggttgtgttaaaagggcaagctcctgcctcctagccctgaagccccaggaacctgccttgaaagacaagctctcccactaatactcaacttgcagggtctcgccctaacatccaagacttggtagcatctcctttctcccaaaacccagctggaactcaacgaatcctaaacgaaaactcaagaacggcacaccagatgccacctgttgttcgtcagggtctcaaactccagaggaaatgcatttgcctgtcatgggtttcctctctaagggcacctgtctgaacttggagctgtgcttccactggtgcctcatggggcctgggcctactctccacctgaagtcacgctcctctctgtaagacatcaggtggggagttaagtccaagaaggtggcaagaggctcctaagcaacagagcatgctcgttcctggcaggcatctcccataataccctagagggctggcgaggccgtgacagcataaggacagagaaggggcagaggggtgcttggaagtgcttatcactcaggggagctggcaggcctgggacagcaggcagtctgaacagtgctggaacaaagacagctgccctgcaccccttgtcaagcagctgcgggtgatgggaagcagcatgacggcaccacctccttcgtcgcaggaaatgttttgtactgggccgatgacttcagttttccttgcctggagatgccttcacgaaggagggggacagggaatacaggcaggcatgttgcaattggcatctccagggctgccaagtcttgggttcacttggggccaagccactccagaatcccattccccttcatgccattgaagaagaagttgtgaggagggtcctgctgagacagggccttcacaatttcctgtgccaaaatccctccaaccaccgcacacactggggccatctcagagaagaagtacgtgataaagcgcgggtcaggaataatacccagtgagtcaagcacatcgtttcgtatctggagcaacaactcggaatcttccccgtgtgtatcagaactgggatctcttcctttatctgtgcggaactttaggagcacttgaaggagaaagtggtcggaggtcgtgcgcttcagagcagcctttgctttcttactgctccagtccacctccagcgcttctttaacggggcagaagaccaccttcttcttgaccatcgttgtctcagaagaatcaagttttactctcttggtatcaggcccatcttctactccttggctaactttagcaactttagttttctcctctacaaactcatgttctcctagattggcaaatgtgtatccatggtagctaaaaacatctcctgcaaagaacttgatgctatttttgtgacagatctggtcaaccttaactatgacagccctggagcagcaagtcaacacacagcatcaaattgagtgaaaaatgactctggtttcttctctatatcctcagtgtccaacttcacatccaccatggggttaagattctgagctcgctccaaagaggcttcagccctatttcggccaacagacccaatacgaatcaagaactgagctccgggttcttctggagatatctgtttgtgatccagcatggtcagtcctttcactcctgccaggatgagattcttggcaatttcagccccgagtcctttcatgcctgcaagaagcacctgggaggcccgcagccatttcggggcctccagtccccaaaggcagatctgctggtcatactgcgcctgcctcctcctggctgatgccacctccagcctcctccttctccaccatggtgccggctcttcctgcctcagcttcggtcccgctcatgccaactgcccgccagccccgcgcaccatcaacccatttttttttttttttttgagatggagtcttgctctgtcgcccaggctggagtgcagtggtgagatcttggctcactgcaacctctgcctcttgggttcaagtgatcctcttgcctcagcctcccgggtagctggaaccacaggtgcgagccacctcacctgactaatttttgtatttttagtagagacgggcttttgccatgttggccaggctggtctcgaactcctgactcaagtgatccatctgcctcggcctcccacagtgctggggttacaggcgtgaaccacggcgcctgacccaaaattgccttttgagaagagaattggatggttggggatggggaggagggagagctctttttactgtatagctttttgtaccttttgaattgggaaccacgtgccatgtattatctgttaaaaataaaaattccttccttggatggagatgataggagctgaccgattttcagctcgcctgctccctcccttaacacattcacatgcagctagaactcgctccgtactcgccttctgttcccgagtatactggaacctacaaccaaacgctctccttacaaccacatggctgcagcatttgtacaaaggcaacggtgcatctgctgcactcacagacatcccccgcacagacccaacgagcatgcagtcttgtgtgtatgtgtgtgcttgtgtgtacatatatccatgtgtgcctttgacccagcccctaccctctccctttatccgtatctgcttcctgggtgtgtatacctgggtggaggtccctaattacaaggtgaaataggttaaaagtctcctactctgaagcactaaatgggcctaattacaagtgactgtaaaactctaattataagaggacacattagttggaaaaaaaaggagaaggcagcagaactgaaaagaaaagacctgagtgacacatgtagcccccttagacagttgagaaaaagaggcttaattgccctttgataaaactggggcagtgagaaaacagtgggaggggtggggaggggccagtaatcaaaggagactcctgcagacaagacctctccccagggagctctccccgccaccccaccatttctctcataactgtcacttgccttccactgctggtgggacagaggaggaggaagttgttacttgcatccagcttactccttcatctactctctgagcttcctcaggaatcccaggtccttggtccccttccacctatcaaaatccattctctcaggtcccacaggaatggccttgtgaacaggacacacattctgatcctgacctagctactcactagctctgtgacctttgtgaggcacataccctaaataaacctgtttcatcaattccaaagtgggctggtaacatctctctcttacggagctgtgaagacgcacagaatggtatatgagaaagtgctttgtaaatgggaaatccttgcactgttattagccattagggactggattcactggaccagatcgaatgttcttggaagacaggaatcatgtcttagtcatttctgctttcaggttcctgcctctgatagggtggaatcaaagagtcattctcactgtggggtaaatggcagactataaccactaggttatctttcccttggtgtgaacaaatggacaaaacctttggcaatgagatgaagctgtggtggccataccattaattctaatatttattgacatttactgtgtagcaggcactatcctaagcagtttatatgtattctcatatttgttcctctcaatgtccttaagaggagtatgttatctccaccatctccattttaaagatgggaaatagaatctcaagttaagagacttacctcaaactgcactgctagtgagtaggggagcaggacttgaaccaaaacctacactctaactgtgtagactttaggcaccagccaccaggtggtgaatgacatttgggttttggagccttttttgtgtgtgcgtga

SEQ ID NO: 1884473 - DNA, 4001 bp, Homo sapiens
tgggcaagttatagaaactgctgaaaccttgggtttctcgtctgtaaaatgagaaagataaagggcatacctgctctatctacctcaaagggtggtattaggcaaatgctgaaacataggccgagatgctttgaggtttatagaacaccatgcaaatgtgggtgcttgtgggtgcttccctacatggcctccaggggttgtgcccagtgaatacctagcatctgtccagcttctgttcaggctggccttgtctcaggtttgaggctctgtctccctgtggatcatgtcccctcaagtaggagactcagagaaagagcatcaggtaccaatagggctggcagcaaatctgccaggctgagcgctgggccctctcccccggccctactcagatggaaagggaagcggaaaaggacttttattgagcacctacttgacaggctcctcactggccattcttcctgcgctcatacactctccttaccaaatactttgaggtagctatcatcatctccagctttcagaggaagaaagtcagtcataaagaaattaactcacttgcccgcggtcgcctagccagtgagtggtgggtctgaattagattcattctgtctgcctcaaagcctacctcttccaacctcacctgctgactctcaacagacctttctgtactttgtcctggggcagtcagggccagggaccaagtagtcaccctcagggagcaggactccttgccacagaggtaggggaatgctaagcacaggtgaggatttccgcctgctttggagactgagggcagcaaggcatcctggggattgccctgtacctgtaagctcaggtcttggtcctgcctggggtcagccccccatgcctaccctctcccacctcagccccctatctgtgggtgcacccatcttgttccccctgcacacagcctaactgggctctgacccatcaaggagctaggtgcagggcactgtgctctagcccttgtcctctagccccgggccacagggtgtgtccccatcactcaccggggagccagtgccagcctcatggcctccgagcaacacaaaccacccactgtggctggggctcctttcccagtccaggataatcatttcaatggaatgttttaaagagtccttttctaaattaaactaataaatgggatagtagccgagaggcaagaagggtctctgcttaacattgaaatagaaattaaccagaagggggaaaaataatgtccccagaggttatcaggaggcgatttgaatcctgttcccctgtggatggagtcatctgaagtctagctgggtctgcctgctgtgaggacctcagatgctaaggggaaaatgaagtcagctgccacagatgccccaactcccagctatgagaaaaactctggaaggtggacttcattttccatgttttattcaagatttttttttcagatatgtctcgtgctcagactctgagataccacaaaagcatccaaacccagcctgtgacattcaccctcgttcctaccacctcccttgctgaggaaggtcctttgactcttcttccagaggaaaagaataaaaaatcagaacccaaatggctatggaaagggccctctctaccctttcagctgggacgggtcatggccttgttcagtgcccactgtgggggctctggttccaggactgactcagggctacttcagcttctatctggccatctgaccggggtggcattcgaggggaagtgacatagcctcctgccactagccgggaagggccatcaggtgaacagctgcctctggttgtctgagacacctcattaaggtgacattggtagccacctgcagaggcacaatttgaggtgtagcttaccctggtctcacctctgcccatccaggctgctggctgcttcctctgctcctggggagttggccccagcccaccaggacctcctctcagcttaatgttctcctccagttccccttccatgtgctgactgagtatggacctcacccgcagcatacaaaggtttgctggttggtaggccagactatcagggcccctcacccttctggctgctcaggtgtgacccctgctggtgggagttgagctggcctgggggaacttttctgggactggtcgctgtagctttgagtctgtttctggcaggagcaggctctgctgtgtttgtgtacatttgttcaatcagtggacacccgggattcctgagaaagctccaaaggcagctgtagccacagtagagagatagccatcctgccctctgctaggctggcctcacgggaatcatgtcacataggcccctccaggccacaatcagggctcctttaagaaaggcagactctatacatcaaaccacagcaccctgtgctcatcgaatcatgtgataggtagagaggaatgcccagtcctagccttcctatgggacattccttctgattgacaccaaggcgtaatgactggtagaaattcagtgcattcattatctccatgggtacgttttttaatggagaagggcctgaagccagcaatgatttgacctaattccagagcaaagagttggttccagtgtcaagcctgcaatggagtgatgattctaggatagggttgggccagagcctttctaagaacaccagtggtagcagacgacactacttacggagtgcttactgcgtgccaggcatgctcgtttaaaatgatctgctagtaagcatcttgccgtcgtcctgcatttgaattctgatctgtcacctggtagctgcggtctttgggcaagcctcttaccctctctgaatcttaagtccttctggaggtaaaaagacgtacttcacagaggaattgagatgattacatttatatgatccttgtatgtgctaatcacaaaggcacaagcctccttgtccagtgattagcacatattcaacattcaataaatggtagtagctctttcatttcatccatttcctttttcttttttttgtaaaatgagcatgattttgtgaggctaagtgaaaaaaatatagggtattagtgctttgcaaattggaagggggatatgcgatgtgtttattattgatgtgatttctcaccctaggcagtaacacacttctcccctcactgcaacctcggcccccagcagagcagctctcctaccttctgagtctggcccccatctagcagatgagagggagaacacatcacgctcaggagccagacaggccatgcagcggtaccatccaatgttgttccctcccagaatcatccccagattcgcctttgactcctgtgatggtatctcattggataagccaaactgattagccacgtcagaaagttttttattcccaaagttcagagagcactctccacattgcttctctgtgcctttctttgtgagaggaaaggaattagagtggatcgtatcaaggtgaaggtaagtcccattctctccctgcttccctgagagccagcctggacctgctcggaggaacactatcttcttataattgcatttcctttctgtcctctaaaagcttttgtgcactactccttcaccgattcatagtaatacactatttggtcggccttcttttctcatttcctttgctttatttggtggctgttctcgtttttttgcagactctactcaaatacatttgatataaaggaaaaaacttaggatttagcatcgggaaactcagttctgacactagcagggtgattttggtaaaatcacttaactcctttgtgcctctgtttccttcatttggtaaaatgggattaataatcaaattacataatagacattaaactgccttgtaaacaataagtgccatataaaactagttacaagtctcacagcctctgagtcctcttccttcttggcctggatctttttcttcctagctactcaatacaatgaagacagagaaaagctaacatttatttagaaactgaataaccaaaaaaaaaacaaaacca

SEQ ID NO: 1884474 - DNA, 4001 bp, Homo sapiens
ggagagaaccactattgactttgcacacctcaggccctgggattgacatttccacacacaagaaccagtgacagcagcccgatggcatggggagtgtttgtgatgccatcttacagaggaggcaactgagatgcagggaagtcaggtcttagcaccgatatgaccttttgatgcaggtatttctgaatccaaattgatggtcattataagattataagaaaacaataaattgcaagcaaaaaaatgaattccttttttttcttttctttgtttttgttttaaagcattttgctttttaagggccaatcttctcttcatgtgcgaaatgggaaccaagatctgggtcatagcttacagtcccaaaacccagttgtcctggaagaaaacaaggactcatcagggcctggaaagcttgtgtctgaatctccagcaatccatggctggctgatttcttctaaagtcagccaagttggagcctggcggctgaaagaccatttcactggcggcacagaacccattccccatgcgtttcaccacccacagttttcttgtcctacctgcgttcctccttggcaggcagtttaccagacatccaagcaccaaacggggccatgtggatctggcctggtcgtctgtacagctggaggagccacgcctcttcctgacctttctcaggaagcaaagcacctactgtcttcccggcagagccagggcaagcatgggcttgggaatggagcacacctgcctccccagtctggctctctgccctttaataatcgtgtccctgggccggacgcggtggctcacgcctataatcccagcactttgagaggccaaagcaggcggatcacctgaggtcaggagctcggagaccagcctggccaatatggtgaaaccccgtctctattaaaatacaaaaattagctgggcgtggtggcgcgcgcctataatcccagctactcagaaggctgaggcaggagaatcacttgaatcagggaggtggaggttgcagtgagctgagatcacgccattgcactatagcctgggtgacagtgaaacgccatctcaaaaaaaaaaaaaaattgtgtgatcctacactctccctctctggcctttagcttggtattataaaaatggggatactatttccttggagagttatatgtagatttaatgagcacagagcttttagatccaggtttcatggaagcaccaaagtgtctgttaggagtggggaggatgctacatggtgagagacagggccttaggtgccccatccccttccatcagaggcgcttccctggtgtttgtttacacggccaggttaggcttgcgattttggatggaggaaagggttatgcagctgaaagaaagcagaaagaccgctgctctagttgttgaggaagtgctgggcacccagcgggcacttaataaatgttagcactttccctctcctcgcccccatcattctcccccctggattctttattagatggctcggcgaaaacctggacccagatgaatggagagaaggcagcaggcagaagatggagtgcttttaaaatatcaagcgaatcactgcaggggtggagtgcctggcgggggctaggggtcacggaggctgtgacccaaatacgacggggcacaggctcaccacagctccacactgagggcccctgcctgcaaccagcacagaaaaggctccccagaaacaggggaaccggcccctgccccaccaacgccgttcgcaacaggctcaccccctcctcctcctcctctcttgaatggaaggacccagaggaaaagagagagctctgaaatgtgcgaaggggcacaagaggtggggaggcccagtgggctgacctggctgcttcttgcaaataagcggggcctgctgcactgcgagggcaccgagaagaaagagctgccatcaaccctgccgggtttttctcagatcctctgaaaacgaatctcctgggagcagctcggcaaccggagccatagcgccacctacaggcttccttctgccatgcactttgccttcaaataccccttttcagcagcaggtattacacgctaggtatgccaggggcgggagctcacatcaaatccactgaactgcgaggtgtcgtgttgctgatacgctcagacaaatgagcttggcgtagagagaacggtcgttgctaacgtgtatcttgcaggaagggtgtcagggctgcgctccaggcaggaagctggcagagttgacagccaatctcccatcttgatgatggggaaactgaggccgaaactgtccacagttacacagtgagttgaaggcagagctaggacaggaagtattctgtgcctctccacttggatggctgttcccctgttaattccgcaataactgtactgtgacagccacaggagcctgcagcacacacactaaagagtggctccttttcactcagaaatgtcaggagatggggccaagtttagaggttgcagctacagataagcctccgaatacgggctccatggggcctggggataggcccctgctctgaatgtggatgtgagaggatttagttcgcaaaactgactttccctcctacacaccctcacgctcacactctccatctagcaaactgtttgtcctttatggcccactcacaggttgctgtcttccaaagccttctctgatcccttctccctgccagtggagtctgtcatctgtgccaccacagtacttattcgagacattgatcattgaacaggtccctctgtattatgatgatttctgtgtctgtttgtctaaatggagagttctggtgtctccaaagctcagcccagagccagacacaaagcaggtggtcactccaaaaaggatgggtagatggaaggatgggtgggtgtgtgggtgggtgggtgagtggatgaaagggtgggtggatggatgggtgggtgggtgggtggatgaaagagtgggtggatggatgggtgggtgagtgggtcgagagatggatgagtgggtggacagcaaatgaagcacacctagaggatggggaactactctattctatattctagaacagggatagcatctgtttctaaggagacctacatctaaaagcatctgctcccaagtctaagtcaaaaagcataacagggtatgcatgctaagggcggttgggctggccccctcctcctcctgactgccccttccccctggtttcccagataacccattagaaacctgccaggggtctccaaggtgtagttccctgaatgcctgcagcagaatcacctgaagagtttgttaaaatgcaggcttctgggcccttccctcagagattctgattctgcgagcctgaggaagggcctgggaatatgtatgtttaaatcagcaccaaccaagtgaggctgatgtgaaggtaagtttgataccactcatcaacacagtacaaggacatgccagaaactgcctttgctgacagtccacccacaaaggcttaaagaaacgaccctgcctcacagacaccaaacggtagaaagtgcctatggagtcttcaaacatctagaagtccagggagagggagggcttccaactccctccacacatctcaccccacccctggcccgacccgagcctgagggggcaggcccagtccctaaagaaaaatggccttcccctccccaaaagcgacagtaagcccggcctgccttgtgctccccaatccccagcgaagcccacagtgggaggtggggagtgctttattccctgtttaccacggcagagaagccagcagctgttttcagtgtctgtttctacctaaacacagctcacgctcccaaacatgggctctgccagcaaacgttagcagacctggaacacgagtcccccattgggttcaggctggaaagggctcaagaatgaagacaggaccagaagatggttctggacgggggcacagccaaacatcttggcaactataagtgggcaagcagccctcccaggc

SEQ ID NO: 1884475 - DNA, 4001 bp, Homo sapiens
cccagcacatgtgaaagatggaccatccatcccaatgcctcatgtcctgggcttcatttctccatttctcccagggcaccctgggagtctacatgcaaacagagatactagaaagttaacttccggaaacccccttgataggccaattcgtccccttttctctctctccatgtgatttttttttttcaaaaaatatcttttgtagtttttttttccttatcaccaatacatacccaatgtggaaaactgagaaaaagcaggtttgtaaaaagaataaaatgcttcgccataatctcactctgcagacaacctacaatggcaaaaatcgcaattaattttgcaccaacctaatactaggatttcagtgcacagccttccaggcctacatttaggtttgtttgaaacaggaacatgcggttcaaccgccaacctgagcccgcgtcccctaaggccaataccaccatcctgaccctccttgggaggtcctgaaatgaccccagttccaggggcaacgaaatgcatacgctttcgagggaaggaggggaggaaacgaccctgtggcgcaggtctgcacggccaagggggttccctgagctggtggagcggcgtggcgtggcctaggaagtccctgggcgagggaggcggggcgcggcgtggtgggggcgactgggtggtgcaggcctgcgcacgcgcgcagccgtgggcgggacgggcggcctgggggcttcgccgccaggtggcaggcgtgcgccacgcccgcaggttccagccccgacccgggcgcgcggggccgactagggtcgggtccagtgtgcggtggtcgctccgctccgggccgctccgctctgggcgtcagggcgcggggagctgccccggggttctgtccaccggggaggaaagccacgagcactgagcgcctcctgagagccagccctgacgtgaactcattttatctgccacgacccagaaggtgggcgcaattttcctatgttccaggtgtgaaaagtgaggctcagggagctaggcagttgcccaaggggacacagcagtgacggctctgggacgaagcccaggtgtccagacgcgatggcctcttcccgcgttctcggcgggtacggcgcgccgcctgcctgcggcccgcggggaggtggtcgggtggccgccccggctcctcctcgggcccctgaggatttccggccgggaccccgaggagggccctgtggccttgcggcatccgtggtcacgattccagccccacacggcctcccgccagtccctgcgagtgcccaagacggggccgcccctcccgtctcctcccttctctcccctccccggcgtctcccgccgagggcgctgcaggcggcctggttgggatgagggcgggcaggcggcccacaagcaggggcctgtttcctgactcgtttgaccctggctgtccctgcggaggccccagcagacccagcaaggtcatctagggcgaaattccagtctgagccctgagcagtgacttaagttttcccgataaggctcaagaagggacacagattgtcctccccacaccccgcactctgtcagcacctccactctggtgaagcctctgctgcagacagcccggctcgagaagagacaaagatagacttgggacagataaggacagagacagccagggagagaggggcaaggagctcagaggtgaagatggggccgcgccgatggggaggcagcgggtctgcggccgccgagatgggaagtgggccctggagcgggcttgccgagcctacgaccggggctgggatgttggaggaagacgcggtcatgagggctgaaaaagaaggggtttttggtatggtagaaaaatggattgggctggcagctcgaaggccacagccctgtacctctgggcctggtctcgtgtgtgcacctgggaccggtgggtgaggggtgatgtagagtcaatgagggacgagctcgctgagtctccaggaggcaggagtggagagggcgagggagggagggtaggacctgtatacctacggtggagggggcaggcgggggacagatgctgctgggccaagactactgagtctctcctgcctgctggaggtccctagctcaggacttattccatgcacactctgatagaatatttacgcccaacactaactgtttggcttggcaaataagcaaagccataaagtcacagctggcctgtaggctcccagtcaccatgtgcagctgagtcacaaccacttcccccaccccctggggagcaagcgcctatgctcatgcctgcactcagacacatatccacacagatacccacagatgccgcgtgccactgagtcatagctacctcctcagagagcacgtgcctgcatgtacttgcacacaggtccccacagatgccatatacacctgagtgtgagtcatcatcaccactgaaccctgagggagggcacccagagtgtgttctgccatccttgcttagagatacccatatacacacatatacagatatgtgcccaccacacatcctgttgtacctgctgcatcataccagcagatcaataaatgtttgtggaatgaatgaatgagtaaacaaatgaatgaactaacaagtgaaaacgtgagtgacaaccacactgcgtggatactcagtaaaattggttggggcagccctgcggggtgggtcccaagctctgtgtccagaaggagttgtcttgctccaaatatatcctctgtgggcgggcagggagccagggctgcctcccagaccctgacttcactgggccggaggcccaacctctgaggagttgaagaaaattaacaaagaagaggccctggctttctgtagccaaggctgagctgtgagatgagttggtgggggcatgtgtactctggaaataccacttactcagagacctgagatgcaggacagagtgctctgctgaagggcccagagaggactggttctggattgggcttcttgggaactctgccccaaatgtgcagaatgtgcaggaggcctggttccacttgagatctggggcaaatacagtgcttgggctgagctggtgattgcaaaactgaggccccctattagacagttttccatctaggcctgcccttctggcttgggcttgttcccagagctgctttcctgtctctcccttgaatcttcttttctgaagcccctgtgtctctgccctaattcatcatctggaatattttaatattaccccaactggtcttcccgcctttagacagtaagacctatctatcttgcttatagctgtcagagttatttttctaaaatacaggtccaactatataactttcctgttcaaaatccttccatagcttcccacttttcagcattaaagttggatggcctcagccctgtgatgagatccttcatgaccttactcccctctacctggaggttatgaaagggtaacatgtggatggatagttgttggttatatggatcgatgggtgatgggtggactctaggataatggatgcttatagggatgaatggactagtggactgatctgtagacagatgattagaagtataaatgatcagtcaggcacgttggctcatgcctgtaatcccagcactttgggaggccgaggcaggctgatcacctgaggtcaggagtttgagaccagcctgaccaacatggtgaaaccccgtctctactaaaaatacaaaattagccaggtgtggtggtgcatgcctgtaatcccacttacttaggaggctgaggcaggagaatcgcttgaacccaggagacagaggttgcagtgagctgagattgcactattgtactccagcctgggcaacaagagtgaaactgtctcaaaaaaaaaaaaaaaaaaaaaaaaagaagtataaatgattaggagggcatgtagggttggagagatgggtggatggatggttggaaggatactgctcaagtcaaggttgtttttgttgcaaggaacaaagaaaa

SEQ ID NO: 1884476 - DNA, 4001 bp, Homo sapiens
attaagtgagaaagggcacctgtgccttcctcagacaggtggaaagagtgtcaaggacatggtaggtcccagttgtctcctaggagtgtagacatccttgtctcaggaggaatatccatgatcttcttcttcctaacccctctgcccagattacattgcatttatgttttactctaaaaccttcttcttgctgccctgactacctaatctttaaactggattggcacttattttccttgccaccaaaccttcttcgtcaatgctaaccttaaaaatagcatatgacttgttcacaacgtgcaggtttgtaccctagaacttaaagtataataaaaataaataaataataaaacactaaaaaaatagcatatgactttaggctctctggatctgaacatttctaaacagctctcagaactccaagttcactgcactacaggctggaggttggattttcctcactcatttccacagacctctcagcatgcattatcccaacagcacagtcaggatcttgccaactgccttcagtactttgaggaagaatcccctgaagcttcctttatccatattttatgagtgttcttacttcttagtatgcagatcttgaaacacatacatagacactacggcatgggaccttcgtgtccccaaatgcagaagatcctctacattgttcaatagagaaactgagtacatgaaggttaaggggcttgttcaaggtcatgtttctctagagatctgcccaggaactacctagggtagaaatgaatgaacgcagtgatgccaaacccgatcaccctgttcttgttccttctactaccccactcagcctattcagtcatattcagctcccttctctttcctgtattcatttctttcatattctctctctctctctctctctctctctctgtgtgtgtgtgtgtgtgtgtgtgtgtgtgtgtgtgtgtgagagagagagagagagagattatttttgccaaagttccataaaggaaccaagagtaaacatgtcttcctagctccactgggagtatatgaacttgagtttataggtccagagttgcaggtgtaccatctttacatgacccacagttccagaaaacctctccctcctagtactatagtccttttagaaatggaacactgaaatttacacccaatcgggtcccttctttgctgcctctttttggggtgaaacaccagcaactgctcttattagctcccccaaacacctaatgggctcaaagatagaggagcccatctcccttcctaaatccttgcctttcgtgcacatgtattggcatgacacacacacacacacacacacacacacacacacacacacacagaggaagagagagagacacacacagagagagaaagatccaaacgtatcctttggctcggatctttattttttccacctctgagttttttttttttagttcgttttctatggaaacaagcccacttaaatccctcacttatgcaaataaaagcaaaatgatcttcataaacctcccattggagcgataccgcggtagcccaggctcctgacttaaatttatgtctgattcacacagcacatgtccttgcagggtgacttttctaaacttgcaggacctcgtagcgttcctggctctaccagccctccacctgctcaccacttgccctcctgggtctttttagccccagctgccgccctttgcttgatcgctctccatccctgcactgggggaggggctccagtggtatcctatattcgtggtaactacagacaagagaaagaaaaaggcgctgcgcttaccaggtgtgcgccctgagccttgcgcccccaggcagccgctcctcgagggcttcctgcgctttcgtagcggccttggctgcagctggagcgctagtgtcggcgatggaggcagcggtgacagcaggcagaacggctgcggggcccgcggcggtggcgctcgctctctcgcgccagtgccgggagcacgtgccgcgcttgggcagacgcagctggaagcgcagagcagggctggcttatactcctgcagcgcgcggcgggggttggcagaacggccagggcatagactcagtgggtgaataagggtcttaaagcctcgtcgtttcggggttcaggcgagggtagccttggtctccctctcctgctcctcacattccctctgggagccatgggaggaggaaagctgtgcggaggaggcgtgggtggtgtgtcactcagagagaagctggggagcaggtagataataaggttctttttgactatggcacttaaacccctgacaatgattgggagaaggggcgtcactgctggagggtacagaaagctaggaagtcagggaagcccgagatgattcagaggtgtgactggttagaaagaacggcctctaatgatgttacttattaacaataccattttgcattttctgcacttcttacaaacgattcttcctacatccgttaaaatttattcttcgttggcagttgaatgtctttactttctcaaatgactttgcttcccttccttcaccacccccataactgcccaggattgtcagctatgctgaggtaatctttaaatacaaaaacagacttcgtttctgcctctgaaaaggagattggtataaattacttgcatggcttaatttaaagaaaagaaagacattgcagcaatatgattattattcccgttgtatttccctagctgaattttgggaaccaggtgctttcagcagctggatcaaagatgaaaagatgagtgcactaaagtcaaggggattgatgctgatgcattcattactaatgctcattagattttccaccagacccttgtcaataaggtaagttattgtttgatagcttcaggatttaacaacaagaaaaagagatctatctaccacaccttgttgagttttacaatggcatctttcttcttgcattttcacgtctactgatgggatcattgttactttttgtatttctttgactgcaattcacaaaacaagttttagtactttggagagaggccaggaaagctgtgagtgagcttccttaattaaaaaagaaagaaagaaagaaagatggcatagatgagaaaatagaaagatggcataggtgagaaaatacaaaaaatagtgagttcgcaagaaaatggagggtgacatgactagatgactctggtgatgtgattaagtctgatgaatacagtgatttgtttatccaattttctgaggcattaacaataaagataaggtcaaatttgggtttttgtatgagacatttagctttgagtgagcatagagcactccaagctcccagtttttctccatcagctggagctggatcaaaatacattagtgaatgagaaagaagtgaatgttgtgtagtgaatgttgtccactcagtcacttaaacttttcaatttcctacacatatttccttctctcctgtcttccagtgttatgacgagagtgggatgacataagacatgtcaaagcatgtcaaaaaatgacaaagcactccgtaaatgtaatacctgcttaccaatacatatcgacttcctatgctctaaaggctaaaatgtgaaggacattctccatgttgaacaatagttaaattttcagatgagaagtaaaacgtgattatataatcttaaaattgctcagtgacattttaaaatatagcttcatctcataattgtaaagtgctgaattaggcaaaattaaaattaaaagggatatagaaacaatgttttacattccaatagtaagttctgattataaattgctcaagggtataacttttgccttaggatgagctattaatgaacaaaatattttaattcctatgtagaacagtagaaaaaaagaatggaaaacacagtcattctcagaattgatcaagcttaaaacttgaaatctccattcatttctgtccttatatgtgagaatttgtcatgaaatcctgttagctct

SEQ ID NO: 1884477 - DNA, 4001 bp, Homo sapiens
atcatggctcactgcagccttgaactcctgggtgtggtggtgcgcacctgtagtcccagctactcgggaggctgaggcaggagaatcgcttgaactcaggaggcagaggttgcagtgagccaagatcacgccactgcactccagcctggtgacaaagcaagactccatctcaggaaaacaaaacaaaacaaaattaaattaagaagttctagtatctaaatgagcaaaatcaccaggcacagtgggtcacacttgtaatcccagcactttgggatgccgaggtgggtggaccatctgaagttaggagtttgagaccagcctgcagtgagccaagattgcaccactgcactccagcctaggagacagagtgatactccatttcaaaaaaagaattagccaagggtggtagcatgcacctgtagtcagtcctagctactggggaggctgacggggaaggattccttgagccatgattgcgccacctcactccagccagggcaatagagcaaggccctgtctcaagaaaaacacacacacacatacacacaaacaaaacacataacaggacagaacagcatcatttccttatcattagtatgaagaagtgaattgcctgtaaaagtttccattttcaaaaaaagcattaaaatatagcataaggccaggcacgatggctcgttcctgtaatcccagcactttgggaggctgaaatggattgcctgagcccaggaggtggaggctgcagcgaggattgaggctcaagagatcctcccgcctcagtcccgcaagcagcagggactacaagcgcttgccaccatgcccagctaattgtttgtatttttgtagagacagggtttcaccatgttgcccaagctagtctggaactcctgagctcaagcgatccgccggcctcggcccctcaaagtgctgggattacaggcgtgagtcaccagtcctggcccaattactttcttcaatctgagcatgagcgctggaagaaaagctctcacatataattttttagagacagagtctccctctgtcacacagactggagtgcaatggcacaatttcggctcactgtaacctcaacctcccgtgcttgatcgcttatataatctctgctcactgtaatctcaacctcccgggctggattccatatatataaatacatacatatatttgtttgtttagacgttatctcagtctgtccaacaggctggagtgcagtggcgcgatctcggcccactgcaacctccgcctcccgggttcaaacaattctctgcctcagcctcccgagtagctgggattacaggcgcccgccaccacgcccggctaatttttgtgtttttagtagagacggggtttcaccatgctggccaggctggtcttgaactcctgacctcgtgatccacccgcctcggcctaccaaagcgctgggattacaggcgtgggccaccgctcccggccgattgcttatatttttaaaaagatgttttcttcgtttcctagccccttctaacccgctacaaagtttcaaaggcttaatgctatcgcaaagggccttcagaggtcaagctcgggggtgcagctccctaatgagaggcagcctgagaggggaccgaccccgcccaggatgagtggcgccaggtagcggggggacgctcccgggggtccccgggccctggctgggggaggtgttgtggggcgcacgtacccaagctcaggtgggacgactgcgcggccgcggctgcagctggcgctggccattgaggggcttctgcgccaccgtgcgatggtgcccgccaggtgcctgccggttggtgcgcagcgcctgttcgcgcagagtctggcctttgctgcgcccggccaagtcgtaaatctcctcctcgtagcttacaggcgacggcggccaggccgaagcctctggacacagaagcgctagttcagcggcgggttacagcccgcccggccgcctgcggccagtcatccgcacatgcgccctcctggaagccccagcagcccctccgcgagttccgattggctccgcgtgagagacgttcctcggcgacgccatagaggtgggccttcggcgacgtcacaggcgagggcgttcggcgacgttactggggctgcacggtgcttgtagctgggcagtcttatcatcagagtggagcctggtaaccacgacctccccgccaggtcctgtgtgttgctagctggagaagggtagttgaaaactcagaccaagcacagtgtttatatcggtcaaaactggaaaactatgtccgggcgcagccgaggctggaggatcccttcaggccaagagcaacctagcaatatggcgcgaccggatctctgtagtcctacctcaacccccagctacttgaaccccaaggttgaaggctccagtgagctatgatcccaccacagcattgcagcctgccagactgaggtaaaccctgtctaaaataataataataaaaaaaaactatccaagtgtgcaaggggagggactgcttaaaaaaaacatgaggctggctgggccctgtaatcccagcgttttgggaggccgaggcgggaggatggatggcttgggctcaggagtttgagaccagcctgggcaacatgatgaaacccggtctctacaaaaggtacaaaaattagccaggcgcggtgcgcacctggccaaatttttgtaccttttgtagagatgggggtctcgctatgttgcccaggccggtttcgaacaactgggtttaagcgatcttctcaccttggccatcagagttgtcgggattacaggcgtgagggaccgcgccctgcttggattaggctatttaataacataaagtgctcatccaggcttgctggctgacacctgtaatcccagcactttgggaggccgaggcgggtggatcacctgaggtcaggagttcgagactagcctggccatggtgaaacccagtctctacaaaaaatacaaaaattagccgtatgtggtggtgcatgcctgaagtcccagctcctcgggaggctgatacaggagaatcgcttgaacccaggaggcagaggttgcagtgagccgagatcgcaccactgcaccccagcctgggcgacacagtgagactccagtttgacaccaacctgggcaatgtagtgaaaccctatctctataaaacaaacaaaaaaccgaggtgtaaatgtgtccacctgtggccctagctacttaagaggctgaggcaggaggatcacttgaggccaggagctcaaggctgcagtgagctatgatcatcccactgctctccatcctgagcaatagaatgaaagcctgtctctagatagttagctagctagctagataattgacacgtagttttctttctttctttctttctttttttgagacagagtcttgttctgtcacgtaggccggggtgcagtggtgtgatcttggctcactgcaacctctgcctcctgggttcaagcgattctcctgcctcagcctcctgagtagctgggaattataggcacacaccaccacgtctggctaactttttgtatctttagtagagatggggtttcaccatgttggtcaggctgatcttgagctcctgacctcgtgatatgcccgcctcagcctcccaaagtgctgggattacaggcatgagccacctcgcccagccgatatgtagttttctatgagaaatttttttcctagatttgaacatgtttttctaaagtagcattcaacacatcagcattttacagtgttattagttgtaatatgattatgtttttctgaaatacagtatcctttacaaaagcagttttgtctttcaaagcacataggtcctcaagtgaatttgtctgatgttgacgaccttggtaccattttgtccacttgattggaatagttagtaatttcaggtcactattggccttagaggaagagcccaaaggcaacaaacaagggcactggtgtccagttgccttctaga

SEQ ID NO: 1884478 - DNA, 4001 bp, Homo sapiens
tatccaataggtgcttagtttcaaaactaatacaagcaatttatcaagaaaagcctatacctaataagctgtttttcttctctgttctgcctctttgtcatatgcttgagcttaatgaagactaccctctgcagctgcccctgggggcagagaagcaagcaatggagtaacaaaggaagactgaggagcccctggcccctgaggaccttctctctggccagtcacagccgtttatgtttcaatgcagaagatttcaagactggtttgagaaaaagaatcttatcttggggattaggttccctgtcaaaggccatcagatggacagctatttaccaggcaattagcctaagtatcttaggtaatgataaaaaacaaaacaaaacacaaaaaaacccttatattttcctattggaaccttttattctattttgttgatgcttaaggaaaacagctttgcccataactcactgtggcctggagttatgacaccaacttgtatttggccaattaaggaagaggccaaactgcattcttcttagaaggtctattcagttgataagtggcacttaactgatgttttttttcatataacctttgcattgattatgccccaagagataagggacagatggtaattcagatgagaacctctgaaaagatttatcagttttctgtcccgttccagccagattttttggaaaaccttggggaaagactgaaattccccaccaatctgagactgtatgcgagtttttacaacattaattggaaaaaacaggaatcccaacatggcacccaatagacctccaccgataaaatcattgaccaaatgagaattgtgagtcgtcgcggtaggcagatgctccttaacgtgacctcgaaggccgaaaaaaaaaagacattgctgagtccattctggaaaagaatgggcaccaaacctcgataaaactctccaattccatgacatttcagtgccttgaaagcctgataaatgttggcaaatttgtcatggtgcttgtggtcttgaagcaatgtctgaagtgaaaattgcttccgttgtccctgcaagcactgctgccacgccacaggttgcaaactctggagcactgacatgcttgtggagaaggtaggataaatcctcatacagaccaaacgtaagtgcaagtgtagttgtcttctgcatcaatcggggaaagattccccgatacaagtttcgaaatccatccgttctcaactgaagtattgcatcccccgttttgatgccatacagctgttgtggaaagaggaccttctgaatgggaaatgtgattgcgacgttgttgaaggctgcacagcagccacacaagtaatgcttcatttcactaaatctgtaatatgaggtgacatatcttgtttcgaagatgttagtattggtggtctctttccatgagcttctgaatccatcatgttgcttaagttcttcttttttcatgaaggactttttctttttttttttttaaacctgtaacaccatccaagcctggagtttaacagaatgatagctttttgataatattcccaatttcttccattgttattgttctgttaggttctctcttctggagtcaattttgataactggatttccgttctccaggcgtccatttccccagtctgtgaaaagcggggagggggttggacaagatcactaaaccctgttccgtctttgacactccacagtcagcggtcccgaggtgaggaggccagaaatcccagtctcccgggaggcaggggcccttgcgcggtgccagctctgctccctccggagctcaggcagagccaggctcctacccgcccctgcggttcctgcgcaccagggaggtgcctccccagcccggggcgcgaccgaatgaaggcacaacctccttcgcgggaaaggtcgcccagcagccggacaaatacccaccgcaggagaaagagccgggaaccgaagagactcaactgattccgcgcgcgccgcctgggcgcgtttcacctctctccaaccatatgcgaggggagcccggtccttccccacgcccgccccgcactcacccatcctagttagggttttctagaaggacagtactaataagatagatgtatacataaaggggagtttcttaagattattgactcatactatcacaaagtgaggtctcacaacaggcccgtcgcaaaatgaggagcaaagaagccattctgagtcccaaatcctcaaaagtagggaagccaacagtgtagccttcagtctgtggtggaaggtccaagagtctcaaagctgaagaacatggagcctgatgttcgagggcaggaagcatccagcacgggagaaagatgtaggccagaagactaagtcagtctagtccttccatgttcgtctgcctgcttttattctggccatgctggcagcccattagattgtgcccacccagattgagggtgggtgtgcctttcccagtccactgactcaaatgttaatctcctttgacaacaccctcacagacacacccaggatcaatactttgcatccttctatccaatcaagttgacactcagtgttaaccatcacacagtccttatggccttgactgcctttcatatttacttaaagaaacagagcagtgtaggtggcaagatttgcaggaactcaagttccaaccattgggcctgtgattcctctgtggctggtcctggtttaaaatctctctgtgggtgagcatcatctcagtttggtctggttttcctttctgctctaacaggacggtactgagttcaatggctcataattgctgtgttctccctcccccagcacccgatagtccacaaaccatgcagctgctgctgggctgtgggagagagggggtgtcagcaattcaagactgttttttctacctcttcagagcctttcagtgataccaagttaataccaggcactatgagggctcacctaatttacggttcttaagaaggttttgtgtgtgtgtgtatgtgtgtgtgtagatggttgttaaattggtgtccttgtggggggaatgatgggtggagccttctattctgccattttgccctgcctcccctttttcattttttgaaataatttgagaagaattggtgttagttcttcattgtaagtttggtagaattcggcagtgaaaccattcagccttggggcttttctttgttgagagactttttatcactcattgaatcttgttacttactcattattggcctgttgaggttttttatttcttcctgattcaaccttggtaagttgtatgtgtttagaaaattatccatttcctctaggctttccagtttgtcagtgtgcagttgttcatactagtctgatgatctttttatttagatgttatcagttgtaatatctctttttcatttctgattttatttgggacctctctttgtttggttggtatagctagtagtttattgattttatcttttttttttctttttgagataaagttttatttctgtcacccaggctggagtcagtggtgcgatcttggctcactacaacctccacctcccgggctcaagagatcctcccacctcagcctccgaagtagctgggactacaggcatgcaccactgtgcccggctaatttgtgcattttttttttttttgtagagacagggtttcactatgttgcccaggctggtcttgaactcctgaggtcgtgatccacccacctcagcctcctgaagtgctgggattacgagtgtgagccaccttgcccagactgagtttatctttccaaaaaaccactttttgtttcattgaacctttgtatatattttttgtttctattttgtttacttctgctcttatctttcttctttctactaattttgggctttgtttgttctcacttttttagttacttgaggtgtatcattagattgtttgttggaaatctctcaatttttttgatgtagatgtttattgctatggactt

SEQ ID NO: 1884479 - DNA, 4001 bp, Homo sapiens
gaaataagtgcaattaacataaggatattttggaagggttgaaggccacagtcagaatcaaacagaaaactttcaaacccacagagcaaaatgagaactttcatagctccttgatctaccgtatctgaatagaaataggataacgactatccaataggtgcttagtttcaaaactaatacaagcaatttatcaagaaaagcctatacctaataagctgtttttcttctctgttctgcctctttgtcatatgcttgagcttaatgaagactaccctctgcagctgcccctgggggcagagaagcaagcaatggagtaacaaaggaagactgaggagcccctggcccctgaggaccttctctctggccagtcacagccgtttatgtttcaatgcagaagatttcaagactggtttgagaaaaagaatcttatcttggggattaggttccctgtcaaaggccatcagatggacagctatttaccaggcaattagcctaagtatcttaggtaatgataaaaaacaaaacaaaacacaaaaaaacccttatattttcctattggaaccttttattctattttgttgatgcttaaggaaaacagctttgcccataactcactgtggcctggagttatgacaccaacttgtatttggccaattaaggaagaggccaaactgcattcttcttagaaggtctattcagttgataagtggcacttaactgatgttttttttcatataacctttgcattgattatgccccaagagataagggacagatggtaattcagatgagaacctctgaaaagatttatcagttttctgtcccgttccagccagattttttggaaaaccttggggaaagactgaaattccccaccaatctgagactgtatgcgagtttttacaacattaattggaaaaaacaggaatcccaacatggcacccaatagacctccaccgataaaatcattgaccaaatgagaattgtgagtcgtcgcggtaggcagatgctccttaacgtgacctcgaaggccgaaaaaaaaaagacattgctgagtccattctggaaaagaatgggcaccaaacctcgataaaactctccaattccatgacatttcagtgccttgaaagcctgataaatgttggcaaatttgtcatggtgcttgtggtcttgaagcaatgtctgaagtgaaaattgcttccgttgtccctgcaagcactgctgccacgccacaggttgcaaactctggagcactgacatgcttgtggagaaggtaggataaatcctcatacagaccaaacgtaagtgcaagtgtagttgtcttctgcatcaatcggggaaagattccccgatacaagtttcgaaatccatccgttctcaactgaagtattgcatcccccgttttgatgccatacagctgttgtggaaagaggaccttctgaatgggaaatgtgattgcgacgttgttgaaggctgcacagcagccacacaagtaatgcttcatttcactaaatctgtaatatgaggtgacatatcttgtttcgaagatgttagtattggtggtctctttccatgagcttctgaatccatcatgttgcttaagttcttcttttttcatgaaggactttttctttttttttttttaaacctgtaacaccatccaagcctggagtttaacagaatgatagctttttgataatattcccaatttcttccattgttattgttctgttaggttctctcttctggagtcaattttgataactggatttccgttctccaggcgtccatttccccagtctgtgaaaagcggggagggggttggacaagatcactaaaccctgttccgtctttgacactccacagtcagcggtcccgaggtgaggaggccagaaatcccagtctcccgggaggcaggggcccttgcgcggtgccagctctgctccctccggagctcaggcagagccaggctcctacccgcccctgcggttcctgcgcaccagggaggtgcctccccagcccggggcgcgaccgaatgaaggcacaacctccttcgcgggaaaggtcgcccagcagccggacaaatacccaccgcaggagaaagagccgggaaccgaagagactcaactgattccgcgcgcgccgcctgggcgcgtttcacctctctccaaccatatgcgaggggagcccggtccttccccacgcccgccccgcactcacccatcctagttagggttttctagaaggacagtactaataagatagatgtatacataaaggggagtttcttaagattattgactcatactatcacaaagtgaggtctcacaacaggcccgtcgcaaaatgaggagcaaagaagccattctgagtcccaaatcctcaaaagtagggaagccaacagtgtagccttcagtctgtggtggaaggtccaagagtctcaaagctgaagaacatggagcctgatgttcgagggcaggaagcatccagcacgggagaaagatgtaggccagaagactaagtcagtctagtccttccatgttcgtctgcctgcttttattctggccatgctggcagcccattagattgtgcccacccagattgagggtgggtgtgcctttcccagtccactgactcaaatgttaatctcctttgacaacaccctcacagacacacccaggatcaatactttgcatccttctatccaatcaagttgacactcagtgttaaccatcacacagtccttatggccttgactgcctttcatatttacttaaagaaacagagcagtgtaggtggcaagatttgcaggaactcaagttccaaccattgggcctgtgattcctctgtggctggtcctggtttaaaatctctctgtgggtgagcatcatctcagtttggtctggttttcctttctgctctaacaggacggtactgagttcaatggctcataattgctgtgttctccctcccccagcacccgatagtccacaaaccatgcagctgctgctgggctgtgggagagagggggtgtcagcaattcaagactgttttttctacctcttcagagcctttcagtgataccaagttaataccaggcactatgagggctcacctaatttacggttcttaagaaggttttgtgtgtgtgtgtatgtgtgtgtgtagatggttgttaaattggtgtccttgtggggggaatgatgggtggagccttctattctgccattttgccctgcctcccctttttcattttttgaaataatttgagaagaattggtgttagttcttcattgtaagtttggtagaattcggcagtgaaaccattcagccttggggcttttctttgttgagagactttttatcactcattgaatcttgttacttactcattattggcctgttgaggttttttatttcttcctgattcaaccttggtaagttgtatgtgtttagaaaattatccatttcctctaggctttccagtttgtcagtgtgcagttgttcatactagtctgatgatctttttatttagatgttatcagttgtaatatctctttttcatttctgattttatttgggacctctctttgtttggttggtatagctagtagtttattgattttatcttttttttttctttttgagataaagttttatttctgtcacccaggctggagtcagtggtgcgatcttggctcactacaacctccacctcccgggctcaagagatcctcccacctcagcctccgaagtagctgggactacaggcatgcaccactgtgcccggctaatttgtgcattttttttttttttgtagagacagggtttcactatgttgcccaggctggtcttgaactcctgaggtcgtgatccacccacctcagcctcctgaagtgctgggattacgagtgtgagccaccttgcccagactgagtttatctttccaaaaaaccactttttgtttcattgaacctttgtatatattttttgtttctatt

SEQ ID NO: 1884480 - DNA, 4001 bp, Homo sapiens
agcatcaccccacaacctcagcggatattttcagaaaattagagtagtggcagagtttgagagtcatgccgacctgagatcactcctctcaactgacttttgacctaaagcatgctctgaaggcattctctcagaatccccttcaactataatatggcaataatagcacaactgtattgcttggtttaaaatattaaatcagagagactgcatgaaatagctgtcatatggtaagtattttttaaagaaaccattattatatgtatttttttgttattgtaataatcactgaatgaaagctgcagtgatagtaaaaatggagagaatcaattagaggaaacaactcaccagcaccacagttttgattccaggcagtgatgtaatgcttaaacactttaaaggatactcttcctcagaagttttagttaacaatagctgactaaagttggttgtttataattatcaaaccacaacttgtttttgactactggctttcaatttctactgtctattttttaatgccttgattcaaatccaatgacctgtaacatcagcctgcttggctgaagaggtagccatgtttatgaatttgactaactgatgcctagccaaatgctttattagtttcatgaagaagacaagtgaagaaaaccaccaacctctatattttgggagcttaagttaaatattgtgaggtgaaacataaaccccagagagaattatactacagggagaatcaaaggagaaaataaactcaacgacgaggaagtaggagtgaagtaaatacagtaattgttttatgaagctgaaatcatactttacagggattaatggaaaaaaatggatacacatatttcaaaaggtagaaaaacttgactgaaaaatcatatttttaaaaacgcaatagggagcaaccatatgttcctgagcaaaaagaattacattaatagatcactagcaggtaagcagagacaggtaactaactgactgactttcctaataatactaatctgcagaaaaacctattccagatcagctttatagggattatctgcagatatacagaaattaataaatgtctgcaggctatttaagattgatctattcagggtaaggaaatgggtagtcatctaattttttttatgtgactacacattactgtgatataaggtttagaatccactgatctagtcccatttatttttcagtgaggagaatgaagccaaagaagcgatatgacctgctggaatactatctgtctaaatagctcatgactctatcccttaggctttttcagcttctatgtataagacaggagacctgaaagttgtgtgcaggaagaattggaaggttaagtcctggagagagggagatcaattaacaacaaaacaaaataaaacaactgtgatagcaaccagtgaaatattgcagtaacgtagtcagtacaaggactaaagagaaagggagaaaaatggaataactttaaacagaccaagaatgtaattcacaataagagatggcaaagagggtgacgacaactcagaagctctcatatctgattctgggagaaaggtttataatctgggcaataatttggaaacaatagaaaacagagaaaatttcagagtgcatttggaaacttctagaattttctcacacaaataataacttcctctgctttcttcactctccctttgattaccagaagctgaaagcagggaattaacttctttctagctagaagacatctggagaacatattctctccttcagtgtctaatactagctcccgtgattcaaactacacacaaccagtaagaaaaaagattcagcatgcactctattggcccatttcatgttttgtgttcattacacagcaataaataaagtattttctaagatcccagtcccaaactcctattcagaagaggactcacctgccatagataacagcctccgtcctttcttacagcactgaaaaaaggctcagactgaaaaatgaaagtaaactgtgtatgtacttattgcaaagaatggaaatatgtaatcacagattgagagactgctgcttagaaattctaggctcattgtcaagaaattccttgtcatcagcaaattggcatccaagtactggactctagtttcttcccgtgggaagaaacaaagaatggaaacgaccaacattgttatgtgcgttgacacttcagcctgtttttttccctccttttccttttcctgctctgtagtccccacaccttcttctatccatctgtctcctctttttgatcgctcagtttttgtttctctaatcacataaaaacacaaattctgaaggagtttaatctaacaagcctccttttatttcctcataagaattaaccagatagtttatatttcctgtttaaactgtgttattggatcctgaaggtgccttcgcttttctgtctcattgttgtcttaacctttggtggaaatagtgctgaagaaaccctcttctctactccatggcatgctttcctttagctacctaatatggccataatatttaatttttaccaaaagtgaaagtttacctctgctttttgatattccctgaacaaaggctgattgtagaagcagtctcaggctgtagtacaattaatgtgtgattgtacaaaagagagatgcccagaagaatagttagtaaaaggagaaagtaaaagacagtgaggtgttgaactttgaaagttttcaagaggtcagaaattcatcttaccttttttgagtttaggattagaagaggctcatgattacaacccaactggttgttcttccagtccttcaaaatcttcacagcactgagtgactgatttgaccctaaactctttttccttgcacaatgcaggtgatgcaggtgcataattttgcattcagtgcactgtagtgtttcttcatagttgtatgttctgtctgctaatacttttatgtttgttgactgtcataccttctcaaggagactgagctattagggatgaaagcgttaatcaaaatttactttgtatttctcaattctcttagctaaaggtacaaatatgcagatcttgttcatggatttttcaatagtaagctctgggatttgggaaaaaagatcccctttgcacaccattctgtcactgtcataactgcctttcttctccccatctctcctgctaagttctaaattctttgaagtcgggtacctgctgtaatttatatctgtgttcctaaaggagaaagcccagaaaatggtttattaaagaaaaaaaatggtgctattagccagttcaggtcttatgagtcaagtctaaagactaaatccataaccttttctacattcagctcctgttttttcaatggggtgaaaaacaacaacaaaaacaggacacccttttgtttttatatcagacttaatggaatgcttaagtaaatgtttgtttttttaacagacatgactctaaaaacaggtgcacaatgagggaattcctgacttcctatgagaaaaaaataaacatttaaaaaatggccccactaaaagatatgcaagttataaagtcacaccaccagtggtaatatacacactctgaaaaggaaagtgtccacgctgtgtgtaaatattcccctgctgaaattagagagaaacacctaaaagtgagcattcataatcttatggtcacctcaaaaataatcaactgacccacagaaagagggcactaagaacagaactttgagagaagagcaatgtacactgcactgatcagaaggaaaatattccttcagtattcactgtttattatattacaggtagagtactgctattccaaaatgctgagaacaaaaagtgttttggatttcagaactttctgaattttggaatatccacattataattaccaggtgatcatcccaaatccaaaaacctgaaatctgaaattcttcaataagcattttcttttttttaaagaggaaaatggttatttattgtt

SEQ ID NO: 1884481 - DNA, 4001 bp, Homo sapiens
agttcgtaccaaatattacatgggacataggtaaaaacaataattcactgtttatctgaaattcaaatttaactgggcagcccacctttttatttgctaaatctggaaaacctaacagtgctttgttaaaaattctcagaggactcggagaacgcttcctttaatgcacctggggatttgtatgcaagctccgcaaacttctcaatcatccagatttcatgtctgttaatgcaactaggtttctttctgaacatctcagtaacgtgctttaagaaatgctgcttaatttattacatgacattttcacttattttgtccatttcatagaatttttcttataatacaatttatcgaagattttacaaagaatactgtaattttgcttaagatctcttggaaagctaacatttatagagttattatcatgcctcagttaagtcctggctgcaagtattaatttttgaaattttcatattttcaattaaatcagcagaatgcaaaaagagaaataaacaaatctttgatttggagatttattttcttcattaatcaagcacagcaatacatagtatccttactaacagccttgcagaagcagcctggcaggcggaggtggagcctgtgatgtaactgcggtaggtctttgttggaaaagccttccctaaatgtaaaacatctgtaaattgaagcacttcagcttcactgtgcatgggctggcaagattaaagagttgcttctttcagcatcctgtactggaggcttaaaattttgttccacagaggaattccttataggtctttacgaagattacgtatctatctcaccaaagctgggagaaaagcaggctttttctgcaaaagagaaccatttcgagtactgattgctgtgtgtgctggtttactggtaaatggtggtgatgcaatggaagttataacccaaagtgtaggaagacgccctacaacctgttccagtcctcaacgttccctacgttaatgggttcttctttcagtgttcttgacagtgatgtcttacagagaagacatttatttcttcttcctatgaaaaagattaagatgagagaaatacctcccaatgtagatacaagagtgtgcctttggcaaaataccaactaaactgacccccgagaaaacttctgggggagggaatgactaagtctgctgtaactacgtgttgtcataataggttaatgaattaagacatttatcccaatacaagcatactacctgctttccaccatattggcagcaccagttaaggacggttgtcaagccaccggcacaaaacgtatacattgcagagatgcagaacaatgcctggatgcctgcccaaaattggtctctccaaatgacagactcaattgatagtaccaatctacggcccactgggggttagcagcgtattttcctaggtggtgggggaaagggatgaaatgtggaaagctcagggcactgtgcagagcagaaaggctgacaacatattcattaaacttgatctgaagcaagtgagcccgtgaggtcgttcctgaaatattcataagatgtgttaccgaactcgccgcttagaggttgagcataaacactgagtcagaacagcccgtacccacacttggaaaacaaaaaaaagcacccacaacagctcaccccaccaccacactccactgctctgcttttaacagccccgtcagctgtcagctgtcactccccactcggctgtccaattctacctgcccgggaaagagatgctccaatattgaagtgcggagtttcccagcagttggaggaggcgcagctcaacagcccagccgaccgctcctcccagctcgctgcgcggaggaccccacagtccggcggccccgcagcccggctgcctagctcctccctggagaccgaagcccacaaggcaaggggttcccagggacccagaccagcccctcgccccagccaggccgcccttgtcccgccttccattttggctctgtctgggatcccttccccgagccctcggcgttaggtcgctaggcgacctacgcccgggccgagatgcaaacagcctctcgcgccgacctgcagcctctcgggtgttaattgggaggacaggatagaaggggaaatcactgtcctgggtgaccccggagcccctgcaccaaggcagagtgcactttcattcccgttccctctctgcccccgatgcttagcatttctgctgcctcccaggcacagcgcagcttgcgtgatgcctcgcgtcctcgccgcacctctctcctccccaagggcattcgcccctactccctaggctcctctggggtcgccaatcacctggactctggcggcggtaggctcagcagctcccggcgcgcggcggcgtggtcttcatctccgccttccccaggcgctccggctacgcgctccgcggcggcgagcgacgcgctcggtcccgggcgccgaggctggacaggggcggccgcggctgccgcactggctgcgggcgcggaaggggcgggggcggggcaggaatctgggtcgcgtggagcggagcaagccgggatgcacccggggcggctggcggcgaggaggcgaccgagagcagcgggggagggcgtgcagaggcttccctgggagcacgaagcgggcggctactgagcatgcccagtccgggagccgggggcgcgggcgcggtgctgggggagagagcgcggcacccagtgccggaatctggggggaaagggttaaatctgcggaccccgctgctgtgggaggtggctggtgtggcccagtttaattgctcccgggtggcctccctggaggagcccacgacaggaagatggtgaacctgagatgacctgtcaatgggattcccagacagtccgggcaaggtgtgttccccgccctctccctggataattgtccagaagtcaaactttgttttagttcagctccaacctccctcgtctcaccgagcacccagtgactcttccaatcctgatccccacccttcacctgccttcccgggactgcagaaccctatccctcaccccaaccggcagcccccgcctttcccactcctggcccagtcgggtcagattctcaaagagccagctctttaattaggtgtaattgagagatcgtgtcaatcctgcgaggtccatatctgcatttcaacaagggctttagaagcaataccgtaaccccggggttaattataacaggatgaattatagacaccctcgtccggggctgtttgggggaacattgcttcgtggggccccagaagccacttcatacagacagagagagagagagagagagagagagagagagagagagagagagagagagagagagagagagagagagagagagagagagagagagagagagagagagagagagagaaacctgtgccttccggattgcatttcatgtttgatgaagaacgttttctccatagctaatcaaaaaagtctctttaatgaggccgcatggggttggggaaagaccaaatgagcttcgaggtcggcgcttattttagtttcattcatcactccaagccggttacctgaccgtcttgtgcctctgtttcctcacctgtaaaacaaagggtggttaatacctacctctgcgggctgttgtgaggattacttgggcagctggcggcgcggagcagcctggataccaaagcatctgcctgtcccgcagtggatgttccctgaataaaagtctctgcaggttccacctccactattctgtgtttatgaaaagttgggttagtgataatccttaaatgctgaacatttatcttatttcctcttcacattaaatgaccttaaagccttgacctttctgatttttttaatcattgttaaaagcattagccactatttacttttctttcttttcagggagatatgaaggatacctccctgaataaacgtcttggaaaaagatagacctttggagggaaaagcttctcgggagagattc

SEQ ID NO: 1884482 - DNA, 4001 bp, Homo sapiens
ttaaaaaacacctccaattacaaaacacagatacatgtggagggaacagaaattataaattaaaaccatttgtttttcagctgggctacttctttgtaacagagaatgtatccattgggtaggagactgattttaactgagcaaaatcctccagttaaaagtaacctaatccttttttttttttttttttttttttttttgagacggaatcttgctctgttgcccagcctggagtgcagtggcgcaatctcagctcactgcaagctccgcctcccgggttcacgccattttcctgcctcattctcccgagtagctgggactacaggcgcccgccaccacgcctgctaaattttttgtatttttagtagagacggggtttcaccgcgttagccaggatggtctcgatctcctgacctcatgatctgcccgccttggcctcccaaagtgctgggattacaggcgtgagcctccgcgcccggccacctaatccattttttatatgtgacacttttattttaagggcttaaaaagtaatccgggccgggcgcggtggctcacgcctgtaatcccagtactttggtaggctgaggtgggcggattacgcggtcaggagtttcagaccagcctggccaacatggtgaaaccccgtctctactaaaaacagaaaaattagccgggcgtgatggtgggcgcctgtagtcccagctactcaggaggttgaggcaggagaaatcgcttgaacctgggaggcggaggttgcagtgagctgagatcgtgccactgcattgcagtctgggctacagggcgagactccgtctcaaaaaacaaacaaacaaacaaaaaacagtaatccgaactgatttaaacttctttattaacagaatatatgttcaaacaaagcttaaagtcccattttctttccattggcgtctaggcccctattactcaactatccgttggttagggcctgcacctcaaggtaggcttaattgtaaatcaaaatatttactatccacacttagagggctatctgtaacatcgtttttatttatccccgtccattcgataatcgtctgaaatgcaagacattaagttgaacatcatccagctttctccctgtttttctaagcgcgatccaaatctgttacaacagggtagtctctcattctcttggtagctcaattctaccccctggccgacttaagaaattttgagtctaatacacccacctcatctttagtcggcctggtgcgccaacgcaaatttgtactgagtaccttcggaactgactagtaagtatatccaaaggtttagaaagggctgggttaagagctacaagaagcattaaccgcaacggccacaactaatttgtatccattcttagtaactttagggaaccagactgaatgcttctcccacccttttgactttcctttattagttcgcaacacaagaacatacaaaagaccgtagcgacaaccatttctgacgccttcaacttttaaatccaaattacgtgaaaccacaaagcatcagtggtgtctccccgaggaatccaagaccccccggccggttgccaagccgccggaatttcagcaggagaggaaggctcaccctcccaccgcatggcgatgcccgggagactggagaagctcaggcaggcttggaagccaatccccggcatacagcagctctcgggaatgcagagccctagagcaagaccaagggcctcggccgacactgagagcctccagggagaggtcaggtctctctttctgtcctatttctcccttcgacttccctcccagcaggctgctattgagcattcagcaatcgccagacaaagcccttctggtctgcagaacgcactccggcaagcccaccgggagaaccaaagccgcctcctcgcccctgtggggaaaatggcgctcgtcaccccggctccctcccgggtaatcacaaggaccagcctccctccctcgctacaaaatggcgcctcccgctggggccccagaatcggtatgactcgctagtcagtgaggcggggtccgtctgggataagcggttatgtcaaccagtcagacacaggagctttgattctgcactttgcgcgagccactcaggggcgggctgtaaagtcaggcttggctgacgtcagttgagtgggcgcggctagggcggttttctttcgcgtcgaccaaacgtgggccaatggaaaaccggaagcgtcctgtgagtgatgtaatgacagcccaatggaagctgggggcgggcctcagacacactatgcgggttgcggggcctgggggccggacggctgtttcctgtcctggtgcatggtggtcggacgaaggaattgttggaaaattttctcggaggttcgtatataaatgtgtttttacccagtgtgcattattctccgcctggccgccgccctcagcgcggcggcgcgggcccgcttgggcccgggctccggctcccgctgctcagcctccgccgcaggccttgccgattttatgggccggccgcggtagcggcgtctgggcagaagcggagtttattaataacccgcggccgccactctaggcggcggagcttttttcgttgaggactcaactccccccagcttgtctctgagcgatgcgccccgcctgtttccctcaggggaccgccaaggggagggagtgaaagaggggagggtggagccctcgggagccttggccgcgtttctcggcctgacctccgcgcagagcgagtccccaggcgccgccgaggcagagttccgccgcctgggacgccgggcccacgggccacaccaggccgcagcgggggcgccggggacagggctggcccaggccctcccaggacctgccggtctcacctagcgcttgcttcccatgcgtatcgtgggcagattgtttccccctcaccctttcttctattaaaaaaaaaaaaaggttactgaggtctaacatcggatattagaaatttacaattttatcctcccttttctccagttttggccaaaagagtgaacaaattcttataagtctctttgaaacgtattattgtggaacgcgaactagtttttattccttccccttttgctttggacatttgttttttccacataataacgaagttaaaaagaggaaagaagaataccattgccagcccattatttgtttaaaatcagcgtcagcctttgctttggaagtgtctaaatcagctgatataatcaagtgagaatgtggggagaaattgtaggttcgagattgtggtcggctttgtcctgaatcttaccagaagatacttgtgttttcctgtagttgacaaaaaacggtgcagtatttaatgttttttcttgctgagtatgtagatcaagtttacgtttagtaagaaaataacgtgataaggagatcactcaaaaacacccataagatgcatagctaattttgtcctggcgtattttgactgtttggaaattttttttttttaattgtcagtgtccactatttggaaattctatgagcagtcagctgtctacagatacttgagtgccttttttttttttgctttacagatgcccgcctttattttttaaaatagctttagtgatgtaattcacataccttacagttcacccatttaaaatgtgtaattaggcctgggcagcatagggagacggccctcccatgtttctacaaaaaaaattttttttaagtgaaatcagcgtgtgcctgtagtcccaggtacttggaggcagaggtgagaggatcacttgagcccaggagttccaggctgcagtgagccgtgattgtgccactgtactcccgtctgggtgacagagaccggtctcgaaaaaaaaaaaagtgataattagttgaattttagcctgggtgtggtggctcacacctgtaatctcagcactttgggaggccgaggccagcggatcacctgaggtcaggagttcgagaccagtctggtcaacgtggtgaaac

SEQ ID NO: 1884483 - DNA, 4001 bp, Homo sapiens
gccatgggggcagctggccctgatcagaactcaccttctccaccccccaatcacttagaggcttctcttctggagctctcctctcaataaatggcagcattattcatccactagccagaaccccaggcatcatccctctccctttcctctcgtccaccctacagcgacatcctgtggcttctacccccgctgaaggcttctccgtttttgccgcatctttccgtttgtcactgccgcctctcacctatttcaaccttcatttccctctcacctggtcttctgaaagagctattcccaactcaggtggaagaatccttaaacaccaccaacccaatttgtgttcacccatcatcactgcatctccacaggggtcagccagtgggaggagcactggccagagactggccaggaaagccgcagcgatccttgcattagcgttggggagagacggccattaaaaaaataaacatgaaaaagagttttattgtaagttgggtaagtgctctgcaggaaaagctctgtgtacttcgagattgcttaatcagggaaacacaatttcaatggaagcagtcagaaaagacctctctgaagagtgacttttgacctgatggagtcatggtttcctccttaaagcctttcatcacttcccctttctgaagataaagataatccagggcaaagccagatgtaattggcttctgcttcccttcctgtctaaatccgtcttcactttctccccagcttttccctctccagccaccctgctctctgttccctgaagatgtcactgaggaaacaccttcttgtcccatttcccccagccaatcctcatcaggtatgaattaacatcacttgctctaagaagccatcccggagcaccctgaggaggatcccctgagtgtggtgtcatgtatattgatccttccttataccaaacgctcttgtaaccacctcctcaaaacctgttaaaactctcaactccgtatttgtagaggaatgtcagtcttttttcttagtatagccccagggcctggcttattaaaggtacttaacatgtaactgctacataatcaaagaaataaatgaattacttcactgacgtggctttgtaaagacccagaacctcagaattagaaaggacctcagaagtcatgtgctcttcctcccaccaagtcagacatggcagatatatcacagtctctccaagccttgcacctgtctccctcgctcagccacaagctcttcacaggcagggacagcagctgattcatcttggtatcttcctcctccacagaattatgaaccagagagctccaaaaggatcatgatctccacccacaggctagaaactatgtgggacgaagccagcaagtgacttcctaaagggatttcagcagagctaactgtgaatagccccatccagactcctcctgctgaatttcctcatctgcttcgtttcacggacgctcactccaaactcgcggccgccctgccccgcctgtcatcccatagtacccaagattcccactttacagcattccattttcttccaagaattcccctccaggcatcacactgtgcccctcctgctggccaaatgcctagagacgccctggcttctcctcggcactgtgatctgttatagggaattaacaaggagccaaagactagcacacgtgcactcgcgcgcacacactcacctcagggagctccagaaacggcgttttcttcatttccccgtctttggggcggcctccagctttaagtcctccacttttggcagcagcctttccctttgggagaaagacaagcaactttagagtgatatggaaatctccccctaaacatttgcaagccttgcaggacttggagctggtcccaaagcaaattcaatcagccctttcttcccccgacacttgctgcctccagctgagccccatctcatacagtgaagcccagtgaatgggtgcacctgataagtcccgagaggccccagccccacaccaagaaaaagagcgagaaagccaccacgagaaaggaggagtggggagggaaggaaatggggccaggcctgggacagctgccatactgagcctgcttttgacaaaggcctcttcctgcactgagaaggaccttcagctaaaacatgaatttacacggcaaggaagtgatcctgctggcctgtgggcccagttcctgagcttttaaagactgaaaatgttcagcttttcagtgtttgactcagaaagccctaaatccctctgccttctcagattaataaatgatatttgcaactggatactgtgatactggtacttctcccatctcttatccataaaaacctaattgtaaaacattcactgaattcgatcctctaatgagacaatgaaatttcaaaggatccataaagacaggcagacgaaagccttcagtacacagtcctatgtgctctgaaaatataacagtacgtgtgtaattgtgtcttcccgagcagtaggagaatgggtggggcactgggagtaggagaggcagaaggacaggagactgacctaatgaacataaggttgaatgttgaaccctaattccgcagggcagccacccacgacaaaatccaaggtgttgtcctaatccttcttcatattgatggttaagcaatatcttttccagctgtcacataaactccctgactgccgtcagtacacgctaacccaggatttccctagcaaagctcccaccaaatcccattacatcaaaataagtatcaacatattcagaggatttgtacacccttaagtgaggtctctcacctcacactgtcacagtctaggcatctaaaaagagtgaatccaaggggaattgaaaaaccggatgatgaaacacctcccacggtgcagggttagaacgctatctgcagccttcaagcagcaacaaagtgttttgttgtgttgagttctgttgtgctttttggttgactcaggcctgtgtgagagaaacgaaacatgagccttgaagccagtcatgagttttactccagactctgctattttgtgacgttaaacgtagcacttaacttcttagcaccttggttctctgggatggaaataggggtaggagtggaataatacttcttttggtttataggtttttaggctcgtaattgttattatcaatgacatttgtgttttgggagagctgctgtattctccacaacgtccctgtgataggcagaagatctgaaaagcctgccctgcgcaggtgaggcagtgcatcactaggacctacacaggtacaagacccagaaagccgtatttgctgatcctgactggtaagtgacacaacatcctcatgaacaatacacaatgcctcaggtgtaaacacagatatcctttaaagcaacccagtcatttccgaagtgtgcttcagtgactatcaactatggattcctactcagctgcaacttctgatttcctaaataaatcttccatctcccaaaaagaagactgaaaacacatctctacctccccatcaaggacagtcatctctgagaagggacagggaggccccaagagcactggtcagtgacaatgtcccacaggggggcctactcctgttgctggtgcattctcaccatggagacactcccaaaccccgggcccacacagacagctcggatcaaactcatttcctgcctgcagtctgtttcactccttctaggccccttctgcaggagcccgaggatgcagctgtgtttgcactaacattcctgcaagggggagagaacattgctgcaaggcaataagaggacgataattaaaacaaacaataaaatgaaaatttcatcagcattttcaaaataggagttttcaactagcagcattttgcacagagctgggacaattccattctggcagacatcctaaatcctttgaagccgggagactacccgtgtcctttcaggagaagagcctggcggggagctcagggagccggccaggagaggg

SEQ ID NO: 1884484 - DNA, 4001 bp, Homo sapiens
aacaagaattaaaagaagtgttagagattatcatgagatctaaaacccaaatccttttattaaccttatttttagattaattttattatatcaaaagtgcattaaataatgtcacatttcaagcataacagttaatttttttgactgctatgcttgaaatttggaaattcccaatccctggaaactactgatctgacttttgtcaccacataccagatttgcttttttctaaaatttcatatgcataaaattatatggcaggtattattgtctccagtttatttcttttagaataatgttttaaaatttatccatactgatggatgaatcagtactttatttctttttgttgctgagtattattcaattttatgacttgtgatattatgaaatatatatttggtcttcaaccccctttcctggcatacaactcttaaaacacttagaaacttggaagtgatgtcttgtgtttgctaattattgactgaacttatggctagtggcctgtgggtaacttcagaatgggggttgggagaagaaaagaaaaaaagaaaaaaaaaatctttgagtcactggcggcagtttaaaaagcatgctgcccatgcactgaaacctttgtaaggcactgtaatacttggcttggatataatttcacatcatttaattgcatagcagttaattttacaccagttttgccaagggctaaaagagggattggttggaaataaattatagtttcttcccaattttggcatgattctcattaacatctgaaaagatcagagctgaaaacatctgaaaaaactctgttaattattttaaaataaacactataggctggacacaatggctcatgcctgtaatctcagcattttgggagactaagacaggtggatcacctgaggtcaggagttccataccagcctgaccatggtgttgaaaccctatctctactgaaaatacaaaaatcagtcaggcatggtgacgggcgcctgtagatccagctactcaggaggctgaggcagaagaattgtttgaatgtgggaggaggaggttgctgtgagttgagattgcaccattgcacaccagcttgggtgacagagcaagactctgtctcaaaacaacaacaaaaaaagccattataaaatctatcataaacttccaatccaaagaaaaacgaatcataaaaattccatcagctatttagtcataaatcattagttcaattgctgaaatatgccagctattactgatcactgcagttacactttacgacataggtcttcacttccagaatgctttctgtaaagtttaacaataaagaaaaaaaaatttaacaatcttgctaaaaaaagattttcaacatctgagtgattgaagttcgtagttttgataatgataaaaacaggggaaagggaaaacaaatcaaagacattctactgatttctcttagaaatagtagaattagtaccttactgtacctctcaagttacttacattaatgtctctttcatgtatttcacctacagttacatgactgattcctcaaatgcctgattctaattttcttaggagcagaccttcaaaagaaaaacaatcaacaaactgtagaaaagttcaaagaagcaaatgtctggacagttatctatatttcaactaagataccccagcatcaatttaaaaaataatcacgtgtacatttaaactactaaaaaggtgatagtacactatgaaatatagtttttttcaccaattttatgatttcattttctctaagctacaagatctaatgggtatatcatacttaccatgaaggaaaaaactgccaaaagttttatttaaacaagaaatctgagactgaatcattatttctttccagtcattctgttctgctgtcaagttttcttcacaaacaccacaacataaaccccaaatgaaatttgaaaatatattactgacctacagtacaaaacgttatactggcatgaaaacgagggagtacagactcaattcgaacagtgtatccacagctttttccagtctcttctcctctttcaaatgcaactcgctctgccacagaaactgcactgattcttctgggctgagacagtaaaaaagaaaagtgacttaacaactacaaagttagatacaattgtttattagcatttttggattattgtagtaaatctgtcctactgccagctgaataattaacagaaacaataaatgtacaaaaaatactattggtttctatggcagacactttaaaaatgttgtttttaattttctacttaaaatgattctataatttgtcattgcctccaactcttaaatagtgttcacagtgattttccagtagggaacagggcataacatacgtagggaggtttgtctttgtaactgatcaccacactaaaaacatagtttgagaaaattatttaactgagacctatggtaatcagaaagataaacaattgcctttttgccatctgtactgtgaccaccttctgctcacttattaactcagtaatcaaacattcaatgcacgtttgcatcagatgctagagatagaaaactgaaatcactgtttttgataagctcacacagcaggaaaaactgtgtgtattgctatttccgacaatcagtctgcaaaactctaaggagaatgctataatatttaagtgaaggacgtttttatgaaatctcttctgaggtgttccatgtcttctaagtacaaaagcaatctatgcttggtggatactatgaggacatgcctaatgtatagctaaaagagatacacaaagatctatatactgtatgcttctaagttgacttggatttgattttgtctaaaagttcctgatgacagggtagatttcagttccttgcttgagcaaactttttctgagtttcatatttacttaagtacctatttgatatctcaggttaggacatgactaggaaactagaggctgatgatagaatatttaacataaaacatgactttaatttctattctcctaatacaagagttaattagggtatgaggctagtaacatgtacaagtccactataacctggctaatatttatcttgcccacaaagataaaagagattgaaagctactttgttgaacacactgtgtagaattttgggagcttttactgatcactatcttctttgtactaaacaattctttcaataatcttatttagcaatggataaggaattttccagcttgtcaccattttttgaaagaagctcccaaatatccatacaaagaatgtacaaaaagagtgtttccaaactgttgaattaaaagaaaggtttaacactgtgaggtgaatgaacacatggcaaagcaatttctctgatagcttctttctagtttttgtcttacgtattcccttcttcaccattggcctcaatgaggtcaaaatgtccattcgcagaatgtacaaaaacagtttccaaacagctgaatcaaaggaaacatttaactctgtgagctgaatgcacaaatcacaaagcagtttggcagaaagcttttttctagtttttatctgaagatatttcctttttcaccataggcctcaatgtgctcccaaatgtcctttcacagattctattaaaacagtgtttccaaactgcagtatcaaatcaaaggtttaactctgtgagatgaatgcacacatcacaaaccggtttctcacatagcatctttctagtttttattttgagatatttattttttcaccattcacctcaatgagctcccaaatgtccattctcagaatgtacaaaaacagtatttccaaactgctgaatgaaaagaaaggtttaactctgtgagatgaatgcacatatcacacggtagtttcacagaaatcttctttctagtttctatctgaagatattttctttttgaccataggcctccatgtgttccctaatgtccttatgcagattctacaaaaaaaaaaaagtgtttccaaactgct

SEQ ID NO: 1884485 - DNA, 4001 bp, Homo sapiens
catatgatccttcagtacctactgttttagacacttggggcataaagatgagcaagatataataaccctggcctctgggacctcacaatctcatgagggaaacagacacataagccactgactctaaaaaacatggtatgtgctataagggataagagctgggcgcagtggctcatgcctataatcccagaactttgggaggctgaggcttgaggcccagagttcaacaccagcctaggtaacatgataagacctcatacacacacacacacacacacacacacacacacacacacacacaattagctgagcatggtggcacatgcctgtagtcccagctactctggaggctgaggtaggaggattgcttgagcccaggaggcagaggttgcagtaagctgagatcgcaccactgcactccagcctggaaaagagggtgagaccctgtcaatgaatgaatgaatgatgcagaaacacagaggaggaaatcctttgttttgctttggataagcttcttggagaatgacttttaagttgggtcttgaagggtgagtattttctaggtagaagaggaggagagaagggcctttcagagggagcagcatatgcaaagtccccaacacaagatcagactccaccttttgggggggtggtctagggtgtctggaacccagctctgcagtttagaagcctagccatcagcttatctcactcaattctcactgtattcctgggaaaggaatgaaacaagaatcatgaccttgttttaccactgagatatcaggaggtccctgctttgaccaagttcacatagcttggtggtgatggagctcaggctcgaacctcagtcctctgacttccagtccaggactctttctaagcataccctgctgctcctccacacagcatcttacaggagtagaaaagtttctggtgatcgtggaccagtttttaacacaatataatcattgcatctcttcctttctctgggaaagaggagtaccttcagtactgtttcaaagatgaataaatttaagcattgcaggaatgactggccagttgccttaatctggagcattggggccacagcagagcccccatgacctaaatcaccatctgcagttcccaggtaccaccttccatgccttcctgtaggctgggtggggagagctgctccatggaacaagtccagtgaccacggaaggaaagcaggaacaagcatggcagtaaaatgagggctgcggtggttcctcttcagccagatccggagggagaatcaacagcatcaccagatatgaacctaatacctccagtagactatgtccctatgtctcggcctagacacatgggctcggagacatgagggaggccatgtctcccaagagctgtcttacctgagtgccaaaggctgagccatgtgccactctctgccctccggcagcgctaggggccagtctcccgggagggcatggctggcccctgcactctaatcctgcccttcattgtgcctgggaacaaggaaaatgagagataccacagcagataagaatgaatttgatgagaaggggaaactccatcatcaggctccaagtggagcagatgcatcctcagggtgagatgcctcttgagaagggggccacggccaaacttccgggcaacagaaatggttgattgtgttggtcattttcaaattaatctctgaattgtgcttacacacctttttcatgttatgggtctcactaacaacatcataatggcattcacagaaatcaaaagtgaagacactttttaattgtccacaaacctgatgaccctctccaagtcaaactgttatacaatgctatttttctcactttctaggtctcattcaaatgcatattgtctcctttcttgaaagcccctctcctcttacactccagggcagcacacttacccggtctttcttccatttgcctgcccactctttctcagtctcttttgctggtgcctcctcatcatctaaacttgacccttttttcttcctcatctaggctcagttcctttgtgacctcactgggtcctgcggctttagctaccacccataagctgagggctacacaattgatacctcctgaccgaacacttctcctgagtcaaactcatttccccacctcttctgggatatctaattggcatctcaaaccttgcatgtcgaaagcataactcttgagttcttccccaagtcaccccatcgtagtgagtggcaccaccacagcttcaccgaggaagcccagaccctaggaatcatcctggattcctttctttcctctgccctccacatccccgcatcagccagccctgtcagctgtccatttaagtacatcctggccctgctcactgcatccactgccaccatcctatccagcccgctgccctcccacttgagctattgcagcagcctcccagttggtctcccttcctcttctcttacccctgcaggtgtaaaggcttaagtcagatcatgttactcctctgcttggaactctcagattgacccatcctccttggattgaaaattgcagtctttatcacgacccaaccagcagatcccatgccaactctccatcactactctctccagccatactgacctcattattgtccctcagcgtgcaagcctgttcttgcctcaggacccagtctttccatcggaaatgatctttcctcaggacttcgaaagactgggtcctcactttgttcagagaaaatgtcacctcccttgagtggcccttccaggtcatcctgtttctgatcagcctcagatactctctaccgccttacagtgccttcttgttctccacagtaattatctgtaaatgaaagcacagtgcatttttgtttgcttagttctttcttatgtcttctcaactagaaaagaaactccatgaggccagtgacttccttcttctccaatattgtatccccagtgcctggaacagcaccttgcacatagactgtgcttagtaaatacttgttgaattaatgaatgtgttcttttgtcaagtctttgaacattactccttattaacccaatgttacaacatcacaatgtcacaaagggattttttttaagagaaaagcaattttaccttcatctacccctttcaacacagctattgcggctgtgggtccttcccgtctttagctcccttagcagatctcttttttttttttttagacagagtttcactctgtcacccaggctggagtgcagtcatgcgatctcggctcactgcaacctccgcctcccgggttcaagagattctcctgcctcaccctcccgaatagctgggactacaggtgcccatcaccatgcctggctaatttttgtatttttagtagaggtggggtttcaccatattggccaggctggtctcaaactcctgacctcaaatgatagacccacctgggattacaggcttgagccactgcacccagctcccctagcagatctgatatatcatcatagctgatctcaaaaccaggctttgctcagagatcattttgcatctcacctctccctctttctcgggaccccacctgctcttcatcctctgctgccaccttgccagcccacctgctctcagagatgcgtcatgacctcatgaccacacaggaaagggctgtacttgcccatggttgtttaggacacagctgaggaaaaggggttaaaacagggaattctcttagaccccattcattcatctctcaggtgtttcttgagcctcttatccatgttaggaactgtggtcattttgtggccactgaggacaaaaaaaaaatgggtgtcactgtccagctcccaaggaatatatagatgcatatatatagcatattgtatatgcatattaatatatatgcatatgctgcgtagtgctgggctctgagggtaccgtatttagtaaataattattttccttgctgttatagaaccaataatacaggagacccaaaggaaggtt

SEQ ID NO: 1884486 - DNA, 4001 bp, Homo sapiens
aatacaaaaaattagctgggcttggtggcacatgcctgtaatcccagccacttgggaggctgagataggagaatcgcttgatcctgggaggtggaggttgcagtgagctgagatggtgccatcgcactccagcctgggcgagagagcgagacttcatctcaaaagaaaaaaaaagaaaaaaaaaaaagggccgggcacagtggctcacgcctgtaatctcggcactttgggaggctgaggcaggtggatgacctgaagtcaggagtttgaaaccagcttgaccaacatggtgaaaccccatctctgttaaaaatacaataaaaaataattagccgggcgtggtggcaggtgcctgtaatcccagctacttgggagcctgaggcaggagaattgcttgaacccgggagatggaggttgcagtgagccaagatcacgccattgcactacagcccgggtgacatgagagagactctgtcagaaaaaaaaaaaaaaaaagccgggtgcagtggctcacgcctgtaatcccagcactttgggaggcccaggcgggaggatcacgaggtcagcagatcaagaccagcctggctaacacagtgcaactccgtctctactaaaactacaaaaaattagccaggtgtgatggcacgtgcctgtagtcccagctactcaggaggctgaggcaggagaatcgcttgaacacgggaggcggaggttgcagtgagctgagattgcgccactgcactccagcctgggcgacagagcgagactgtctcaaaaaaaaaaaaaaaaaaagcagtattgcagtaaacatccttgtacatttttctttgcatacttgcacagatctgtacgataaattcctcatagtggattactgggccagaactagattatgtacattttagtaactgtcaaattgtcctcctaaaggtttgtaccaattatactcttaccaatattgactttgagtgtccatttttccaaatctctttatatttttaaaaacagagatggggtcttgatagcaagacccaggttggtcttgaactcctggcctcaagcaatcctcctgcctcggcctcccaaagcgctaggattacaggcataagccattgcacccagcctgtttttccaaatcttgaccaaccaaaggctgttgaactttttcatctctgccaacttgacaatgaaaaaacatgtaattgtttcatttacttttatccatcctctctccatcttttagcctgttgggaatctacacattctttaaatcctaggttaaaaattcatcttcctcacagatcctcccccatcaaatttctcctgtctctaagcatttatagcttttcatttatacagttattacactgctttgaattttagtgactagtctgtatgttatattcctccaaccactgtagattacaaattccttggaagtaaggacctgaactcattcacagaaacactgaatgtagagctaagctaaaattctggagatcatgttaaccaagcctctcgtttttataagggaatattaagcatttgcaggatgcgttacagttcacaaaggcttttctcagacattctattagttatattaactcctccattaaattgtaagggaaacatcgttatcccattttacagataaggaaacaactccagaagatttactgagaaaagtgatttactcagaacagttccaaggtcagaatccagcatcctggcttcattcgctgttacttccacgacatctcagctgcctctggtttccctcacagcacttagcttcacaatctctagggaatgaaatgaccaaaaaaaattgtcgggtgttgacagcagcctgaacatctgtaattaaataaagcaaacatgctgacgaccaaggatgcccgggtctacacacattctttcgcctttctttctggagtcggcagacttgcccccggcagcgaccagcgtccccacccgtgcaggcggcgtctggtccagagggaaacacggctgcgcgcggcccctttaaggctgcgggcggcgcgtgcccacaggcctttcaaatggaccaataaaagtccgatgggcggtccgtcgaggaccaataaagaacgaggacactgcggggtgtgcggcggcccaagcggtttcaaacggcttagagcaggccgcttggttctgacccagctgaggtgagtggtcggtgggcctgccccacccgcgaggccctcgagtgcaggcatcgcgcgcgcagaggagcccctgaatcctgggcggctggaggtctccagacgcgcgccccacttgccccacgaacccggcaggtctgaggcggcgaagcgagccggaggccgggggacctgcggcgggcagggccgggggcgtgggcgctcgtgtgcggcggaggccggggttgggctccaggtggccagagcgcgccgcagcgtggcgcgggtggcagcgtccgcggggcgcgggcggtgcagggccgcgcctggcggcagcgatttaccaagactagggcgggggccccgagagccggccctgctagagtgcctctcgcgtaattgtcaagtgaatgaataagtaagcgcctacgagggctgtggtggttgcgaagggccttgtcgccctggagcaaggacagcggcaccggggcctggccgcacacctgtgtccctgctggcttgctgcgatgtgaacgattccgatcatccaccaccccgcccttaacgactggctttctctctctcaacgtgtcgggagcgttctggtgtccttccagccctggaggtgttggggaaccaatacaatagccagcagtgtgggttgggccttgctactttaaggtcgggctcggtgaactagattcttacttttgagctctcccctctacttgtaatcgtggtaattgttgagcaggattgaaatgcattccgttgtgtttcttggatagaaaatgatgaaagggttgttgccagagtggctagtgtgtgttagaaaatatattcgtgttgatgaatcttaacaatgagttttttattcagcatcaatagaggttgaagtggtttttgcagaacttgccccaaatttatgcgtggctctaatttaattctcatgggaccaaggcatcaaatcttggcccagaaatgctgcctgtcttatgcataattatagtaattgaaaactcatttttagaaaggtgagctcctccttcctccattttcatcaccctgaaaagtccttcttttgacctaaagagccaataaattaagctaagaatcttttgaaactttaagaaattgtagaagactttgacttctctgaagtgactggacaaactgtaatgcttttaccaaatttaatgatatagataaaggtgaaatcaatttattttgcaaccataagttaaatctagttggtaaactcatgtaaaaaaatttttaaataagattttaggctgggcgcggtggctgacgcctgtaatcccaacactttgggaggccgaggcgggcggatcacgaggtcaggagtttgagaccagtcgggccaacatggtgaaaccccgtctctctctctctctctctactaaaaatacaaaaaatggctgggcgtgatggcgggcgcctgtaatcctagctactcgggaggccgaggcaagagaatcatttgaacccgggagacagaggttgcagtgagccaagatcccgccattgcactctagcctgggtgacagagcgaccctctgtctcaaaaaaaagaaaaaaaattttttaaaaggctgttcactgaggcaatggcaagcaaaggtattccgtaacaattaacatgccttttactttattctccattactttaaagtcttgatcagttttgaattatgtttgaattatgaacagtgggtgtggtaattccatcgcagtcttctactactgacagttcagttttagcagcacctgtttttttggtgttttttgtttgtttgtttgtttgttttttac

SEQ ID NO: 1884487 - DNA, 4001 bp, Homo sapiens
attctgatagaaggccccagagaggaatagcgaagggggaaggggaaaagttctgtaaaaaaggccagctccatgactttggcagctataggggaggagggaaggtgatcctacaggcgctcagactttctaagcattttccaccttctgctttattttttatattggcctctttttccaagacaaagctggcacatgagaagtattagtgctcaacacaacctcttcttcagctgctttttctaagttaccacaggacactagatttctttctttttctgaggagctgtgaactggtgatgttggaaaggtttctggcaaaacccaagccactgctctacagtctatacacagcctctctgtaatccaaagaagtcctcagttagaagggggtggagttggagagaagtaggtcctccttgtttcatttttagcactggtgtgaacccgggtaatctgaagaccacatctgggcatatgtatgcaagagtgattgtggaaagtacagccacttctctccaccagcttccttgcccaaaaacccaccctttctccctccacccacgcaccagccagaagccacccttcatcgccttggtttattgtcatatttttgtgttaatacattctgttgatctgcaatgtcaggttggataatgaaatttaaattgagtcccttcgatttccaatagcgaaacatttgtgcatctaactccggggctgacaaacaacttaaatgcattctggagtgtcagtcacacagcactggcacccgacactgcagcggctttcttggggagctttttttttttttcctggtgaacatttgcaaaggcgtctgcccaggatgcagtcaacctgcatccttatagcaaactggcttatcagagagcagagactgatgaagcaaatgcgtgggccacccattcccttattttctggcccccaatagccagttctttaaaaaaaaacaccaaagggggagagaggataaagagaccaagaacaccaaattaactgacattttcttcaccaataaataagaaaataagggtcactcactgtatttcagactgatcacagcaacatccagatggaaatccaggtggttaagaacaagagaaaacgcatgatcttgataccaaaaggaataaaaattaaaaaaaaaggaggttgatgaagaaaaatccaactgcaattatccgtcaattttagtcaacataggcacaaatccaactgtgctctgctggtttctctcccccaatcaatgcctcaatctgccgcggtcaacttttcttctctgaaatttctttgcagatgtattattaatttcctctcctcttgtgggaaattcaaaaagaaaagaaaacaccaccacaccagttctttactttactaaaaaagccccaaacttttcattccaaaaatatctccttggctcactttctcctttatagagaaaaatgaacatacttttttctttgtgaatcctcggttcttcatttccaatcatccttttttttggggggggggaggggaacagctgctttaagattatttatttatgtcagaacacaccaacccccgcgggtctaactctggtttatttcattcttgaatgctccctgtgtgcacatatacacatttgtgttaagatccagggctcacaagaaaaagcttcgttcttccttctctcttgcacaatcagtttatccattgcgttcggttccaggagaaagctgcgtcctgcatccttcatttttgcaaggcacccaacagccaccaccaccaaaaaaaaaagtctccttttacatggtcaattcctctccccagcctccccttcgaagaatttggggagcaacttcccccccactctccatccttccggccggccccttcgccaaagatctgattagatttctcatcacaacccagtgcgcaattgaatttttgatttcagccacccggccagccaccttcccctctcccctccaaactccggttatatcctgtctccttccctccaccgcctctgcaatttcataatctcacgttaaatggagtgcggggggcgggggcgggggcgggggcggaggtagtggaggaaaatttcaaggctccgtcagctgtcaagaagaaacccattcctccccccgctactttttttttttctttttaaggctcggggtgcctttccttcctctgtccccgcccccacccccagcacccggtccagatcctccaggtgttgcagaactccgcggtcggggccgggatcacgggggagacgcaggatgcggtccctcgccggtggcccctgccagcccccgggtccccttctcctccatcagccggtagtggctccgggagcgccgaggtgatggaagttgagactggggcttttatttcaaatggggagggcgaagtgaggggacagacagggtggtaggcaaattaaaaaaaacacacacgaaaaaagaaagaaaaaaagaaaaagaagaaaaaaagaaaaaggaagaaaacgggtaaaaaaaaaattccctaatcgctggctcttctcatccttctcaaatgcaactgcagctttgatctcatttccagctgcgttgggtacattttggagccacaagttggttcccgttggcgcagaccttcccgatgtctgctagtcctctgcgaggagacgcgttctcgggagcgcagctgctccgcgccgcccttagcgccatcgccctggctcacggctccctgcgcggcagaaaccccagtccccttccatccacttcggtttgaactctcttcctccccctccctctgctctctcccctctttttctcccaaataaatgctctcccagcaccggcggcagctcttgccagcccaggctttctctcgaccaatgccacgtcctgacgcttagggtcctagcttccaaaagctcctttcggactgcagtcgccttccctcctctgcccctctttctttccccttttcctttccctttctctgcttgtgatcagtaaaatacaattacccaattacctcccatcatcttagcactgattggtcaattgcattaacacttgaagtcagggaagaggggattggagcttcagagatgtggctctgctgccacctggagggcagagccagaacagctgagtctaaaagcaacccccacgctgggaggttcaggctgtgtgggagaagtcagttttttcaaaaagcttgcctgttttcatccagaaatccaggagttttgagctacaaagaggaagacattaaaatcaaatcaccactaagattcaaaattatcaccaaacacacaaagctgttgctttcaggttgcaggttaagagcctctcccagtcaagcacactggtcccaagctgaggattaacacagtactattgcttagccgggcgcggtgtctcacgcctgtaatcccagccctttgggaggccaaggtgggcggatcatgaggtcaggagatcgagaccaacctgcccaacattgtgaaaccccgtccctactaaaaatacaaaaattagccgggagcgatggcgcgcgtctgtaatcccagctactcgggagactgaggcaggataattgcttgaacccgggagacggaggttgcagtgagccgagattgggccattgcactccagcctgggagacaagagcaagactccgtctcaaataaataataaaaataaataaataaaaaaaaagaataggctcatcagaaagaatccagagtagcttaaaagctactcgggagggaggctgcggtcgagcaggataatcttaccaggaggaagcaactgtaaaggcgagatagtagccttcagcctatgcagtgttgcagtaaattggcctgttcagtttgtacaagacatccaggacagcttgacaactcaattccaacatcccctgctccaggatgtggacttttccattaactcgtgttagagaaatagttggcacatttcaaattcact

SEQ ID NO: 1884488 - DNA, 4001 bp, Homo sapiens; identical to SEQ ID NO: 914920

SEQ ID NO: 1884489 - DNA, 4001 bp, Homo sapiens
taaatttatcttttttcttctaaaagtatgtttttatcttctaatttccctatcttctctattcttttcttcgccttcccgtacttctgtcttccagttttccacttcaaacttctatcttctccaaattgtttcatcctaccactcccaattaatctttccattttcgtctgcgtttagtaaatgcgttaactaggctttaaatgacgcaattctccctgcgtcatggatttcaaggtcttttaatcaccttcggtttaatctctttttaaaagatcgccttcaaattattttaatcacctacaacttttaaactaaactttaagctgtttaagtcaccttcattttaatctaaaagcattgcccttctattggtattaattcggggctctgtagtcctttctctcaattttcttttaaatacattttttactccatgaagaagcttcatctcaacctccgtcatgttttagaaaccttttatcttttccttcctcatgctactcttctaagtcttcatattttctcttaaaatcttaagctattaaaattacgttaaaaacttaacgctaagcaatatcttagtaacctattgactatattttttaagtagttgtattaatctctatctttcaaagagaaaaaaacttatctgcggtttcctcaagctccgcctgccccctcagcagaagcccctgcgctggctgcctcaatgcctaccgcacagctcgggcgaggcgtatttatagacggagaacaactcgcatcaccggaattcgatcaccttccgccgcctttgtgagggaggcaaaaagtagttcttcggttaaaaataggttctagttttacttttctagatttttcttaacagcttatggaacttgaatgcaaactacacatgcagaaatacttaaattactagcgtgtggaaagatttgagctgcaaactttagacaaaagaaacatggaaatcatattttaaacgggtcatcaaacacctcacaaaacccccggaacttttaaaatacctcttaaagcacttcttgtgttctcttgagggacagtaggtatagtttaccaccttttgaaggaagattaaagtgtgatagttcagggctttactttccattacgcaactgagccccagccttgcagggacggttgagaagtggcaaaatggcggactttctcccccaactgcttgcagtcctgcgacttgctcccaagacagccacacgttttgcttttttgttcgagaaatcggagcagcacgggctgtctgcttgggaaatcttagaaacgtgaaaacccactcttggaaaacgcctcaatcccacaccacagagctgctccccgcctgagccccgggggccgttggctgccagtggcccactctgatctgcggccccccagttgccgccagccccccacggcccgcacggaaatttttctaccgtttttcagcttccaggctctcctgaaagtgctcacaaggcaaatcgccatggaaagcgagttcaagtggccttttaaagtagaccaactaagcgaatggctttgtctccgaagacacagagaccttgggcagccagtcagggacacacccagaagtgtttacactgctctgggtctgcttttttaggggtttttgttttgcagattctgtgttatgcctggttaggtatgagcttcagaccttctgaaccggagcaggaagaaaaataaaagctttcctccaaaccccaagaccaaactgcagagtttgagtggttttatctaaataccaccacctggaatggccagcctataaggacagctaagatagcagcacaactcgtcgctgcgtcccaaggactctgggaaacctgggctcccggaggcgtcagaggggacctgccttcaggcgagctgaggcttcccggcgccgggcttctgcgttgctaaaatggcgctgcgcttaagagggcaggagaggccagttgcggggccccagtcctttacagaagtctcgggctgcaggctgcggaggggagagcgggggcggggagggactgcgcaaccggtggggctgcgtcagggacaaacgccgggggaggggcggctcgcgagcgccgcgcagggatacgcgagggccgtgagccgccctccctttgtgaggcgctggctcgtgggcgggcgccactggttctaaccggctctagccggtcctggccgccttcccggagctgtggcggttggcgcagcgcgtgactgcgcacgcgcgccccgccctaacgcctgtgcctgttctggggaatggcatgggggcggggtggcagctggcctgggaacttctcggtcgctactctgcgctgtcactgcacttgggggctggtctttctttcgtggagctgctgcccaacttccattttcagtctaggtcttcctttcccacctctctcctgtcctttgtcatttcctccatatagtctcgacgtcatccattaatttaaaatcagaacacaaacctcgtgtagctatcaagggccatggcattattgtaaaatatcttcgtcgtttgtatgtcaccaggtcttactagtctagaattctcggggcagaagtggtctcaggctgaccttgcagcagcctaattttttagaaaagaaactgaagcaatgacctaaaatggagagttccagggcacacaaagcttggagctggacggggtggtgacacccaccctctccgctccctcacccccgggtctttggaacctgtatccatggcttgtttttaggcagtcaactccgaggggagagattagtgacgctgtataggttaggatggcaaaactaacacaatgatacagcaactctatgaagttgatttctaaaactcctttggctcctgtaaatgatgcaggttgtgtacggtgttggggagctgccctgggggctccaggaaatgagggtcctgttttctgggccaactccctgtccccacctgcccacataaagcagggcctgttgaagcagctgttctcaattgacgctggtgaaactgttcttgttttcttttcttttcttttttatttttaagcctgtaagagtggaatattactgagatgcagccggatcccttcaggcacagtcctgatgcttgctctggggttggaaattttttagtagaattttatcgctggatgaaggaaaactgaggcaggtcacctcgtttcgcaaatggggatttgggggcctggagattttgtgatttgcctgaaatgacacacagctaattaatagcagaagctgttcttgaatcccagattttccacgtcctgctgcctcccttcctctccagcacttctgtcagtctctccaactgcggtttttctatatctgggggaggacctaggacctgctctgtactctctgctctctccttcactctagagcgagtgagatgaacgttaagagccctaaaatgctttaaattattgtcagtgtcactgcattaatttccattaccttgacagattacagaatgtttctttttttttttttttgagacgaagtctcactctatcgctgaggctggagtgcagtggcgggatctcggctcaccgtaacctccgcctccctggttcaagcaattcacttgcctcagcctcccgagtagctggtactacaggcgcccgccaccacgcccgactaattttttgtagttttagcagagacagggtttcaccgtgttaaccaggatggtctggatctcctgacctcgtgatccgcccgcctcggcctcccaaagtgctgggattacaggcttgagccactgtgcccagccgccagaatgttgtacagtcatcccttggtatccatggggccttggttctaaaacctctcctcggatgctaaaatctgaagatgctcaagttccttatgtaacctacagatatcctcccatatcccttaaatcatctctagtttgcttataatacctaatacaacgtaaataat

SEQ ID NO: 1884490 - DNA, 4001 bp, Homo sapiens; identical to SEQ ID NO: 914945

SEQ ID NO: 1884491 - DNA, 4001 bp, Homo sapiens
ggtacactctgagggagcctcaaaggaataattaatatctacagaaccattcattcatgaacatggaaggagggaaaaatactgaatttcatcatgtaaaatatttaatatcctgtttcttgtggccaatgtccaggggctttgggcttcccattagaatattttctaaccagatgaatcaaagtttgaagccgtttagaaactttgaaagggccaactgctctatataatctttttttcttgggataatgtgtttttaaaaacctccttaaaagaagtaatctggcagtcacccactggccattttgcagtcccagtattgttcctgtacggggaatactgggagctcatggtccccatggatccatgaactccaccgctaatcccatggtagtacacttaacagcaggttaaaggatgatgagtagagatgtgattttgccgttatcaaacaagtatttatctagtggaggtactgatttaacttgctagcagtttattcattccaagttaaccacttcaaagaggcatataaaactaaccaagcaaattgtttgctttttgtgtagataaaggccttaggcaaacaatttatacaacacacaccaatgaggacagtctttcactttgggttgtaatatgccatcattctataataaagcaatgctttcttggcaagcagggggttgagcaccatagacaaccctcctcagtgctatgcaaaggaaatgcatggaaacaatgtcgtcttggtctagcaattacagaattccaaattctaccctttatacatatgtcatctgtatctaggctgtcctaattcggaaatgcaaaatctcatttctatatactggataaaagaaagagttttagttattcctgagtaggtcttaagaggagacagaatttatccacttgaatttcaaacttttctctaatgttaacccaccaactacttcatgttgactttttttgttagaagaggacacacacacacacacacacacacacacacacacacacacacatcttaagggaacttctggcactatgttttaccaaaagggcatgcaaaagttttagagtcatccaaatctgatcaacttttcaccctgggttctagttctgtttacagactcctcagctcacattgttggaatgaaacaaatatagccagttttgctttgatctgtggtcagtttagcttttcaatcctggcacaatggtgacatttaagaggcaagaggataaaattattttcattccagcgttttaaacaggataaagacttataaaacagctctggccaaatatgaatttggacctaaacaggcgatctcttttttataagaagtccttcttacactgctggatataaatagaagtataaatagttaggcagttaaacacatccattctgatttatcagtccttatcttcagaagcaaaattattggggaaattgggggaggaagaattgcaacaaaggaaaacccaaaaacccaaatcacggtgaaattggtcctgtaaacacatctgccactttccagaaaatatcataataactttgaaaacaattaggcttacagaaaacaaaacaaacccttgtttatctctttactcatcactcaacagtaagttgttccaatcactcaaattcttgctgcctcacctgtaagctcagccttctaatttgacagcagagaccagttacaagagatatgggaattgagggccagcctattaattcatcattgaagaacctcattcatttcaggacaaaaggtctccttcctccacctcagcccccttttccatttttatcactcttaaaggaaactaaggggaagagaaggagaatgaaataactcgaagggatattgaatggcatataagcaaagccccaggtccgtgagattgcctaacagacacatacctatagatacaagcttgtgcggactaataccacaagttcggatctacgggtttgtggcaacaggcctcaatatcttctctcttttggggctgtgacatgtctgaaaataaaatattacaaccattaatccaataaaagagtctaccattcaattgttttatgccataaatggaaaggacttcgtcccactctcacaaaagcaaaagttaagcaatatcttctatgttctccccaacgtgcttcccttggtttccactttttccacaaatccagtggactttaggtaaacctcatcattttactgtttatatatggaagactcatttattcactgctgaacacataatctgggcaaagtgataccaaaatggcaaaccagcagaataaagaaaattctttaaattgtaggcagagagaaagaacacatgagagcccaaatgcaagtccattcctttaaatacctgtcattacattaaaaatgatggtgaaattttcattttcctatttgcattctggaaaacaactagaataaacttagcaagtactaccaacggatttataggtatattttttttttttttgaaaaccactctagagtagattttcaggtatattaagatccatcttcgggaaaagtttgcatttttgttcccacccccatcccatccccacacttattattgattcaaacaccaacaatgagcaagtttgggtgtactctgtaaaatttgaaccatagaagaaattacatagttgttcctccttccccccgcaccccccgccccccgcaatactgtttgaaaaaacagggatgaatctgtttcagagaccttcttataaaatgattgcatttgtcaacataacattttttttctgcaaagccaatgttctacatataagaagggaacatccaagacaatggactttcattaacgacgccttttgtgaattgtattgaagacaggcataatcataagcacttcagggacatatattatacagctaaataactccctgtcctagatgctgggaaacacacatgactccatccctttacaggacctaaaaagagacctttttaacttttgttagctataattatggatcctggctctcaaaataattatctcatttgcctcaaaaaatggacattcactcctttctcaagaatctggggccaggcactggtggctcatgtgtgtaatcccagcactttgggagcccaaggctggcagatcacttgaggtcaggagttcaagaccagcctggccaacagggtgaaaccctgtctctactaaaaatacaaaaaaattagctgggcatggtggcgtgcgcctgtaatcccagctactctggaggctgaggcatgagagttgcttgagcctgggaggcagaggttgcaatgagccgagattgtgccactgcactccagcctaggcaacagagtgagattttgtctcaaaaaaaaaaaaaaaaaaaaaaaaaaagaatctgggagatgaactgaagccctaccaaggggaacaaaaaaagacagagctgaattgaggaattattcagagaaaagagcaggccctcgtgtatgcaacctaaaaagttaaataaagagaacaggaaaccaacagtacgatgaacagaaactgagacataaccattcatagatactttgttgtttccccatctcatcacaagtgagctgtggtacaattgctcagagcctgctggtgctgtgaaggttggcaaaactgagaatctagttgtagctctgtggcttaattttcagatccaaagaaataacaatagcaagtggaagtaagtagtatccaaatcagtcacccccagatggtctttatttattttattttaaaatgttcatttcctttctaaaataaaagacttttaaataagctctgagctgcttcttttccttccgtctctctgacaaaggcatggggctagaggtatttgaggatggccactttgaaccctgttaaatattgctggaatgtgggggatgtaggtgctcctattataatggagcagaataagcccaacgtcccagagt

SEQ ID NO: 1884492 - DNA, 4001 bp, Homo sapiens
aatacgggtaaatcactagtaagaaacatgcagcagaataatgactataaaaccttataattatacagcacttggatagtcaggaactgttggtgtgtgcagtataatcacatgtgctccttacatctatatttggatgcacgaaggaaggatggtaacagtttcatttgacagatgagcaagagaagtcaagtgattttcccaccatctacattgccttccccatacaccacatggcctctggaacccgagcgaagggtgagtgcatctataggcatcaaagccaacttcagtcttcgcaggcagaatcaaccagccagatccagtgtgcagaacccaattttcatccaagacatttcaaggaactaagtaacaaatgacccagaccaaaaacaaacaaacaaacaaaaaaaaaagcaaacacatttcaggcagtgaatatagtgatgggatgattaactgattaacagagtctcttatttgcttcttccaagcatatttagtctgatcatgtgcctgagacatggtgtgacatttgctctggcagcagtgtccaggacacagacaaatcactcatcagtcaggtagccaggcagacaccatcaatcattatctgcatgtttgagaaatacaaaactgtagctgaggtcggggaaaagaacatttgatggtggctaaaaggtaagtatacaaagattcctatttatctcccaaagaggttactctaacatgtgctgtggaaatagagtcataaattctaaattttctcacagataggaggttaaggctaatatatctatataacgtatatgttatatattatctgattcttcatatatatatatatatatatatatatatatatatatatatatatctccacagctcagtaggcaaacccgctgttgaggataggaagaatatattaactgattaattattattaatgccatcttttatttaactagcaattgtaatctattaagagcattcattcacactatctgacttattcaaccctcagaaaaaccctgtagggctcataagtaatatattattatcttccttttatagacaaaggaaaaggaaactcagatatttcctttcttaagctaatctcaccagcaagtggcaaagcctggactagaacacggaatttctgactcctattccattacctagagcgactgtggaagagccgaaggaagaaagggaaagtgtgaaacatgagttccgagcagagaggacctgaaaacacactcagaccagaattccttctagtttgggttaaagtccggagtgggtgtggctatacgacacacaaccagaatgattagattgactttctggcacacctactcactttgaattttcttgtgcaactgagccttttgtgtcaatctcccatcctctcctgccttgtgaagtttctggggtggccgagttggaaccaacttcaaaccctcttatgtctctgattcactttccaaaccctccctctcccactccgtggtcagccttttgtatcacaccctgcaaacatttttttcttttgcgctcctttgggactcctccctcttctctccctccatctcccaactcctctgcactgcctttcccctttaatctctgctgaccaccttttgtgaatgctccatccgctcctccccccgtcacgactgtcctcttgcgggtacctacctgtgtgctctgcagccacacgcacctcctggttgcccctcagatgtcttggttctgtctgtctgatgtcgccagcctccacccggggcctgtgagctgtgcatgtcttcaagctctttgttactattcctccttaatttataatgctaggcaaataacaacacacaataaaagatgatatcagctgtgtttctcgcctgcagcctccagaagtgttatcttagaccccatcattgcaacaaagaaatctctcagttgagtgagtgaaaaccagttacaggacaggaggagaaaacttctgcgcttccaaaattccgcagccccagctgccctccggcggctcccccttgtgggagatgtggggcatagcaaggcagtgcccagttgggacggtgcctgggtgggaggagggcgagagaagagtgctcgcactcagggatgtgccccagagggcgtggggtccggttccggccacgaagaacagcctctgtgtgagttgcaggactgaggtcctctgcaatttctcagggaaatacttccgggagacgcagtcctcagtgcctggaggtctctgggtccaggtgagtgtggtgtgagtaataagcctgcatggcttacgcgctgcatgggaagtcctgtatcacaatcacaacgtatcataaagtcggaggttcacacagggctgttccgagaggtaaggcgtggtctccagtctctgagtaaaagacttgatggtccagtctcctggattctcttgccaccgtggacacttggcctttcggtccctctagagctctggacacatactgctccccaccttagtgaaaacagactgtatgtccaaatagtatctttctccagaggaacacggtctcatttatactaacccaccctggcagatatcactgtcatcctcctcctcctcctcctcatttgagtgtcatacagcttcttttgcttacggttattattgttttgttttttaatctttattactgtagtgtctatgttgcttatggagaaacagctcatgaagtagctgtggtttttaacaaatggagctttattattttattccaagttcaatcttcacgtatggttcagtatagagctgccaccaacatcagaaaggtagtggagtttaatagagtccagtggaaattggtctgagatttgttttgctgaaattaaggactcccttgccaggactgctggaagagtcaatgagacaatatgacgtggcaaaacaagctctaggcttcaacagatctagactcgatacctatctctgctacttattttatgctcaattaactactctcacctcagtttctttgtccataaaatggagttaacttagtttcacaagcaagatctcacaactggtatgatggcagaatgaaataatacgtcacaaaccacatgctcacctacagttcagtggcagagcacggttgtcattctggaaagtttctttgtttggattccagtaactgtgctgataaatagagagcatcccactaggcctattggttgtttcctccacgtttgacatcatgaccagttttctcctgcagactcggtctgggtctctctgtctgtgtcacacccagcatactgttctcacagagggggagccaatcaatactccttaatggtgtggctcaatgccctgtactgaggatgatcagtgagtgtcactcccacttttctccagagacaggacatagtctagacatacggtgcaggaggaggtcaggaaccctgggttctgatcttagctccacttactagtgcattggaaatgatacttgaagttgcacgagtctctgattctgctgcagctactttatgagctctttctccataactaacattggtattacaggaataaagacaaaagacagcaataactttaagcaaaagaagttgtgtgccacttaaatgatgacgatgatgatgaggaggaggatgacaaagcagaagaaagtatgtcaatgatgatattgctatgaaccataaactcactaaatatttctcagacctatgttgggcctagggctgaatatgaaagggttaaactgccctgaagataattaagccctgttacaaactcaagttaaaaaaaaacaaacaaaaacaaaaaacaaaacaaaacaaaaaaacagccataaggatttagagaaatcaagaaaagcagcaaaaacattccctttcacgcaaacagatctaaaactgagaacctttagtgacaagcccgctgtgaaagatgggatcaaaatccagaattacttctacag

SEQ ID NO: 1884493 - DNA, 4001 bp, Homo sapiens
tcgagcttcagccgcttggcggggtccacggtcaggagccctggaggcggggcaaggaagtgtggggaggagcctggcgtaaaggctgagccccaaagagatcgtaacagccccactctcctcccctacccatccccaaccaggacacctggcccagtgaccatccctgtcccagcgtccccctccccaaccatggtctatgacctccagctccgcacctcggaccagctccttggcttcctcggatacaccctgccaggcctccccgtcaagggagaagcgcccctcgcggattttgcacatgatctcggccgcctggctctgcccgccctggccagaggccccctggaaggggacctgccccgacagcatcatgtactaggagggtgaggggaaggtgaggccggcccaggctggggtgccgaggctgacccctccgctcccacagaaccactcaccctccccactaggggcactcctgagacccacgcgtggtgaaccctgacttctaacccccaatacccggatgctccgactctagcaccagagcgaccccacctctgtatttgaaccaccccgatcccagcttcggacgaaacccagccgcccccaccaagatgacccctgtcccctccctcgtgctgctgcacatcaggaagacgccaggtccgagcgaccctgaccccgcctcaaggaccgcgtcccataccagaatgacgcccaggctccagaggtcgcaggactcgtcgtagccctgctgcgccagcagctcgggggcagcgtactgcagcgtgaagcagggcgtctgcatgggcaccccgggactctgcggccgcaaccgcgcgaacccgaagtcgatgattttcaccggggccccgggcgtgtcgtcggcgtacaggatgttctgcgagggcggcggggtagtggtcagaggcagcccccggcgccaccgctccgccccgccgccgaggcagctcgcccacctccggcttgaggtcgcggtgcaccacgcccgcctcctcgtgcatgaagctcacggccgacacgaggctgcgcaggatctggcttgcttccgactcgctgaagtgccgcttcttgcggatgtgctccagcagctccccgccccgcagcagctccaggaccaggtacgtgtgcagctgcgggcggcgtggcgggccaaggtcaacacccacccacggcggcaagccccctcccaccacccaggccccgcccccggccttcgggccctgccaatgttcgagaaccccctcctcaaagtcctttttctttctttctttctttgttacttttttggagacagtctcgctttgtcgcccaggctggaatgcagtggcaccacctcggctcactgcaacctctgccttccgggttcaagcgattctcgtgcctcagcctcccaagtagctgggattacaggcgcacgccaccgcgtccggctaatttttgtatttttcgtagagacggggtttcgccatgttcccaggctggtctcgaactcccgacttcaagtgatccgcccacctcgacctcccaaagtgctgggatcacaggcgtgagccatcgcgcccggccaaagtcccttttcttgtccatcctcagctccgccttcccgtcctcaggccctactcccctcaaattccactccctgcgcctccctggtccctttgggccccgaatcaaacgctaggccccgcccaattcacccctagatcccgcccatagtgcccccaagccccgccgcctgccccttttctctccgccctcccctggccggaagccatcacctggtcgtgatgcacctcgtgcagattcaccacgttggggtgtgactggcacaggcgcagggcagccacttcgcgctgcgtgttcgcctccagcctgggggacggagcagaaggagttacggtcgccgcgcttcggccccgcccccgggacagcgctctgccacccccacccctgcccgcgcctgggccctcccacctgcgactgaggatcttgactgcgaactcctggccgctctggcgctggcggcagcggcgacacacagaaaagctgccctggcccagcgcaggctcccgcaggtccagctcgtactgctggaagaagggcgagtcctggaggcgaaggcgaaggcgaaggcgaaggcggcgcgtcagaggtcccacctggtagccccgcggccccgccacgccccatgtcggagaggcttaggaccttgctgagctcacgctgcgggcgccagttggatctaggcctagagtccccgggcctaggcctctcctaaaaccaatttccccccaacccagcccagcccagcccacctgcatcatagcgctcctggccaccgctgcccgacctggccggtctccagcaccaggcgcttccagcccatcggtcatcaccgcgttgttgtggtcaaagagaatggagggtgccacaaaggagtatccctgcagggcgggagtccggggaatgggcatgggcatgggggttgggggtgcgggtgaggagactctggtggggaaccaggcaaaggcaagaccctggacaagggggcagtggggggtgttccagttgcattctggtacacacaggatgtgtggacactttttattccacctggttttataatcacttggggccatgtctgtccccaccagcctgtgaccccaactttctcatcagagtgaccacttattcctccccaggtgccaagggctgaaggcactgaaaggaccaatgaatatattgaaagtgtggcctgagttcacgcttagcttatgagaatccaactctatccgctgaggaaaaaaaacttattcctccctttcaagccggactttggcttcttctgcaaggggagctactgaagaaatgcaaaaagaaggcagagttaattctttgcttttcctaaagatccatgtcctggcaatttgaggagcttttaagggtcattttaattgcgtgttgtggccaggcacggtggcttgcgcctgtaatcccagtactttgggaggctgaggcaggtagatcacctgaggtcaggagtttgagaccagcctgaccaacatggagaaaccccatctctactaataatacaaaaattagccaggcgtggtggcacatgcctgtaatcccagctactcgggaggctgaggcacgagaatcgcttgaacccgggaggcagaggttgcggtgagccgatatcatgccattgcactctagcctgggcaacaagagcgaaactgcgtctcaaaaaaaaaaattaattatctgggagtggtggcacttgcctgtagtcctagctattgggcaggctgaggtgggaggatcactcaagcccaggagttcaagattgcagtgagccatggttgcccaactgcactccagcctgggccacagaacaagatcctgtctctaaaacattaattaattaattttaaaaaataattttaaaaataaactatgtgtcatcttctcctaaaaatgtagtacccagatccgtacctggaatattttaggcactcactacacatttttgaatcattaaatgaatgaatgaaagtacctaccaattcaagagaaagaactttatcatgagggctgtgagacaatggaatggaatgtggacattcaagcacagagttgtcaattctaagagcttcagagaagggacttatccagccatacttggtctgtctattaaacaaaccatactggtttatttagtgataatgatataatatcattatggcaacatgataaactgcacagaaggagatgctgtccacagaggactgcagcacaaagaaagggtgaccccctgggccaggtgagcagacaaggaggcctaaaagaggggtagaagcttgccatgtagactgctgtagagaatgtactccaggtagcaggagcagcaagtgcaaaggcacagaggtatattctggaacctctgagcagttcgatcatgccctccagag

SEQ ID NO: 1884494 - DNA, 4001 bp, Homo sapiens
cactgaacttcactgatgggctcggtgaggaagaaggggtgttgagaaacctgcccttgactgaagcagttgcctgctgaaatataaaatcttgtgtcgttatgcacttttaaatgcctgggtgatcagttgtatgatagcaacctcggaacatgagcaatccacttgaaaacatgtaaaaacctgagagtgccttgaaatacaaattaaaacacttgtattaaattactaccctgttatcactgaaaatcacggaagaattttacctggcatgtttttattgatccatgtatacattttcatagagtaaactgcagatatattttaacttcaaaaagcaccaactgttttacaaatgttggatatgaataatgtggtaatatagattcgtaagttaaatagatgccttgctataatttccaaatacctatgcatacacatcagctaaggtaggggaagtcattaaaccattgaatataaactaacgatgactcgacaatcaaataactattttttttgaagcacattcggactatcaaagactggaaagtaatattctaatattactacacaagaggtttcaacaaaagacgtggtgcaatcgttgcatagttcatattctcagttcaattttctgatacaaaatggtttcttgattgcaatttggcattaatgactaaaattgcaataaacacttaaaataaaaaacaataacaggcaaagaacagtttccctaaccttcaattacatgtataaaacaaggctacaaccaatataaagtctttagaagaagaaagcatttggattggggttgatttaggtgtttttcaaacatagaagagaaatgttggcccaataatacgaaaattgtttaaatgatattttatactagaatttttcacaacaaaggaaaggtaagttactgtttctcttccccaactacgagacagccctaaatcactgaaatgattcagttataaaaagttacagctcaagaaaactacaaactaggtaatgctagccattaccttaagaaaggataattttaaatgtacagtttgggtgttataaaaccttttttggattgaatttaagtactgataaaattttccttagttttaaaatgaaaaccagtatttgttactcccaaagaatacgataattgtgtttgctgttgctgttgctttcattttacatatttagaagatttatttccaatctttatcacctttatatccataaagtataacattttgtaaaagataccaagcaaggaggtggtatccctccttttatttttaaaaaatcttgcaaagtcatacaaacttaatttttattaataccataacttccatcctttgtgtggaattgcaagaatagaattttaacctattaatattttactccaaactattagtttgcctttatctgcgtctgtatgttcactgtctagccatccatgatacacatgtgtggacactgaatatataatatattcacatgcccattttaattgggcacaattttaagattaactgtggagtttgaaagttggagacatggggcatgctgggacttcagctgagatgttctgaggtcaagcaccaggtactgagctgttcttgttacgctcgtatactactgcgtgttgctctcaaggaatagaccaggcagatgagttccacaagcctcaggcatcaataacatgcatacatacacatagcagccaacacgctattaaagcaaaatatatacctactttaacagaaatccaggagctgccactctctggtcacctgatcccatctaacaatgaaaacctcagaggtatactcaatcacctcagacaaactttcttttcttttgtttttgctttaaagaataaaattccaccaaatttccaggatgcaaaagcacgactcgcagctcccaagagcctaacccgtggatttaaacggtaaacatcacaagttagggtctcagggactgagaggagcgcaacaatgttttctttcttgagacaaagcaaagcaaaacaagaatgacaggcaatttctgttcgaggttcataactaagatgcaacaaacaggtggtatggtatttcttctctaagctcctttccttcacaaaattgagattccgtttaagcctaatacatatatacacacatacgcagtatctgggggcgcatatacaatcacgcacatacacatacgatcacgagtacatcagagaaaactctttcaagatttgggcaaaatagttcactaaaacggaaaataatatgcacagactcagaaatgcccaagtttttaaaaccatagtctacaataaggatttagtgtcttttcaaagctttaatttacgactagcacaaatgactgaagagaaaataggaggcatctctttcccccagggcaagtatgccgcatgcaaaaatcatagaaatcgggttttcaaaggagaagaccaagaagtaggattcggaggctatagaagtgtaaagacgaatagcgttctgaactcacccattcgaagcggagcggggcccgcacagcctcctgtggcaccatcccgagcaaggggggaaaatgagagctctcagtgcgctaggctgggcgaggtgtttcaatagaggacggagaacgggggcggggaggggaggcgggggcaggaagcgatacaccaaatctcgagactgtaactctgtagcttatgctttgacgagagaaaaaagggcagttgggtgggagtggagggaggggctggaactgatcaaatttggaaaatattcacttaaaaattaaaaaaaggcggggggggggggggagtatgaaacctccccagagctgctttttgaaaaatttcttccttctttctttagcgtgcactttgccagtcctgcaaacggaggcttcgtctgcatcagctgcttggctgaagtcaaggccaaatcaccaagagcgagcaccaggctgtcatttggtagacacgaagtgggaagggctgggtgcgggctggggagagacattccccccgcacctcccgctgcggattctttgaagcctttggccaatatttcagaggaatccgaagcataattcccctccatcttcgcagacagcccctggttctgtacctgatagattgtcgctttcctcatcagactggaagtggggctttcctgtgccgccaccaaaaatgaaaggaaaaggaggggaggcagatgggaagatgacccttttacaaatgtttcttctcctttttctttctgtttttcatttcatttctttcttcttcttgttcttcttttattccaggcctgagcaaggtagatggctggctagtcaaagagaatgacaaagcagccacagccaggaggacactggagaggcctcaacgcacttagtaaaaatgctaaatatttttttagatatttccatatgcaactaaaaacagttagagctctagactctccccctcccctcctttaaaaatggaatcatactagcaacacagctaaattatgtctcttctccctctgtacagtgtctgtttagcagcccccccacccccaccttcaagacaacttttttctcacctctgtgggttcttctcaggcacaatcctccgttgagctcagaggctctcctttttctctcccttcccttttccttttcctctcagaaaagctagtctgtcatcatcacacctagcttctctctcgctcgctcaacctctctccttttctcttttaccattaaaatataataataataatggccctttcgacatagcagcatgaagtggctgcctttgagaagcacatttaatctttactggctcccctaggcttcagtgaagaaggagaaggcaaggaaaaaaaaaggagagagagaaaaaaagattgtaagggaggctgctgacggacagcaggcatcaggcacaaatcagcgacaagttgaattttcctagaccacactgccccctttcttctcgg

SEQ ID NO: 1884495 - DNA, 4001 bp, Homo sapiens
cttaaccgagtctgatgctgagctgagccagggcagctgagatgcgcagggcttgggatttacctcttcagccactgggaggccctctgcgttcccctttccccggtgcctggctgcgattactcactcgcgcagtggcaccagccttccaccagggagcctcgaacgagctctcccgccctctccccgcccccccacccccatctgcagcttgctggctctctctttctccttctctgtctcactctctctctttctctccctctcctatcggagcacaatgaaagcctgtgtatcgccgtgactccgggcgcgagccagtgtcagcaaagcggctaacaacagacgagaaagagaaaggaaaatacaagctactttttttttccatctataaagcggagcaaatacaggagatagaaccagattgcttattgcgagtccagaccctcagatccactggccggggatggaatgtacaaaagtggacagaaaagtggctggacatgactcggtgcaatttgctggaagtttgtaagtttgaccatcgtttgtaaattactctcggaagagtttgtctctcttgatactgtattagaatagagccgggggtgaggaatagaaacgtaagcgggaaagaaaaaaatgtgttgaaggatctctctcagtggctagcgacttaagattgcttttcatttaaggctaggaaaccttagagggagtgaggattttaccggtgattggattagctgaagaaaaaagcatggtccaaaagtccaattactgacattgttaacagttgaaaagctgtctccctcttttgggagaagacaacatcctacagtaccccaaagaggagaaaacaccggagcgaaaggaaagggaggaaaaattaaaagccaaaagacagtctcccttgatttttgcacattttgaacagtgacttaaacatcttctgaaacagcactgttttgttttgttttggttttttatttaacctgaggaaaagtcaaggctgctggttacatagacatggtagaaatgtgtttctctgcagaaacatccccataaagaattgtcggaaacaactaggtgagggggagtcctctctattaatacctctctcaataccttttgctgtgtgtttctgtctcttgctggacaatccctgaattcttgatctaacccccagatcgtgtgtttacaaagtacctagtggctcttgtcagcttggtggaggaaaaaaaatccaccaactctgtccaacttctccagagctgtcaaatgcaattagagtaagttaatcagggtttgtttccaacttatcctccccccagttggtttctattctttctccccaccctctttttactaactcccctcccccacaacttctccacggctcccccacaacctctgaagacctctattcatgtggccctgaacactgagctcacattgtcaaaaacagacttgcctgcaatagccagcagtagcctctttccacctcaccatcccagaggcagcaatcattgtgtccggtaagatgggggacacagcgcccccgcaggcccccgcaggagggctagggggggcctctggggcggggctccttggagggggctcagtcaccccgagagtgcacagtgctatcgtggagcgcctccgggctcggatcgctgtctgccgccaacaccacctgagctgtgaaggacgatatgaacgaggtagggccgagagctcagaccgggaaagagaaagcaccttgcagctcctgagccttgtacagcatggccagggggcaaggaaagctggcaaacacaccaaggccaccgccactgctgccaccactacagcccctccaccgccccctgctgcccctcctgcggcctcccaagcagcagcaacagcagccccaccgcccccaccagactatcaccatcaccaccagcagcacctgctgaacagtagcaataatggtggcagtggtgggataaacggagagcagcagccgcccgcttcaaccccaggggaccagaggaactcagccctgattgcggtaagcacctggctttctcatggttctggctgtggtcctgtgaccttttgtgagggtagagtttgctttggcctaaggtagagtggatggcaatgaaaaaggccaagatgtcacctgactaccttaaaggccattgggtgtgttcgggtggtttcatgcgcctactcatcatgttctgttggtgctcactcctgggttttccttcgcttataggatattccttaactgataagaagcctgagttttccagaggctctctggggtccacatcttataaaagaagaggctaccagctggcaagatctgagccactgaggaaggttctatctcatggatcctccagctttggccagccagctctgattaggcccccaagccatttttcagccccaaagcatttatcagcccagctggcctttattaaagcctttttctccttgccccatttcccctctcccttttgaagtgacccccttcttcttcgcttaagagaacataaatggtaagctgtaacaaatagcaaattccccgaatgtcccctcagtcaaaaacaaaatttggggaaaatatcccaaagagagactagggaggcactgtttcttaagaggcctactctctgattccctctagactctctcactcctgagccacatctcgattattttcccaagcactccagtccaatccagtaatgctcccttagagcattcgttaagcagacaggcacgaagcagctatttacacagatcatcatcctaggaaataccttgtcttcagccactcctggtgataggatatcaaacccaaaagttctgattaagtttctggctggaagttcttccccagaggcacagacacacaccatcccagaggagtatcccttggatcattgattctcagtgccagtcctggtcaggtgactgcctgctgtttgcaggcttccccccaaagctgctggaccagtggcctctggtggaaggtagaaccctgccctgtggccctgcaggcttcctcccttttggagctccatgggacttctggattctatgtctgctccagtttacccaggtcagccctagcaaaagcgacaggaaatggccatgcaagccccaaagtactcaaaaagcccaaaggagatggtgctattgtgtctaactgctcctccaaaggagcttgatattgagctctcgggagaggacatcctctggccagacgctcaggatggctctttctggcttcccttaatccctggcctgggtccatggtgacgaagaccctgggaatctctggggagtaggatggtgcttttctccccagccataagcacatttacttgggctacctaggaatgggactccttgaggccagctccagatgaaaaataactaccaacagttaaactgcacagggtttacagttttacccttgaatagcagcactagcttgtggggttgtattagagcttcgaagcctaatatcctttttctaccacctgctctattcccgcttctccctggaattccctaggaaagcagtgggaggttgttttgtgaaaaaagagatgttagggtaaaggaggggggtaaagaatcgctcaaatggagagaagaatgaggtttgtatgtatgtgtgtgtcaccagcatctgtagccaaaagtatctaaatgccttgattgtccccagtaaatttataatctgtctgcaagtctcccaataatgcggctttgtgtgcttcacagtctcctggtaagtgtttctggggatggaaccgcaagtgaggcacccggcccaaccctgagtggagaagactgatctctgcccggggtgtcaaggccggagcggggccgtgaagagccacagtgggcttcccttgtggccttcacagcccagcctctgaaggaaaggtggcatgtttgcctctggccttgttctttgagcttctgct

SEQ ID NO: 1884496 - DNA, 4001 bp, Homo sapiens
tcttacagccttcattctccccatttttactggagttatatgttcataggagacatctttctgagatggtactgaataacaaggtgaaaataactaataaacattatatagagtgaacatcaatcatgtcattaagagcaaaaaagtgtttagaaatatgtttctttgtcttttctatttcacgtaatactgatgctttgggtagtgggggggaaacactccccaaggttttttgctgcatctatcttataaatgattccctttgatcaaaatctagtgcaagctcaccttttttagagtcatagaggcaatgatttcatatcacagtattttgactcttgacagctcagtgggagtaaggaaaatgaggagggggattatgtaaaggagaggaaaatgttggggagaggaattcaaagtcaggacaaagatgacaggcaaagcatgagagcagctgtacaaaatgttacttgctctcttctagagattggtgtgctggagtgaatgacaactactaattaaaatggtggcttattatcatgtaagaagtgacacaatttgtctaagacctggtgtaaaagatgaatcacttttatttgtagaaaattctaatttaaaaatatgcatttttagatgaacatctgtggtgtttttgacaggagacatgtgataattaaaaccttttttattttctgactgaaatgttcatattatatttttgctgtgtgccaatttttatatttctataaataagaacaaagcaagttttctagaacaactagaagtttatacgatttataatttttaagtccaagtgtcaaaattagatacctaaatcatgattataagtttgtatattgccaaaaaatatattggatattaactttccaacttaatgatctcttttttttaaatggatttctattaaagcagatgaattggtcttttgcaggacaaatgtacgttactgttctcaaaacacttactgcctggtgcttttttttttaactttttgagagcttaaaaaagatagccttggatttgctctactttatacatatctttcacagttaagagaataattctcaaattatacacatgcggcaagtaattttattattccaagtaaaatatgtatctctctgataccaaacagttgtttatgattttcagaatttgtcaggataagttaaagcatgccataaatggacaagaaaatgcctcaatcagataaacaataatactaaataagcagatgttaatataaaaaataaaggaataacttattttattgcacttcactttttggccctctgcagatgttgtgtgtgtatgtgtgtatgtgtgtttaacaaattgaaggttcatggcaattctgcatcaagcaagtatattgacaccatttttccaacagcatgtgctcacttcatttctctgtgccacattttggtgattacttctaacattttcattactattatgtctgttacagtgatctgtaatcaatgatcatcaatgtcactattgtaatggttacaaacttagcccatatgagatgggaaacttaattggcaaatgtgtgtattctgactgctccacagaccagctgttactgcatttctctccctctccacatgtctttctattccctgagacaaaacaatattgaaattagtccaataataacccttcaatggcctttaagtgttcaagtgaaatgaagagtcacacatctctcactttaaatcaaaagctggaaatgataaagcttactgaagagggcatgtggaaagctgaggtaagctgaaagagaggcctaatagacaagttgtgaaagttaaaaaaaaagttcttgaagaaaattaaaaatgttacttcagtgaacacgcaaatgagaagaaagcaaaatggcctcactgctgctatggagaaagtttcagtcatctggatagaacagatcaaccacaatatccccataagccaaagccttatccatagcaagtctctagttcttcagttctatgaaggctgagagaagtgaggaagctgcagcagaaaagtttgaagctaacagaggttggttcatttggttgaaggaaagaagctttttctgtaatacaaaagtgtaaggtgaagtagcaagtgctgatggaaaagctgtagtaaggtatctagagctaagataaatgatgaaggtggctacactttccaactgattttcaatgtagacaaaacagacttatatttgaataagataccatctaagattgtagctaaagaggacaagtcagtgcttggcttcaaagttccaaaggacaagctgactatttttaggggataatgcaattggtgactttaagttgaacccaatccttactattctgaaaatcctagggccgttaagagtcataataaactatctctgcctgttctcaatggaacagcaaaacctagatggtaacttgtatgcttacaaaatgatttactgaacattttaaacccactgctgaggcctgttccccagaaactagaaaaaattcctttcaaaagattactgcttattgataatcatgtgctcatccaaaagctctgatagggatatacacaaggtacgttttcatccctgctaataaaacattaaatctgcaacacaaggatcaaggagtaatttaagctttcaaattcattatccaagaaataatttttgatataattcctccgatggacctgggcagagtaaattgaataccctctggaaatacttcattattctagatggcattaagaatgtttatgattcaaaggagaaggtcaaaatatcaacattaatggaagtgtaagtgaagtgaattccaactctcagggatgcctttgagcgattgaagacttcagtggggaaagtaattgcagatgtaatagaaattgcaagagaacaattagatgcggaacttgaggatggaactgaacatctataatttcatgataaaacttcaacagatgtggagtttgtttttatgaatgaacacagaacatagttgcttgaaatggaaactacttctggtaaagatgctatgaacactgttgaaatgacaacatatttagaatatcacatacacttggttgaaaaagcagcagcagggtttgaaaggattgactccaatttcaaaagaagttttactgtgaaattctaccagatagcattgtatgctttggagaaatatgcatgaaggaaagagtcaatcaatgcaacaaacttaattgttttcctattttcagaaattgccacaaccattctaaccttcagcaaccaccaccctgatcagtcagcagccatcaatatcgaggcaagactcttacagcaaaaagtctatgactctctgaaggcttagctggtttttagcatttttagcaataaaataaaggtatgtacattgttttttagatgtattgcaattggaattattttatatgcactagaaaaccagaaataaaaaatatgtgacttactttattgtgacatttgctttatcgcagtggtctagaataaacttgcactatctgcaaagcatgcctgcatgtgtattaaatgaaaacagcacagtttagcttggtattttattttgtcttaagttctttttccaagccatatctttaggcctctacttctattctcaaagcagtttatttcgatcttccctttctaagaagtttgttgcttcctcatttttgttgtctttgctgttatttctacacatattttaaccacactgtcaagactgagcacattatgtgtgttaggggtatgaggagggagtcagtgaaattaatgcatgcaggaaagatgtcggaagaacaaatccaatagagatctaaggcaagtggcataggaaatactgccagcagacaagaaggtagaatataaaaactaatatttaagatgtttccatttacttccaggaactgtactagctgtttgacagaaagtatctcattaaatcctc

SEQ ID NO: 1884497 - DNA, 4001 bp, Homo sapiens
cttctccaaggcagcaacagttgtctggctgaggcgaggcgaggcgaggcgaggagaggactcgctccggtgccgcacgacgccgggttcggccgttgctccttgggccctggagccctagtcccacacttagcctcggagggagaagtgagggggctagggtcgcaataaccctgagccgcctgcgctgcggtggctcaacctcttctgtgcaagttcacttctcttgggccacctctctcccaaatctggtgaaggttcaggctttgggagagaggagggctttctggctgggaagaggaggggtatgtaagaagcaaaagacaaaagaggagctgaagggacacagggtgaagctattattaatctaacgtggttcttatgcctctccctccgcaaagctatcgctccacagacggccccaggtgagaggcagggaggaaaatccccggagcttttgctttttgctccatctcctttgcagatcttaggaacctttttactcttttagaaaacgtattcagggagggaaaatttcctttatctggggaggaaagctctgatttagccttagagcttggagtgctcgccttccgtgccttctcacagtcttagccataaaagattgactctgtccagcaccctcggactctgcagccctttcctaattctggagagggtagagtccgggtgttcaaccagcggacaggttaatgacggtgggcgtttagtttgttggaagaacggtggttgtgatacgggggaaattcaggccctccccgaaaacgtgaaggttcgcagccctcgggtcttgaactccggtgtctctagacccatcttctacccatttctgtccctgtgggcactcatgtgtgtatgtgtgtccttctggcccagtccctaagggcaagggcgtctagcagtgttcctagcaggcgaagggcgcggggagcgtggtgaaggcctgatttgtgccacttgtgaccgaagtggtcaggactgcaatgagtggagggggaggagggggactcacagactctcccctctcctgcagctttgcccccctccccaggaccggcgcctggagaggccgggatggggctgctgctgctgctgctgcttctgttcctgctaagcgtctgagtcgggcacaaccgcatctctccaaagctccttctctgcgggggcttccccagttctcgcctgttttacccccttccgtgctacttagttttgaaaaagaggagatgtgggagacccgaggctgcaaaacgccccaaattaggttggaagcaggcgcgggaggaagagactccggggatcgggcggtgcctgggtgttttccctctttttcggatctacccaattcaccgcggctcgcctcacctccgggtcccccgcaccaggacataagatactaagggcctccagcccctccctcaagggcttccccacccccatattgcagaatcggatcattacggtcaaaaatgaccacaaaatgtcctaaactgattcatattccaggttctgacttggccttaagctcagatccttttctttgcattgagtgaatggggttattcgtggtgtgggcgggggttggggggaagacacaacttctgtaaacttttattgcattttagcttcttctcacttctccgaaaacacacacaccccacctgctccagttccccctgtgatacaaagtctgttaaaaagttgggggcgggggactcgctcggagggaagacaggtgaccaaagcctcgggcaccgcggaaaggacgggggaaagggccgaatcttccgtggaaaacggggaaagggccgggtaaggctcggatggagcagcttcgggaaggtgcgggcttcggcgatcgctggatggctgccgtcttctcgacgagtgcgccctccgcaaatgctttttggggtaagggcttccggctattgagttatgtacagcaagcccagaccgcaaaaagattcgcgaagggcagaatatgccggcttcttcggttcgccgccgccttcagcccaggatgtctccgaaccctggagccgaacaggctgggtctccccagcgcgttccatcgcggctcagtctcaccactccgcgcgctgcccgcccctccgcgcccctggactcgtgtctccatttctccagaccgtccgcgatcccccaactcagccccgagagaagtgtgtggagggcgagaaggggaccgcagaggggcacccggatcccggagcccagcctccacccctttcctgtcgccccagcacccggagcctccccgcctgcctgtcctatccctctatctccctatcagagttccgccagccccggctgcaaggtcgcggatctctgaacaggtacagttcggattccccccgaatcccctcttatccctcagagtcccccagccaaggttccagccgtgactacaggcgctgcgtaaagagaaaaactcccccagagcactaaataaatacagacgaggccgccagctcattggtgcggactaaaatcgtcacccaccaatcagaagagagctcacatttcccccttttttttcagaagggggagggagaaaaaaatatttccatttctaattattcaacaaaacctagactggaacatgttaaaatattgttgttgccaaaaaaagcggttcaggaccccctcctcattccagcccaagtgagggggtagcgcgatgtattgggaaagagaggtttaagagagcgacctctcccaacgggacccaagccagaagatccagacgaaaaatgacaaagatgaacataaaataaacccaaactccacactagtcatcctatttctagaaaattgagaatgtctcaacaccccctttcccacccaaagttctgaatgctcaactaggtgaagctcctccctccgcatcctccccgaaaccgtctcagtattgggtgtttaatggcccattcgcctcaggtgcactttcaactctgcagcccacccccccgcccccaactctctacccattctgcagaatgctagggggaacaacaaggggcgaacccgtcattgactgcctgaccccacaacgacgggagattccaccttctgcgggaggaagaaaggaggggagggaagactagagatggggagaaaggagatctccttccctcactctccctccctccctcttcctccctccctcttcctccatcccgctcggccccctcctccatcccatccatccaaactttgaggggttgcccttcttcgcagtgcagcgccacccttcccacatcctctcctgcccctccccccccccattagtacctaagcagggtgtgggctaagggacgtcctgactatctccctccctagcagtatagtcccccagtgggggaaacctcacccaggatgggttactgcaaacattgcaagaacttggggggaaagttgccatatttgttctttggcaccctggaatcgacgtgcgggcgggcgcgcgcgcgcgcacacacactcccaccctcgcccagcacgcccggagaaaacgtctctcgacggtggaggcactgtcttcaagtccctgtcgacccacccccttcgcccatccatcaccctcctgcagctccgcgacccactcaccctcccacggcatcccctcggctccgggactgacagacgcaagcacacaccctccgagcgtctgcgcgcccgccgcgccagaggggctccgcggtctgcgcccgccgccgccgcggcgcggggcaactgggaaaaaaaagttctgctcagactacccgtgagccgaccgactaccagtgagccgaccgaccaccagccgacccgggcgccgactccctgctccttacctcggtctgggggccacgggagcgcgccggtcccgtccgcactgcagccagctggaagcagcccctctcctgccggcccgctccctccggcccctccccgccccccacgggtgtttgcccggc

SEQ ID NO: 1884498 - DNA, 4001 bp, Homo sapiens
ggatctaatttcttcaaccaatttactttagggtcctagaagttgaattgtacaaagtacagttacattttgacacctgatccaagacacagtaatgtataccacattacaatgtttcagtcaatatacagcacataaaaaaagtggtcctataagagctgaaaattccttattaaatgttatttctaatattgaaaagtcaacatttttctcctacatttttactcataaacatagcaaaatgttacaggtctcattgtcaccactgcaatatgcatactgtgatggaagcataacctgtctcaatttagccacattaactatttttggacaccatgatcaacagtgcccattctctagaatgaggcattgtaaaagtctttaaagcttagtagtgtatttgtacgaagttcttgttatgctggcagtgctactgatagagggaaacaagcagaatcaatagaaacagagaatcttacctttttactgtaggtggtggggatctacctggttctcaatttgacaccctggaaaaaaaagcattgcttactattttagagtatatcaaactgaacactctgagaaacctacacaaatactgtatcagtagaaataccaggtttaacaagcacaaagccaagaaaaccaacgatgccagatactgaatttctatagcactgacctttgaacaccctagcaggtgtaaactgctgagtgcagataccatgcagtgcaattatgactgaactgtacaactcgtattcccaaatttgcaatattgctgagaaatgctttcacaaacctctcaaattcctttaacaagtacaataatttgagcttttttcctaattgtcactgtaataaggaagctacattaactacattttaagctacaactctagtctttgcctaatctttgcccagtctctctataaaacttaaagatggaatatatacatgtaacttaacagatcagacaacaaacgtcaagctcattgttgctcaaactgccagttacacaaaattctttttatgtaattcatatccctattgattcaacatatccacacaggtttacgtgactttaggatgaaatatgtgtaactgccagttgaataatgatgcaaagaacacaggtagtttcgtttggtaggtatagacatgcagtctcttcattttccttctctatacaaatatatacattgtaatatttttgccagtatcttactaattctgtgttatacctgaaatactgggatggtgtaatttctatttttcatcttttgagtccttgattattataagttaaatattttacttacctctcaacatgaatgagttcaaatcacattcattcctatagaaagtaccaattaaagatttagaaaggatacatttccagttattaaaactaaaacccaagtataaatttaagatccagtttattatacagccatatccagctctgtcagaattaagttttagttcatgcccgttatcattcagcagttgaacagttaaattcatcatctgaactgtaatcattatttcccaaaagattatactgtcaccaattaaaacttacctaagcgatcactcaagaatggtacagatgtgtggagtatgccaatacctaaggtaaaaaagtagattatctggtttttcataacgtttagcaaccgtctttttcaaacttttagcaactgtcttgtaattccttcccacagatctaacaatagtcctgtgagtaaagtaaaaccacagagttactctatgaggcgtttccaacgatgtgcaggctacaggaaaagccccatcgggatagacctcaaccactatttacaaggttttgatttttttttaaagacacaggatctgccatgtcttttaaaaatcgtgtgattcttgctgaatcacttgagcccaggggttcgaggctacagtgagatgtggcaggatcacatctcactgtagcctcaaaccgctgggctcaagtgtttctcctgccttagcctccagagtagctggggaccacaggcaccactgtgtccagctagtatttatacacataaataacaaagtctaacactccataggaaagaaattatgagcagaaactgcaatatgctcttacaatattgccaactgcagaaacttcctactacgttaatcacaaaaacaataatttcacaatcacgttgtgcttaggagccagaggaatgataaataaaaagtaacatcaagtagctcctttacatgaaccaaaggaaaaagatttaaacttaagatttaagtttaaagtctaactgttgttatgaacttcagtattgcaacagaggatgttgttttcccaattcgaagatttcagcaaattttaattcttggctcaaaattaattgtcatccattataaaatacaggaatataatgtgcctgtaagttacgactttggcattatataacttttaatcaaactctacatcattcaaatttatgaattcttatgacctgtgtaatcatcttttattatactatattttgcattaaaccataaaatcctctgcctcattttagattgtgcattaattcaaaataatgctgtaggcttcaagtaggaaatccaaagttctgattattgctacaaactaacaaattcaggaccctctaatgcttgcaactaaaatgaatctgacacatcactataaaatgtgtgaatctaggattcttcttttcagaaatcagtataaatgggaattaaaagcatggtagaaatgtccctgaataaaatgaaacttgctctgacaacatactgtttcctacacataaacaaatatgatgtgaaaactcaaattgagacatacctttaactccagacaccatgttctcaagataaaagcctttaaaacaaaaagccattgtgtatatcatcaacatgaaattggaatgcaaaattaatactgctgaggatttccctcatatcccatgctgtttatctattctacaggcctggaatcaacctttttttcttaagagacagggtctgtctttgttactcaggctggagtacagtggtgccatcaaagctcagtgcagcctccaactctgcctcagcctcccccctttctgagtaactccaactacaggcacatgccccagtacccagctaatttttaaatttttgtggagatgtgtttcttactttcttgcctaggctggtcttgaactcctggtttcaagcaatactcccaccttggtgtggggattgcaggcttgacccattgcacctggcctggaaccaacctttatggctatcaatactcccatcaatcaactgtctcaggtatcataatatcccttcttatatgtatcaaaactcatactgaacaatgagttctgggttgcaaaagaggatttattttttgcacctatctgtaagtctttgtccacgttaaacaaaaacatacataagtgcagtcccaaaatgcactacatagcagagtagtcagctctatcgtggtgatcaaaataatgaacatcggggtaatgactggttctccccaggtatacatgttgaataaatgtgtatgccttttcttgaactaataaaaagtgaaaatggtagttaaaagtagtattaggccaggtgccatggctcacacctataatcccagcattttgggaggccaaggcaggcggatcgcctgaggtcaggagttcgagaccatggtgaaagcctgtctctactaaaaaaacaaaaactagctgggtgtgctggctaacgcctgtaatcccagctactaaggaggctgaggcagaatcgcttgaacccgggagatggaggttgcagtaagccaagactgcggccattgcactacagcctgggtgacagatcgagactctgtctaaaaaaaatagtattaaagatactctaaatttggaaagggaaatgaggttattacaatactaagcatctgacaggtcacttgtcatggctgaacaaag

SEQ ID NO: 1884499 - DNA, 4001 bp, Homo sapiens
gcttggacaacaaaaattagccaggcatggtggtgcacgcctgtaatcccagctactcaggaggttgaggcaggagaatcacttgaacctggtaggcagaggttgcagtgggccgagatcgcgccactgcactccagcctgggcgacagtgagattctgtcttaaaaaaaaaaaaaaaagggaaataaagctaactgtactatctcaaatactgttgttgtgatcagaatggagaggctgtctgggcaggagaaaggaggactagaactggaaggcacagaagtaaaagggcaagggaaaaaggcaagccatggagagatgtccaacatccctcaactaaggcctcaggggagtctgacccatctttcagtttctacatgcctcatgatgccaagatccctctcagggtccagcagaggacctcaaaaccctattcctcttggacccatttcttgcaccaaagtttagggaagatttctcaagtcccaaactctgctgttgaaaaccaggcacaaactagctgccttcttcacttgatcttagccaaaagaccaggaatactagctgccttcttaaagaagctccccaaatattcctctcattcaatttattttaacaagttttaattaagcctactaggcactgtgggagacagagaagtaaatggctgagtcattgctctcaaatttttctttctttttttttttttttgagatggagtctcgctctgttgcccaggctggagtgcagtggcgcaatctcggctcacttcaacttctgcctccaagattcattcaagagtctcctgcctcagccacccaagtagctgagactacaggcgtgcattaccacgcctggctaatttttgtatttttagtagagacgaggtttcaccatgttggccaggctggtcttgaacccctgacctcaggtgatccgcccgcctcggcctcccaaagtgttgggattacaggcgtgagccaccgcacccggcctcaatttccttgtaattggtcctgggagaatcattctgtgggttgattcaagggatcctattaatctttaagattaagtcatgggcaacgctgtccaaatcttggatgcccagacaggtgtgccctcaagcagcattaccatcaaacaccccgtgaccaagagggagtggtgctgagaaaggtaagtggattcagggaaggagtgaggtctttccatgcctcatgagccagggaaggagctgtaggtatgggatgccagcagcacacaggtccttttctttggggagcaatcctctcgagttaaccccctttcctttctggtgcattcctttttttctcaaggaggcctactctgtacctaatagtgattctcctaatctttttccactcactctccattccgggctgagtctgggaatgcttatccttcttagcctaaggagttgccaccacttctggtccttaaaggtttgaggctttggaagatatcctcatacaaccagcagatggcatcaaaaccttccacccctcagctcaggaaatctcccagtttgaagaacctattcagatctctccagatgggtctacaaaaagatgagtgagctgtcaagacttaacacagggttgtatctaggctttgcaacctaagagctacacaatcttagccaaactgtttaaacctttctgaccctcagtttttcatccataaaatggggctgttacctcccagaagttattaggtttcacagtaacggaggcagtgtctatcacaagcactgcatacagaagtagttccataaatgagagctattagtataactaacaagtgaggctacccagattcccaccagggtagctgactggtgcccagatgggagaggaattgcaatgctgaggaggcagccagcgctgggtagcactacacggccaatgcccttttaacattgcactgctagtgacaggtgcagacagtagcacaatgtgaaaagagctctggccagcagcagaggcatgccggccctgcctcctcactccttctcccagtccctggcccactcagctcacgggctccctctgccccttctttgcttcaatacagcttttttcccttttattccattcttagtgttcattctattttttcaccactcttccttttgccgccttcttcaccaaccccctgacccccagcacagagaccacctttttcttggaggttttggcatgggaggacaggacccactaaagcagctgcagggatacttcgggcttgatgctcagtcctcaaagaaaacggctattagcaatccccaaagtctggaggtcactcgtatgaggctgtgttcatctggatttgcatttccgctagcttaccttctagagaggagcttgctgcccaagactacagaaccctctactcttctctaagtttccatctccttttaaatttagataaagcagagctctaggcctcaaggcaacactctcagatgaccttccaggaccagagaggtgggagcctgtagtcacagctccccacgcagtagagagaagcttccaggcggggaggtgaaagctgctggtgaagccccacccctgcatctccttttggaggtcctgaaagcactttgcagattcagcattaaaatggtgagggtgattcgctcacagttactgagagttagggataggctttcactggcagtgggattcacatctgagttatttcctgtcttatccagggacccttggttggggagtcttcaagctcatcctagcacttccccatcctatccaaccctaagggggcttaaatacaggacaaacagtccccggaagattaacacccaaagccagaaagctgccctggaaggacacctggatatctggaggctcagacccaggcaggctctattgtggcacattccagctagggccacagccccggagcccagctccagttctgacccagtgaactttgggcagcccagagaaacagaggctggagggtgattcctccagtgccccgatcaacgaaggggagatgccttcttccctaatccacagccaccgtaaggaatagaggacagaattccagttgggagctcttcctctgggcttccctctagcctcgtcccaccccctcaggaagcaggagacgttccctcccgctctccccggcagagtttgttcccgtaatctgcaaacatggggccctgccctacagttttaatgggcggaaaccaagacccctcgagggtcagtgacctctctgctctggggttgggcaaaccaggcccagctgggaactggatcacaccaacagggggcagaggggcaaagataaggctgcacagcaagcttcagggaggccaggggaagattcttccccaagaagtttccaggtctctccttagggagtgcagggagaaagggccaagagcccctcagctctcacacacccaactcattcctgaggagcaggcccagcgactcaccagccagcaggacccctcccccaccttgggcccaggagccagcccccagctccttccagaagcgagtgtagagaccgaggaggaaatgggggaggggaggccccggctcaagttctctcctctccccctcctcattggccaccatcttccggcccctgcccccagagcagcaggggatggggcccagcctgtgaaagggagagaaagggcaggtggggggttagctggagcagcaggggcagggggctggccccaactgtctcctcccaccccctcctcgcagccatggcgacgggaggaggagaccaggagggtcctgaaagccatgttctgtgaatgggatgagagaggcagctgggaagtggggggtgaggggcgctctccttcaacacccaactgtgctccccccgaacacacacacctcgaggctggaccacacaggcgcacgtacacaccacacacacacacacacacacacacaaactctcagccatacttgctgcacaac

SEQ ID NO: 1884500 - DNA, 4001 bp, Homo sapiens
aatacaatgaccacctattctgagcctgaagaggtgaggaggagacaatctgtaaacaggcagtgatccaggtagaaggtaatacacttatagccctggaggcagagagaacaggaaacttcagagaaactggcaaatagtatgcgagagaagtgacgagagattaggctggtaagatatgcaggaagagaccaaaaatgacctttgtatgtcatagagaaagctacagtgtcagattatatcatcttacatacttctttaaatgttttagtggttaaaacagattgcacttcaaaagggaaaaaaagcacaccctcaaagatttctgctataatcacgggaaaaactatagaactagtaaacccagcaattaaatacctcttagatgcctagaaaacagactctagccacagaaaaacaaaatgatgctatatcatcatttgtgttcatcagtattcaaattccaaccacactttaagaactacagattcgacttcagctatataactttctctgagtaacttgacctacataattttgttcatattccagattcctatagtaggtctaatttatttaaaaatcacaaattgcatataaaatgttatattactgctaattacttttttaaattgtgatttcctctatttactagactatgagcttcttcacaatacggacaggacacttaaatgttttatattcccatccccattcctcaggtttcatggccaatgcaccatacccaatgaattttagattaaaatgctttagaaaaaaacatgataacttcacgaatccttatttcctcataaggtatacatcaaattatcttttacatttcttttgcttctaacatttgatttgtagcatgcttctgatatttaaaaagatagcctttttttcttttttaaaaaactatatctattcacataacacagacatatatgttagctagatgagaatgccaagggagagggtagaagagaaaagcaggaggagagagaaggaaaaaaggagaggacaaaagagagggaggtagggaaaagaaacacagaacactttaccaataaatcacagggaagttttaaaaacatagtaatattacgtatggaagcattacccctaactcatcacaaaaccaaagttctatctttcaataatcaaacatcatgtaaatgccaaaagaaaactctgagagcaaataatgagccatgaatatttcaaatctactgagtttcagctgtgatcaaaaatttagtgctataacttagaaagactccttggcagagtagttacaaggaacctctcctaattcaaatatgagtttgattccaagctctgacagttactagtgatcttgaccaagttacttaatctctctgactctcaggaaaattttaaatgtatagatatatattttttaagtcatggggctggaagtgttaatgcttcacatacatctttatgtaacactttacaacatctctaggtaaaaataaaatgttagctatacaaccattttgaatcaagacacatttattccatattctgtcatgtctacctgaatcaagatacggtttttttccatattctgtcatttctaccagaatcaggacacatttattccatattctgtcatttctaccagatcatccaacaaacattaatgtataaggcactgtactaagcactgggtatgaaaacaacaaaaagagaaggttctgtccacaaagagtttaaagtggagaagagtggaaaagactcagcagctaggatagagggtcctggacagcgtgagatgacagatggcttctcagctgtcaggttcatagctgactgattgaagaaagagatggcagccctggagtgttcctgcaccatcttctcgtggtccatggcagtggcggaagaggagcgggcccagagcgagagtgcgggccccaggaggggccagagcagaggcccacccgggggccgctccccagcaccgacgccagcatcatcgtcctgttcctttgtccgatgggcagctgccagagctgaggactgaagtatacggaggcttccctttctctttttaaattctagatattaagcatagccttggtcaaacacagttaatggtgatgtttattttattaatagaataagtcctgaggctttcacaaaataattttgttctgccaaaaattaagaataaaagtctttacgtaaaagatgtgtgtggtggtggtggtggaagagagctagtttttatctgtaagaccaagttatcagattaacatgaacattaaagaaaaattcctcttcttagtgctatgttgaaccataatgataacaataatcagaaacaaaaataattcaattgttgactctacaagtatttactagctgcccatgtgaatgacactgtgtgcgacactatgataaaaatagtaataaaataagacagaactgcttcaagaagttcctaatctgattgaagaacagtacaacaagcaggcaatgacaatcccatccaattagtacctacagcagaatgggaatgtagaggagggacccctagtcagtgtttgtcatcccttttcacttcacacacacacaaagaaggataatatttgcatggccaaagacctgaggcaacctggttgctaggccagttgaggtcctgccctatggggtgaaggcatgagtaggagagtttgagaagggcccagttagacaaggtcaaccacccacacatccctctggcttcttaaagtctagtagctactgtattcgacagtttaacacagaacatttccatcaccacagaaacttctattgaataaaactataatctataattccattcactaatttaaaaattctgatataatacaaagatttagcaataaatgtaaaaacgcataatgatggaatataatttagtaacaaaaggaatgaacagctgataaatgctacaacatggatgaaccttaatcatgctaaatctgaaaaaatctagtcacaaaagaccaaacattacatgcttctatttatatgaaacatagacaaaaggcaaaactttagagacaaaaaacagatccggattgtctagggatagagatgggaggaaaaaaatgactgcaatcaggcagcagggatcttttttggggtgacagaaatgtgttctaaaactggattgtggtgatggctgcacaactccatatatttattaaaaatcattgaatacttaaaataggtaaatgttatggtatgtaaattatacctcaataaagctgtgaaaaccatagtacaccaaaaaaaggaagctatttgtgaaatggacttttcaaaattttccattttagcaccacaaacatatacatattgccagaaataacggaaccaaagtgtcttctatagtagaatccagagacccatataactctctagtggcatctagtgatataggataaggctttcttcaaaatggttttatttctgaattttatacagtaacagtatattagacaaaaactatttgaaatacaaaaaaatcccttgtctcatgacataaggaataccgcagcaacaagcaccactgttaagcatgcttactacgtacattctaggcactgtgggtgtggctaagtgcttgatggaattatcttagcctggttttgttccatagtgcttcacggcagagcagaaaaatctcaaatattctgaggaaaaaaaacaaggtttttcataacctcaaatattctcttacaaaaggagaacaagaattttttttcctttctgttattttaacagatttgacagttcaattgatgaaaaaataaactaggtgcagtttaaactgaaaatatctgaagcacatgccccctccaaataaaaaacttgtaataaaaatgccaaatgatagctcaattgacctttcaaaagattttgaaattgtgggtgttacctagcactttcagagcattttctgtactaattttatgatatat

SEQ ID NO: 1884501 - DNA, 4001 bp, Homo sapiens
tctatgcctttccccatctccacaggtcctcctatggctcaccccactgcctggcactggctccatgcctccttctctggaaggaagcctcacagtgcccctcacactggcctacaggaaggcaataacatcaaactcaagagtcaagtacctcccaaggtccggctgtgctcttgggactgtccgttcacactgattcatgcaactctgcttgtgttaggtcctctgtgaggccctcctctctctctgggccttggtgtccccttctgtaaagggaagggtccttctagatcccccaggacctcggagccctctcattctctgtccatcatcccttcccttcctttcgggtggacctccctgccttcctccctgcctcccccggccgacgtccacctctgtcccaggctgcactcctgttcctctccaggagtcttgacgtcttttcccacctccgcgtcctctcttcctctcatagcttctcctcccactctccatctctctcctgcatacttcctgcccccacctactcctgtgtctccagcccactcctcccacaaacctccaaatagtcaccttgagaacactgggagaaagcacctaactcaagagaagcgcccacagaatgggaaacccaggaaggcagctagaggggaaacagggggtgccaggcaagtgtcatctacgcctcttttgcttcctgcctcctgttccggtgggcaatatacacagcctcttatcttcccagaggacagggcccttcaagagcacaggagaacgtatcgacctctgtgcctagcatgggtctggcactagcaagcacagccgcccagtcagggtgactggcagaactgccccaaaggaggcatcctgtaggctcagaccagagaagcccgcttcagctgagcctcggcccctggcctcagcccagcacccaagctgactctatgcctcctcgcagccttacagcacccccagcctgcagagtcagagacaagaaagcagaacaaggcggttcctcctccttcctccccacacacccacgcctgccacctggccaaggagacgcctctcaaagacactggtgccttggatgtgcaaagaggaactgcctgtgagtgcgaagatcttgcagccccagacttctctcaatgaggctgagctggatcagggtgaggagaatagaggaaagaggcttggcaacccttgggaggcttagtctgaaggaggaggcaagacagagacccagaacgcagctgaactagcccaactgtcagtgtcatgcttgagtgaggcatcaggctttggggaggggaaggtacctttcccaagcacctcctgtggctagaggtttccaccagccgttccccaattttcatgtgcaccagaaccacccagagtgcttgttaaagtgcagattgctggccccacccccagggtttctgatacagtaggtctgggacgaggtccaagaacttgcgtttccaaacattcctagatgacactgatgctgctggtcgggggaccacacctcgagacccactgacactatcttggatcctcctacaagcccaagaggtgcctgtttgggtcatcccattgtacaggtgaagaggctaaggactggaggggaggggccttgctcaggtgagaacagccaatgaggggacgccccagggaaggtcccaatggaggggagaggctgggggtggaaggacagagggagactagtggtggggagatatggataacaaggcagtatggacggggccactcgcagcgcaggagcccagtcttaaaggagggacctgccagagacctttcctcctccctctttctcttcctcccctccctcctctacttaccccctcccgctccatgcccccatccctccaccctcctgcccacccttcgcagactccggcttcagttgttactccaacagggccgcgtctccagcctccgagccacactggagacacgtgcactgtagaatacacctgagccagtcccagtgcctcccaagggtgtccccatccacaggagcctgaccccacactgttggctcctcccttccagcgcccacaaccagctccgccccggcctctcgcccttcccaagccagtcccagcttctattccagctcctgcctcctccaaaatgacctcccggttgtcccccgcacccttggatccatcaggagctaggtttgggggtggatgaaggaatgggaagagggaaagagcaggagaaggcaggcaagagttgcctgcacgatcagttccctgagggcctgactcactggaatcacctcagtccctcacccagagtctggagtcaggaaaggagggaacagtcagagtgggtagagggagggaggcaggagctgagtgtggggagggggaggatggccctgcaaggcagacatcagatcaagcggggcagagccagctcaggtctcctcccaccccctcccaccttcagctgcttcatctacagggaagaaccgagagtggtcccatttctgctgcccacattctcctggacaccacaaacttcctcccaaacacatcacagcatccccctctccatgccatcacagtcatcctggtcacctggcattctagctatccttgtcctctggcctggggcccacgaggcagctcgcggcagtcacaaggaggcagatttgggcacactgtgaatcagagtcgcgccacaaaagagagcctgagcaggatggatgagggggctcctagtccccaagggtgtgcaagcaagggccaaggccctgccaccagggagcctgtgccctgagaaaggcccctggtgaggtggcaggcctccagctctgagtttggtgaccctgaatgtctgtacaccctcctcagcctcaccccctcagggtgggttgggagctgagcaaagcaagtccaggagcctccaagaggcaggcatggtggctcaagcaggagaggaggaggacgctgagtgtcccgctgggtcagtgtcagaagagagtttacatccctcaggaaatgatggccaaaggaataattgaatgggtggatggatgaatgacgaatgaatgaatggagtgatctcccttctctggatcccctccagggagagtctgttgttgttctctctccaggcaagtctgaccctcccacctggggctcccactgcccccctttcccccaccatggcatgcactgtgtgcatcaatgcagtgccaccctttcccgtctggctcccacaacagactgggagcttttggagggcagagattgtgtcctgcccctctccaggtctccagcattacccagcccctcataggtgttggtaggcgtttgctgagctgtaaatgactgggtaaactcctgtgtgcccaggactactgtactgtgagggctacatgccatcagggagaagaggggtgtggaggaaggatctaggcaggggagatagctgagacctctcaaagcctccccagtctggcacagttacagtctcagagaaggagcctgaggaatggggtgtctcctactgagagcctttggcaacctctcccaggcacctctgcaggccgggaggccctttgtgcttcaggatcatctccacgtgcagaccgggtgggggcagcaggtcaggatggagggctcttccccaagaggagcactgtcactatcaccttctttcatgagtgaggacacctcctccaggaagccttcctgcgtggtcacctgtccccctcccaggccttctgagaattcccagggaccaggggctacagggcctcaggcctcatgtagtccaatcccaagcttgatggggtagactaaggccagaggaggcagggaaggattcacccaggctctcatctggagccaggagacccatgcttcagcccagccctttgggccacactaggacaccttgtcccagagtcctgcttgtctttggggcccctctaatacctgccttggccaggggatggg

SEQ ID NO: 1884502 - DNA, 4001 bp, Homo sapiens
acattcttggtgggctcaaagctgggctgctctggagacagttctccaatcaggagagagttcatatacttcttcacaaggcccttgttgatgtggaaggccacaaagggatcctgcaagtgccgggagaagatgaaaggtgagggagccagccccctggactccggcagtgttcgcaccaaaggccatcctcctgcccgccagaaggctgtacccaagttgaagtgagaggtgaagccagatggacttcctgggtcgagtgcagacttggagaacttttctgtagctagaggtttgtaaaatgcaccaatccgtgctctttagctagctagaggtaaaatggaccaatcagcaccctgtaaaatggaccaatcagtgctctataaaatggacaaatcagcaggacatgggcagggacaaataagggaataaaagctgctcccggccgggcgcggtggctcacgcctgtaatcccagcactttgggaggccaaggcgggtggatcacgaggtcaggagatcgagaccatcctggctaacacagtgaaaccccgtctctactaaaaatacaaaaaattagccgggcgaggtagcgggcgcctgtagtcccagctactcgggaggctgaggcaggagaatggcgtgaaccccgggggagggcggagcctgcagtgagccgagatcgcgccactgcactccagcctgggcgacagggagactccgtctcaaaaaaaaaaaaaaaaaaaaaggctgctccccctcacaccccccaacgtccagcagcggcaacctgctcgggtacccttccacgctgtggaagctttgttctttgctcttcacaataaatcttgctgctgctcactctttgggtccacgccacctgtaagagctgtaacactcaccgcgaaggttcatggcttcattcttgacgtcagcgagaccacgagcccacctgaaggaaccaactcctgacacagaagcacaggccatctccctaggcccagctgccttttgagggtgctcccaggtgtccacagtttaagatcaccgagtatctgctctagttagaaggatgcatcaaggaatgggaagcattggctgaggggaaccactaagaaacacctgcctgggctggcctttcccctgggtgtgtccacagacagcttttgcccaagaatttcagtataggtgagaaacaggagagatgggtggggctgtgtcgggcgttggttccttccggcgggtatggtctcactgacttcaagaatggagccgtggaccttcccgctgttatagctcttaaaggaataacactctttgcagacccaaagaatgagcagcagcaaggtttagtgtgacgagcaaaagaacaatgcttccacagcctgtaagggaactggagcgggttgcagcagctggctggggtggccagcttttattgtcttagttgtccctgcccacgtcctgctgattggctcattttacaaacctctagctagctacagagcgccaattggtgcgtttttacagagcactgattggtgcattttacaaacctctagatacagaaaagttctctaggtccccattcgacccatcaactccagctggcttcacctctcagggctatgagacttccgtcccttcttgcgggtctttcaataagtccctttcctctcttagctagggttctccaaaaaccacgaagaggaagacttccctacgtccgaactggggcacttctgcgtttcttccctttccctccaccgttgttctgggtagggctccacatttccctaagcactctggccaccccctgccccaaggcagctactttgggttgtgcaaggtaaggtccatggcgataagattcacgttggcaggtccggcagccccgggccctgtaagtgatgcggcgtgtggggcgggggccggggcggagccggcggccggtggcaccacacatacggaccaatcgccgtccccgccgcggcattcccggccccaaatcacactgcgggaagctccagcgttggtgcctgtttcgtctgcgcatgcgccgggacacgcctgcgcccttggccgcagtcagggctcccgagtggtcactctggttgacccgcgcaagctctggcctcgcccactaggctggtcgcgtcagagggtggggcgggtcttcgccccgcagcgtctaagctctgctgcgacgttatgggaacctggtgacccgcggcacactctgggacgccagggtagtggatagggacagtggagggcatcacgctgcagggcacgggatcagagggggatgcaaggggaggggacgccattctggccgccaagggggaaacgcggtgaagggaacgccccgactttcgagtccctaggactgagtccccaggactccaacccagcagagaggcgccggggccttagctctgagggctgtggtctagaaagggaagcagcaggcctggggctggggcgcgcgccgaccccgcagtgagaccaagggaagaagggacaggaccccgcgaagggcctaccgccccagagcgtaaacagcggtccgctccgcggaatagctgaagacctcgctggcctgcggctcagtggcctccccggcgattcgagaacagctctgggggtcctcgctaagtgtatgccattcccaatcccttatgtacgccagcggccgcttgccctccccggccagcgctgtcccttccgcgtcctccagtcttcacacgacgcaggggtccccaaggcagcggtctccccaagcttcccgtttcagccccatcctcgagaatgggctcctttcctgctccctctccgctcctgctggcgagtggagaccggcacctaggtccagacgcggctgcgctgcctctcctagccatcgagacaggatgtgactccctcccctggccactgaccccctccctccccaggcggcctgcatccttgctctcctccctcctagcctacccagctcggggttctgtccccgcccagagacctgaggctcggggctgcagatggaatgcacggcagggaggcgggaccctttgtttgtgtgtgcgtgttgttggcctccatccccactccccagactccacttctccaggcctctctcccgccttttcatcccgcatccgcaggacacccaatcaccgggcaacaggtatgatcaggcgcctccgggctttcctccgaattagtcggtgtttggctcggagtgcgtaactctgtctcccctgcactcagcctccggtcccgccctctcctgtgcccccgcctggctgcgctcaccgtggcatcctgcccggcgtagtggctgatgacccgggagccccctggatgccggcgggtgaactcgctgatgttgtacaccttacggtcgatcactagccaccgctcctcgcaccctgagcgctgggccacctcgtcccaggtgaagtagcgcggggtaggtccctgagccgcggtctcggcggccaccgggtcgggggccatagctggcctggcgacgccgcgcgccgggccagcaggggctgtcaggcgcgtgctcggggtccgcgggctccaggagtggatttgctggcgcgcgcccagagccagccgcctgcgcgccgggttttcagcaccgcagggcagaccggcgggcctcgcagcgcgcgttcccattggccgagcctcgtggcgcggggagcgagatcccgtcccccggtgggtcttgggcaactcacagctgggctgccaacacgcgccccctcgcgggctccctaaaggcgtcgccgccggattcgacttcctgacgtcaggcgggcatcgcggcgttggctcccagggggcgccgcggtaggaacagcggttctagtgcaggccctgggtgcggggccgcgctgcaggagtgaatggactgaggggccagggctgcggggtggccgcaggaagggtgggcggggccggggttgaggtttttccgtgcacgaggct

SEQ ID NO: 1884503 - DNA, 4001 bp, Homo sapiens
tggtctgcagggaggggttgctgagctgggccacggcaggggccaatcggggcccagggattcagagcagccaggacagtgtgagcagagctgcctgtgggaaggggagagagacagtgtcttaggggccagatgtttgttggctgcctacagtccccaggagaaggtccaacttgctctgtgacttcagcaaatgtgcaccctctctgagcctgtgtcctcctgtcccaaacaggttcatgatggatgccaggaggaccaggtcctggatgtgcgtgcccagcagacagaaagggctcaatagccaacgcctgttattaagcaatttgacatttattcctaggtctctatttcccattttacaaattttattttgtagtaccagaaacctttttattcaaatgaaaaattctgacagggcacagtggctcatgcctgtaatcccagcagtttggggggctgaggcaggactgcttgaggccaggaatttgagaccagcctgggcaacatggtgaaaccccatctctacgaaaaatacaaaaattaaccaggcatggtggcacgtgcctgtagtcacagctatttgggaggctgagatgggaggactgtgtgagccctggcaggtggaggctgcagcaagctgtgattgtaccactgcgctccagcctgggtgacaaagcgagcaagaccctgtctcaaaaaaaaaaaaaaaaaaaaaggaaaatttcctcagaaccccgttgtataagaaacaggtggggctgggcgcggtggctcacacctataatcccggcactctgggaggccgaggtgggcagattatctgaggtcaggagttcgagaccagcctggccaacatggtgaaacccagtctctactaaaaacacaaaaattagctgggcatggtggtgcatgcctgtaatctcagctatttgggaggctgaggcaggagaatcgcttgaacccaggaggcagaggttgcagtgagctgagatcatgccaggaggggaggcttcctcctgggaggaagcctgttgcattccagcctgggcaacagagcaagactctgtctcaaaacaaacaaacaaacaccacaaagaaataggtggaaatgaggctgttgtgggaggcgggacaggggtggggtcagctgtcctgtcctgggttggctgctcttcctctaccagcagctggggtcctgggccctcttaggaatcctaggggctggagaagctgctccaccaaccacagggctgtgctccagggagatgagactggcaaaggaggggagagtaggaagcagatggggaggctggctcagggccccatcctgggtgggggggctccagcacaaacactgggcctagagcactcagccccccttggccacactgcatgtcggtgggtgcttcctcagggtgcaagacagaggctcaggattggttcagcaaacatttattgggcacgcgcctgggctgggaactgagctcacagatggggagaggagcgagacataagcagaaaccagcaccggggctccgagagggcagtgctctgcggcagcactgtgtgggggtgcccaggtggggacttagaagcttcaataaggccttctggaggcagcaaatgcttggacagagcttgaaagggttagtaagagtgagcctggcaaataagctaggaagagtattgcagcccaagggaacagcatgggcaaagcatagaggtgccacagggcaggcagggcaggggcaggactgaagctgttcaggctcattcacggggaatgagacagagggaggtgggaccatgagtgctgcactggggtcgcaggatctctgctgactgctggacacccccggccctcccctatccctgcaggtcctggtggctggcattgaggcgaacatacctgtgacctatggaattggcagccagaggggagacgagagcactggctgtcaattcataggtcagagccctgtgcactcggtctcggcagcccaccgacagccctccactacccgccaccatctggcctgggagcgtcgccacggtagtcctggctggtctgctggccagcacctgcctctccttcttcgtgggtactggccctcgccccagataacagcagccccactggaaccagtgggcacttccacatggagttgctgttacagggggcgggaaccaattggagaccggggccctgcctggcgtccgccttcggcagggctctggagagtgtcccatgcccactcacctgggctccccagtcttcgtggccccaggtccatggtcttttcaccgaggcttcttatcatccggggcccacacctggcgccccgtgtgctgccagcactccttcctgggcaaagtccaggctcaaccccaaatcggcctcataaagccgggagcggctcggatttacaactcctgggcagcctttgcccgctctgatgaccccacgccctctgtccccaagttattttgtttccttgtttctttcccaaccagagctgggcctcagtttcaggtttggccactgtcacctctgccctttgcccaccctccctgctgcagccatggggcagagagacagcaagggacagctggcacttgtcagtccccagggacctcccagtgcctgatttcatgaggatggcctcgtatgggaagctgaagatgagactaagaagaagtgtggggggctgtgtgggggagggcacagaaagagggatagtgaggcagaggggctgagagaggaagagaagagtaaggccgaggatggcggtgcacacctggcatcccagcactttgggagaccaaggtgggaggatctcttgagcccaggagtgcaagaccagcctgggcaacacagtgagaccccatctctacaaaaaataaaaaattagcctggtgtggtgatgcatgcctgtggtcccagctactcaagaggctgaggcgggggatcacttgagcctgggaggtcgaggctccagtgagctgggattgtgccactgcactccagcctcagtgacaaagaaagaccctgtctcaaataaaaataagaggagcaggtagagaactagaaaggaacagagaaaacaaacagggatagtggatgacgaggtgtaggaagggggacgacagggaactggaaaagatgtagatacacaaacctgccgcagaacatgaggaacaggctgtgagcagtggctcgcctggaaggacgcttaggacctcagtggcctggaagacagcaggggcctgggagctgggtgaccttgagcaagtagcgtaacctctctgaaccactgtccatatgtcaatcaggacttacgaggccaccctgcacgctgggctggcctggtgggaagcatccgccctgggacccttgggtctctctccgctgtggggagaggaagcagctgctggccagggtccctgagtgagcccagggctctgtgaggcagagcttcctcttgcaaagcgtgttctcgtccctcccagacaggttccggtgacaggtgccagtcctgcagagacccagcaggcattttgggagactccaaagcttctggagagaaaggggagcttttagagtagacttgggccctgccccctttgccagtggtgcatacaggcctagagagacagagggggccgcccaaggtcacagagcagggccccagggcctgtgctgccccaacaaccttcccgaagtggcgtccccccttctcaggatgcagtcagggtgggatgggggatccctgggctggaatccttctgcctggggggacagacctgcgaaggaagacaccgtagctggtggctggccctccactcagcctggcggcccttcccacagaggcctgggcgagaccagcctcctgcagcgtggtgtccaagtgccctggcctggcagagacagcgcccgatcaggaatcctggctccacagctctgagcgctgatgctaaggcccccttatcccacagtg

SEQ ID NO: 1884504 - DNA, 4001 bp, Homo sapiens
atgtgcaccctctctgagcctgtgtcctcctgtcccaaacaggttcatgatggatgccaggaggaccaggtcctggatgtgcgtgcccagcagacagaaagggctcaatagccaacgcctgttattaagcaatttgacatttattcctaggtctctatttcccattttacaaattttattttgtagtaccagaaacctttttattcaaatgaaaaattctgacagggcacagtggctcatgcctgtaatcccagcagtttggggggctgaggcaggactgcttgaggccaggaatttgagaccagcctgggcaacatggtgaaaccccatctctacgaaaaatacaaaaattaaccaggcatggtggcacgtgcctgtagtcacagctatttgggaggctgagatgggaggactgtgtgagccctggcaggtggaggctgcagcaagctgtgattgtaccactgcgctccagcctgggtgacaaagcgagcaagaccctgtctcaaaaaaaaaaaaaaaaaaaaaggaaaatttcctcagaaccccgttgtataagaaacaggtggggctgggcgcggtggctcacacctataatcccggcactctgggaggccgaggtgggcagattatctgaggtcaggagttcgagaccagcctggccaacatggtgaaacccagtctctactaaaaacacaaaaattagctgggcatggtggtgcatgcctgtaatctcagctatttgggaggctgaggcaggagaatcgcttgaacccaggaggcagaggttgcagtgagctgagatcatgccaggaggggaggcttcctcctgggaggaagcctgttgcattccagcctgggcaacagagcaagactctgtctcaaaacaaacaaacaaacaccacaaagaaataggtggaaatgaggctgttgtgggaggcgggacaggggtggggtcagctgtcctgtcctgggttggctgctcttcctctaccagcagctggggtcctgggccctcttaggaatcctaggggctggagaagctgctccaccaaccacagggctgtgctccagggagatgagactggcaaaggaggggagagtaggaagcagatggggaggctggctcagggccccatcctgggtgggggggctccagcacaaacactgggcctagagcactcagccccccttggccacactgcatgtcggtgggtgcttcctcagggtgcaagacagaggctcaggattggttcagcaaacatttattgggcacgcgcctgggctgggaactgagctcacagatggggagaggagcgagacataagcagaaaccagcaccggggctccgagagggcagtgctctgcggcagcactgtgtgggggtgcccaggtggggacttagaagcttcaataaggccttctggaggcagcaaatgcttggacagagcttgaaagggttagtaagagtgagcctggcaaataagctaggaagagtattgcagcccaagggaacagcatgggcaaagcatagaggtgccacagggcaggcagggcaggggcaggactgaagctgttcaggctcattcacggggaatgagacagagggaggtgggaccatgagtgctgcactggggtcgcaggatctctgctgactgctggacacccccggccctcccctatccctgcaggtcctggtggctggcattgaggcgaacatacctgtgacctatggaattggcagccagaggggagacgagagcactggctgtcaattcataggtcagagccctgtgcactcggtctcggcagcccaccgacagccctccactacccgccaccatctggcctgggagcgtcgccacggtagtcctggctggtctgctggccagcacctgcctctccttcttcgtgggtactggccctcgccccagataacagcagccccactggaaccagtgggcacttccacatggagttgctgttacagggggcgggaaccaattggagaccggggccctgcctggcgtccgccttcggcagggctctggagagtgtcccatgcccactcacctgggctccccagtcttcgtggccccaggtccatggtcttttcaccgaggcttcttatcatccggggcccacacctggcgccccgtgtgctgccagcactccttcctgggcaaagtccaggctcaaccccaaatcggcctcataaagccgggagcggctcggatttacaactcctgggcagcctttgcccgctctgatgaccccacgccctctgtccccaagttattttgtttccttgtttctttcccaaccagagctgggcctcagtttcaggtttggccactgtcacctctgccctttgcccaccctccctgctgcagccatggggcagagagacagcaagggacagctggcacttgtcagtccccagggacctcccagtgcctgatttcatgaggatggcctcgtatgggaagctgaagatgagactaagaagaagtgtggggggctgtgtgggggagggcacagaaagagggatagtgaggcagaggggctgagagaggaagagaagagtaaggccgaggatggcggtgcacacctggcatcccagcactttgggagaccaaggtgggaggatctcttgagcccaggagtgcaagaccagcctgggcaacacagtgagaccccatctctacaaaaaataaaaaattagcctggtgtggtgatgcatgcctgtggtcccagctactcaagaggctgaggcgggggatcacttgagcctgggaggtcgaggctccagtgagctgggattgtgccactgcactccagcctcagtgacaaagaaagaccctgtctcaaataaaaataagaggagcaggtagagaactagaaaggaacagagaaaacaaacagggatagtggatgacgaggtgtaggaagggggacgacagggaactggaaaagatgtagatacacaaacctgccgcagaacatgaggaacaggctgtgagcagtggctcgcctggaaggacgcttaggacctcagtggcctggaagacagcaggggcctgggagctgggtgaccttgagcaagtagcgtaacctctctgaaccactgtccatatgtcaatcaggacttacgaggccaccctgcacgctgggctggcctggtgggaagcatccgccctgggacccttgggtctctctccgctgtggggagaggaagcagctgctggccagggtccctgagtgagcccagggctctgtgaggcagagcttcctcttgcaaagcgtgttctcgtccctcccagacaggttccggtgacaggtgccagtcctgcagagacccagcaggcattttgggagactccaaagcttctggagagaaaggggagcttttagagtagacttgggccctgccccctttgccagtggtgcatacaggcctagagagacagagggggccgcccaaggtcacagagcagggccccagggcctgtgctgccccaacaaccttcccgaagtggcgtccccccttctcaggatgcagtcagggtgggatgggggatccctgggctggaatccttctgcctggggggacagacctgcgaaggaagacaccgtagctggtggctggccctccactcagcctggcggcccttcccacagaggcctgggcgagaccagcctcctgcagcgtggtgtccaagtgccctggcctggcagagacagcgcccgatcaggaatcctggctccacagctctgagcgctgatgctaaggcccccttatcccacagtggaaaccaaggcacagagaggaaggggctcgtcccggccaccccatggctgtccaggtccctttcttcctcaggattggccacccttcagagaggtgcctgggttcaggagcctcctaggacagggagggcggcaggggtcctaccactcaggaagcctcttacctgagtgccgggctggccttcggggcacaa

SEQ ID NO: 1884505 - DNA, 4001 bp, Homo sapiens
gtgcctgggcagcaggcctgggatatgaggggcctactcctccatccacagccccgacccacattctggagggatggtcgtacctctgtgaccagccctccacaccgtcacataggccagcagggggcaatgccaggtgccatccagagcccacccccatgtcctcccggaggtcatgagctctgccctacgtaccccagccccacaatgggaaggaggcatggagctggcagagcatgcgccacgccgtccctgtgtgtgtttctgaggaactcctgttcactctgaggccactgcctaggtgcccgtccctggtctgctgctgctggctctgatgaagctaaccagccttcttccccaccaagagggtgtcccagcagcagctatggctatgttccggcggggggaaggcggggagccttcctcctcactggctgtttcatttttttatttttttgaggcagagtctctcgtcacccaggctggagtgcagcggcgtaatctcgtctcgctgcaacctccacctcccaggttcaagcgattctcttgcctcagccttccaagtagctgggattacaggtgcccaccaccatgcctagctaatttttgtatttttagtagagacgaggtttcaccatgttgcccaggctggtcttgaactcctgatctcaagtgagcgatcacccgcgtctgcctcctgaagtgttgggattacgggtgtgagccaccacacccggcctctcactggctgtttcaggtgaaccaaatcccatggccccaaaaagtggccagagtgcttcagatcactcagcaaacctttgagttgctgaaaagtttacttttgagttttaaactgtactttgaaaactatattgtgaactgtgttgacatgaggaaaggctgggctccctgaaaacatccagttccacagcagggcgggcccaagcccagccaatccccaggcaatgcagggcagggatcccacctggtgtaagtacgggcagagggcagagccaggctgtatcgaggggcggcgctgggaccctcctcgcccagagttcctactcatccccagcacagaagtgctctgtagggccagctgaggacaccccggttcactgagggtggcccacagtaagtcgccgtctggcagtaagttagctctgcaggtgtggaccccaagaccacacacagcctttctcaggtgcaggtcctgccaagcctcacttcgcagtggtgacaggcaaccccgtcagggcagggagcttccaaaggccagtccgagtccatgccaggcgtccactaaatctgcctctccctctccagcgagcaggtgcagccctcaactcctgcaggcctggggagcggagacagggcctgtaggctcggacacgacccggtcctgattttaacagtagacttgagaaggcaggctcagcagacaggctgctggaggatccacccgctgtctcccgcagcggccccactgaagcggcagaaacacacagaagcaccaaatctgtcactctcttcccgtaggaagtccccagaggtggccctccggaggatggtcctgttggctgaagatatgaccacacctgtgcctgcccagggccaccttcagcttggcaacaggaactccgcacactggtaccctggacacacaaggaaaagaaagttccctccaagagggtatctggcccagcctcagccccaccaagcggagggcagcaaagcccccgaatgatttcgcttacccccacccgccgtccctgctggccagacaggcacaccccgtccatagggcaccccctccccacggtatccagctgccctcgcgtccccgtgtggccgctcgcctgcccgccagacccggacacggggccaggagggtcgcgctgcccaggcacagatcagccgctgtcacacgcacagtgggtctggggcagcgcagtgtgcggtgggcaggggctgccctgcgcctggaggcactgccgggtgggcgggcggagggattgaccccacccccgtcccctccaacttgggcgtccgagccccgccgcgcctgcccagcccgaccccccgcagcccccgcgggagggcggcctctgaggggcgccccgcccgccaacctgggatccctcgcgcgtcacctgcgaccccggcgcggggccgtcgccggctctcggcccaacttcagctgcggccgctggcaccctctcgccccccggcccgacccgaccggccccgggccccgcggctccacgcccagccccgtatgcaaatgacctggtccctcagccaatggccggcctagccgggcccgccctaccgcaacgcagccagtgggcgcgaggggggttcgcgacgccccgcccaccgccgcgcggcccttcgcgggcgaggccggcgcgttcttttctgcacgtctgcccggggaggggcggcacctgccgggcggggcctgcggggcgccagctgcgagggcgcggcggggccagggcgcgtcccccggccgggcggatggtacggcccgaggtggtcctcctcccgccgcgcggtggtatggcccgggctcgcggggcttccgggctgggcgtggggcgcagcctggcgacgggtcctccgcccgcgggtgtgcgtggggcggcagggccggccgggagctgcccctcttcccgcggcgcggtggtacgacccggccgcctccgtgccccgcacccgcgtcccgcgggcccgccccccccaacccgctgggcgcccggcgcacgtatcccgggccgtgacccgggtggggcctgcgcgggcccggacacggcgtcctcgggacgcacgcaccaccccccgggcggcttggggtccccaaaggacgcccgggtccgtcctgctggcgaagagggggctctggctctgcctggtttgcctggcgacccccacggggcgcccttgggggctctgggtccctcctgcgcgctctgtctccgcggaagcctctggagcctggagggggtgcctcaagggctcaggggtcttcgcagccctgtgccggtctttgaggggacgaggcgagagaatcctgtctgtgcgctgaaaacgtgtaaaatcaaaggagccttgacggtttgaccttcgttaggactcgcagggccagcttcagacgtggaagtatcggactccggggtggggctccaaagtggcagccaaaggagatttggccgccggccccccttggcactgtcaccctggtcctcggccccgggccgtctcccctcagctccctggccctaaactcaccgccctgctctttgtcctcccctggccccatgacctccctgcctcggcatccgcgcaggcctgggccgcagcctgccccctgccccagccccggcggcaaagtgctggggccccagggagcttccgaaccagcccatgtcctcaggggcttgaaggctggggacaaaaattcagatgcagagtctggggtgactcagacatgatcagcaagacatgaccgaggtcttgctgaccccttgacccttggcccccgatagaaccgagtggctccttgcacctgtggctgcctgtggatggggaaggtgcccagaggatcacggagccactcggttctattgggggtcaggggtcagcaagacctcgatcctgtgggtcgtgaaggagcctctaagagtcagtggggtccctgagaaggcccacgtcttcatggcagggcagaggctcctagggcagtcagactaggggacaagaaggggcaagaggacagggcagctctgtgttcctgtcgtgccctgctgacgtgaacccacttctgcccccagtcctgccaatttcacaggcaccttttctcagcatctgtagtgagtgggatggtccctccgccaaaaagaagatatatccacatcctaatacccaggcttcctaaatgtgccctcatcgggagaaagcatctttgcagatgtcattaagggaaacatcttgaaacg

SEQ ID NO: 1884506 - DNA, 4001 bp, Homo sapiens
tgtttctgaggaactcctgttcactctgaggccactgcctaggtgcccgtccctggtctgctgctgctggctctgatgaagctaaccagccttcttccccaccaagagggtgtcccagcagcagctatggctatgttccggcggggggaaggcggggagccttcctcctcactggctgtttcatttttttatttttttgaggcagagtctctcgtcacccaggctggagtgcagcggcgtaatctcgtctcgctgcaacctccacctcccaggttcaagcgattctcttgcctcagccttccaagtagctgggattacaggtgcccaccaccatgcctagctaatttttgtatttttagtagagacgaggtttcaccatgttgcccaggctggtcttgaactcctgatctcaagtgagcgatcacccgcgtctgcctcctgaagtgttgggattacgggtgtgagccaccacacccggcctctcactggctgtttcaggtgaaccaaatcccatggccccaaaaagtggccagagtgcttcagatcactcagcaaacctttgagttgctgaaaagtttacttttgagttttaaactgtactttgaaaactatattgtgaactgtgttgacatgaggaaaggctgggctccctgaaaacatccagttccacagcagggcgggcccaagcccagccaatccccaggcaatgcagggcagggatcccacctggtgtaagtacgggcagagggcagagccaggctgtatcgaggggcggcgctgggaccctcctcgcccagagttcctactcatccccagcacagaagtgctctgtagggccagctgaggacaccccggttcactgagggtggcccacagtaagtcgccgtctggcagtaagttagctctgcaggtgtggaccccaagaccacacacagcctttctcaggtgcaggtcctgccaagcctcacttcgcagtggtgacaggcaaccccgtcagggcagggagcttccaaaggccagtccgagtccatgccaggcgtccactaaatctgcctctccctctccagcgagcaggtgcagccctcaactcctgcaggcctggggagcggagacagggcctgtaggctcggacacgacccggtcctgattttaacagtagacttgagaaggcaggctcagcagacaggctgctggaggatccacccgctgtctcccgcagcggccccactgaagcggcagaaacacacagaagcaccaaatctgtcactctcttcccgtaggaagtccccagaggtggccctccggaggatggtcctgttggctgaagatatgaccacacctgtgcctgcccagggccaccttcagcttggcaacaggaactccgcacactggtaccctggacacacaaggaaaagaaagttccctccaagagggtatctggcccagcctcagccccaccaagcggagggcagcaaagcccccgaatgatttcgcttacccccacccgccgtccctgctggccagacaggcacaccccgtccatagggcaccccctccccacggtatccagctgccctcgcgtccccgtgtggccgctcgcctgcccgccagacccggacacggggccaggagggtcgcgctgcccaggcacagatcagccgctgtcacacgcacagtgggtctggggcagcgcagtgtgcggtgggcaggggctgccctgcgcctggaggcactgccgggtgggcgggcggagggattgaccccacccccgtcccctccaacttgggcgtccgagccccgccgcgcctgcccagcccgaccccccgcagcccccgcgggagggcggcctctgaggggcgccccgcccgccaacctgggatccctcgcgcgtcacctgcgaccccggcgcggggccgtcgccggctctcggcccaacttcagctgcggccgctggcaccctctcgccccccggcccgacccgaccggccccgggccccgcggctccacgcccagccccgtatgcaaatgacctggtccctcagccaatggccggcctagccgggcccgccctaccgcaacgcagccagtgggcgcgaggggggttcgcgacgccccgcccaccgccgcgcggcccttcgcgggcgaggccggcgcgttcttttctgcacgtctgcccggggaggggcggcacctgccgggcggggcctgcggggcgccagctgcgagggcgcggcggggccagggcgcgtcccccggccgggcggatggtacggcccgaggtggtcctcctcccgccgcgcggtggtatggcccgggctcgcggggcttccgggctgggcgtggggcgcagcctggcgacgggtcctccgcccgcgggtgtgcgtggggcggcagggccggccgggagctgcccctcttcccgcggcgcggtggtacgacccggccgcctccgtgccccgcacccgcgtcccgcgggcccgccccccccaacccgctgggcgcccggcgcacgtatcccgggccgtgacccgggtggggcctgcgcgggcccggacacggcgtcctcgggacgcacgcaccaccccccgggcggcttggggtccccaaaggacgcccgggtccgtcctgctggcgaagagggggctctggctctgcctggtttgcctggcgacccccacggggcgcccttgggggctctgggtccctcctgcgcgctctgtctccgcggaagcctctggagcctggagggggtgcctcaagggctcaggggtcttcgcagccctgtgccggtctttgaggggacgaggcgagagaatcctgtctgtgcgctgaaaacgtgtaaaatcaaaggagccttgacggtttgaccttcgttaggactcgcagggccagcttcagacgtggaagtatcggactccggggtggggctccaaagtggcagccaaaggagatttggccgccggccccccttggcactgtcaccctggtcctcggccccgggccgtctcccctcagctccctggccctaaactcaccgccctgctctttgtcctcccctggccccatgacctccctgcctcggcatccgcgcaggcctgggccgcagcctgccccctgccccagccccggcggcaaagtgctggggccccagggagcttccgaaccagcccatgtcctcaggggcttgaaggctggggacaaaaattcagatgcagagtctggggtgactcagacatgatcagcaagacatgaccgaggtcttgctgaccccttgacccttggcccccgatagaaccgagtggctccttgcacctgtggctgcctgtggatggggaaggtgcccagaggatcacggagccactcggttctattgggggtcaggggtcagcaagacctcgatcctgtgggtcgtgaaggagcctctaagagtcagtggggtccctgagaaggcccacgtcttcatggcagggcagaggctcctagggcagtcagactaggggacaagaaggggcaagaggacagggcagctctgtgttcctgtcgtgccctgctgacgtgaacccacttctgcccccagtcctgccaatttcacaggcaccttttctcagcatctgtagtgagtgggatggtccctccgccaaaaagaagatatatccacatcctaatacccaggcttcctaaatgtgccctcatcgggagaaagcatctttgcagatgtcattaagggaaacatcttgaaacgagatcatcctggactttctgggtgggccctaaatccaatgatcagtgtccttataaaagacagggaaaacaggccgggtgtggtggctcaagcctgtaatcccagcactctgggaggccgaggtgggcagatcacctgaggccaggagtttgaggccagcctggccaacatagtgaaaccccatctctactaaaaatacaaaaaaatcagccgggcatggtagtgtgagcttgtaatcccagctacttgggaggctgag

SEQ ID NO: 1884507 - DNA, 4001 bp, Homo sapiens
taaaatggagaagaagacagaagggcttagaaacaggtctataattttacgccaagtttaaaatatcttacctcgaatttgtatccaagatttaggtctttactacctgtgctatctggtgtaatgaatggcgaccttggccaagaggaattccctggactgttgtctttgatcctttccgatcacttaaggctgatgagttgagcacctcctggctaaatatggccttatcagtcactgtgcgctccttaaatgtataaggtcaggttcttacctgtggggcatcacatccctgaaggaaggacagacaggcagatgcctagttaaagcacagagccatgtaaaagttttttataaaattataaaacaatgcaaagggatggagagagtaattctctctagaagaactggtctattatttgatcatgtggccataagaaatttacttactatgtctggatagcagtatttcaatggcaaaatagcatgtttgacaaggcaggacactttttgggctctaatagtctaacgttgaagttagattagctggtttcatatgtattagtctcatcttccctactagactatcatcgggtagggataatatctcaatcatctctctatcccagggcccagagggcactgcctgtgactgtagtaggcatccattgagtgcacattgattggttgactaaaattcatctttctatcttactctaatatcttagaatctagtagaattcagcactccaaattgataggcttcaaacaatggagtttaaaggtatatataaatgcctgcagagagctatttctagcctaatgccttatttttgtgaatcttgatgaagggctcgaagagggctctgcacctcaattttactttgacagaaatctatctgaaaagtttcctcttctgaactgatctaagcccctcacccctccatgatcctccctgagtcttaacaccttagacctgtgaacattaatgtaaatgtgtatcttgaaggtgtgtctacatgtgagaattttgtgtgtgtatgcatgcaagttgtctgagtctctctgagtgtgtgcttgtgtgttttctccattgagagcaagttgtctatgccctgcagaattcccagcccaacctcagaaaccaaaagccttcctccaagttacagagtttacgccagagaacaaacatggatggagctcatgtttcttgcttgtcagtcctaggtcttcattccttattcctggaggaaggaatctattcatgaaggtttagatggagataaccatggaaaagctaccagtctcagtgttgttgggttttgtttttgtttttgtttttgagtattaaaagatagcaagcaagtttgactttttctactgaatagatgatgttctgtctgtcagaaagactggtgcctggaaagttttttgcagacacttgctttaagtttatgacttgctttgctcccacaggagcaagaaaatgaaccatttgtttttcaaaacacacacacacatagaactataaaataaaaattgatggccgaataagctgccccccacccaagtttaattcatacctgtctgagtgtctgtacaatttaagcactaaggtataagtgggtccaagtctaggcttccagagactatcccatgaatattaatattagtctgggatttccagcgaacacaaagtagcccaatgttacaccactaacaccgtttctgggtcaggatgactcctgaggcaaaagaaacttctatgcactggagaagcttcaggttccttttcttgccccccatcacccccaccttcccccagcacttgctgttttattacagaattagtgggaaggagaccatttgtggagctgttgctgttctaagcactttacaaataataactcattgattcctcaaaataattctataaggtaggtgctattactacatccatcttaccagtaaggaaactgaagcatggaagcacttacccaaggtgaaacagccaataattaggagagccaggtttcaaacccaggcagtctgcctagagactctattaactgtgaaaccacactatctgatggaccaaacctctgtggcaggcagattccagaaatggacttgtaatgtcaatattaaataaaatcacagttttaaatagaacaaaactttggcaattatgtattttaagattaattaattttaaggattataacaaggcaaatataaaaatggaaaacattgagaacttgttgtaacagcccatggactatgatttttttaaatgtactaataagagcaaggaaacttcaacgatttctcttcttttatcctctcatcttgatatctctggatacaatgctccaccatctgtccatatatgcctcagctatgttgaatcccaggaatggaattccttaaaagcatacataaaaagacctctgtagtctgttttgtgtggttggaggggagagtgactcctctgtatcctctggtaggtgaaagccctggaccgcgtagcatcctttgttagtgattttacttgaaatctaccttcaggagctcttttagggcaggcctggtggtgacaaagaagacatttatgcagccaaaaaacacatgaagaaatgctcatcatcactggccatcagagaaatgcaaatcaaaaccactatgagatatcatctcacaccagttagaatggcaatcattaaaaagtcaggaaacaacaggtgctggagaggatgtggagaaataggaacacttttacactgttggtgggactgtaaactagttcaaccattgtggaagtcagtgtggcgattcctcagggatctagaactagaaataccatttgacccagccatcccattactgggtatatacccaaaggactataaatcatgctgctataaagacacatgcacacgtatgtttattgcggcactattcacaatagcaaagacttggaaccaacccaaatgtccaacaatgatagactggattaagaaaatgtggcacatatacaccatggaatactatgcagccataaaaaatgatgagttcatgtcctttgtagggacatggatgaaattggaaaccatcactctcagtaaactatcgcaagaacaaaaaaccaaacaccgcatattctcacgcataggtgggaattgaacaatgagatcacatggacacaggaaggggaatatcacactctggggactgtggtggggtcgggggagggatagcattgggagatatacctaatgttagatgacacgttagtgggtgcagcgcaccagcatggcacatgtatacatatgtaactaacctgcacaatgtgcacatgtaccctaaaacttagagtataataaaaaaaaaaaaatttttacaactgcacaaattttgataaaaatgagttaaaaaaaaaaaaaaaaaaaaaagaaatctaccagactttttaaccaatattcctatgtaactttttgcgttttcatgttaggtcattgggaagtgagggaaggcaagtcagagttttctagtgaggctctgctgagcttctgtgttgtctcttctaagacatattgcatatgtaccttaagaaataagtgaaatcatgaaaatgaatgttttgctatagtatcctgtggcatgttgctttatactgtgatgcatccttgaacatatatcattgtatttcttacactctgactctattaaatgttttattccatttagaatcccaaacatagtctttgcccaaagttgtcaattatctgcaacatatacttgattatttttcccattgaatcaattatctactgttgcataagaaattatcccaaaacttatcaacttaaaataacaaatatttattttctcacagtgtctgtagatcaggaatccaagtgtggcttagctgggtacttttggttcaaagtttcttaggaagttgtagatgagctataagccagggctgtggtctcatctga

SEQ ID NO: 1884508 - DNA, 4001 bp, Homo sapiens
ttttatatttttagtagagacggggtttctccatgttgtccagcctcgtcttgaactcctgggcccaagccatctgcctacctcagcctcccaaataaattaattcatatttgtatatgtctctgtcactgaactgtaagctcctagtgcaaataaactttttttccactgggaaactttctttccactaggaaaaaatgttttcctagcacagggcaagaagttttcctagcaccgggcacagtggctcatccttctaataccagcactttgggaggctgaggcaggaggatcgctttagcccaggagtttgagagcagcctaggcaaaataacaagacctcatctctacgagaaaaaaaaaattagctgggcatggtggcgtgtgcctgtagtcccagctactcgggagactagggtggcagaattgcttgagtccagaaggttgaggctgcagtgagctatgatcgctccactgcactcctgcctgggagacagagtgaaaccctgtctcaaaaacaaacaacaacaacaacaaaaaggctgggcacggtggctcacccctgtaatcccaacactttgggaggccgaggctggcggatcacgaggtcaggagttcgagacaaactggacaacatggtgaaaccttgtctctactaaaaacacaaaaatttgccgggtgcggtggcaggcacctgtaatcccagctactcgggaggccgaggcaggagaattgcttgaactcaggaggcggaagttgcagtgagccaatattgcgctactgcactccagcctgggtgacagagcaagactccatctcagaaaacaaacaaaaaaaccccacaagtttctcatttatctccataacccaacacatacatttatttgtttaacaaatatattttgaattaaatgcctgctatgtaaagggactgtgctaggtattggggatacaaaaatgaatacaacaaacttataagccttcgaagactttcgtatttagtggaggaaactgacagcctcgcccttaatagtcagaatgcataagagaatgtaactactgcaaaagaggtagagaaaagtgctctgccattcagaggagagagggcatttgggtaaggataccaaaaaaggcttcctggaagaggtagcatctgagctgcagctagaagaggattttaattggtaaagatcaggggctgagaaagcagagaacaaagcatgaataaaatgcacaggggcaggaaaatacatggtgagtctggttaatctttagccttaaatgccaggctaagaaatttgggggagacagggtatgctggctgacatttgtttttttttgttttttttgttttttgagacagagtctcactctgtcgcccaggctggagtgcagtggcgcaatctcggctcactgcaagctccgcctccggggttcacgccattctcctgtctcagcctcccgagtaggtgggactacaggcgcctgccaccgcgcccggctaattttttgtatttttagtagagacggggtttcaccgtgttagccaggatggtctcgatctcctgaccttatgatccgcccccctcggcctcccagagtgctgggattacaggcgtgagccaccgcgcccggccaacacttgtttttttgttcttgtttgtttggttggttggttgattgtttttgagatggagtctcgctctgttgccaggccagagtgcagaggcgcgatctccgctcactgcaagctccgccttccgggttcaagctattctcctgcctcagactcccgagtagctgggactacaggcgcgcaccattacacacagctaattttttcgtatttttagtagagacgaggtttcaccatgttggccaggatggtctcgatcttctgacctcgtgatccacccagatctgtctcccaaaatgctgggattacaggcgtgagccactgtgcccagcccgtggccgacacttgtaatcctaggactttgggagcctgaagcaggaggattgcttgagcccaggagattgaggctgcagtaagtcatgcttacaccactgaactccagcctgggcaacagagtaaggaaaggaaggcaccaggattttttttagtaatacacaacatacagatctacaacatgtacagaccatatacagctccaaccacatgtgttcagaacatacacttctcatacaaccctagacagccccacagtcccttcaaaccctcactgacagcctgactcttttttttaccttttctgtggttgcaaaactgatggctttcctgagttgcagggcccaagatgcagacaacctcatcagtctctgttcctgagataccagggcctactatgtacgtaccaaagtagaggctcctctctttggcatgagagcaggcacctgctcctgagaaactccttcatgtccctctcctcatcccaagccccatctgtctctcagatgacaggaatggatgccagaagactccaccctgactgttcaggttctcctgggtgacaacccctggtcccctaatgcctgtctcctcctcctcacccgctcctcctccaggcaaggctcatcctcaggcacaagatgctgcctgcatttcctcttttggcttggaccatcattccctccagaattcattcctcacactgttccctaataaaatccatctcaaaaactctagattccttcccagccacttcctaacccaggaaataagtagcagctgtgtcctttctctccctctttccctggctgggatttgggcctcaagcttcccatcccactgagaagttccagagcaaagactgtcaccagaatttaagtgacttccaaacccagggcccccaaaatcagtgctgcagagggagtcccaaggccccttcaagccagacagtcaccagtggcacccacaagcagaaactgtctgttgtctaatcacagcaggggaggaccatgaaaagttgtgatagcctttccctctgacaccttgggtggcaaggacagtgatgggcatggcgggacagagacgacggggcagctgatggataggggacactggcctgggggtcaggaaacatgtattcttaccccagctatgtcatggacacctgggtaacattgtggcagttgcattccctctgtagcctcagcacccttgactgcaaacataaaaggatctctcttggccgggtgcggtggctcatgcctgtaatcccagcactttgggaggccgaggcaggtggatcgcttgaggtcaggagttcaagaccagcctggccaacatggcggaatgtcatctctactaaaaatacaaaaattagccgggctctatagtgggctcttgtgatgctagctactcaggaggctgaggtacgagcatcgaacccaggaggcggaggttgcagtgagcccagacagcgccactgcactccagcctgagcgacagagcgagactccatctcaaaaagaaaaaaaagggcctctttcttccagctgtaatgtccaaggaggctctgcggtagtgagtccagcttccacacaacacaccttcatttttacaatgctcaggactcagaggcaaagcgctccccattttgggaagtgatcaggactgctcctgagataagggagaaatgcctatggcgacaggaaacctatgcctgccatcctcttgtcccccatattagttccaaaacaggatcccaaatgcccagtacactggtgggtgtttgttaaatttgttaacaaaaactatcttggccaggcgcggtggctcacgcctataatcccagcactttgggaggccgaggccgggggatcacgaggtcaggagattgagactatcctggctaacagggtgaaaccccgtctctactaaaaataataataatttaaaaaattagccgggcgtggtggcgggcgcctgtaatcccagctactcggaaggctgaggcaggagaatggcgtgaacctga

SEQ ID NO: 1884509 - DNA, 4001 bp, Homo sapiens
ctctactaaaaatacaaaaattagcggggcgtggtggcgcatatctgtaatcccagctattcaggaggctgaagcaggagaatcgcttgaacacagtaggtggagcttgcagtgagtcgagatcacgccactgcactccagcctgggcaacagagcgagactgtctcaaaaaaaaaaaaaaaaacaactaatgtccacacaaacacctacacatggatatttatagcagctttatttatttattcataattgtcaaaacttggaagcaaccaagatgttcttcatttaagagatgaatggataaactgtggcacatccatacaatggaatattattcatgctaaaagaaatgagctatcaatccacaaaaagacatggaggaaccttaagtgcatgttactaaatgaaagaagtcaaaggctacatactataggattccaactgtatgagattctggaaaaggaaaagttatagagacagaaaaatgatgggtagttggtaggggttggtttgcagggaggcagagacgaacaggtgagcacaagattttttttttttttcttttcttgagagagggtctcactccattgcccaggctggagtgcagtggtgcaatcacggctcacggaagcctcaattttctgggctcagatgatcctcccacctcagcctcccgagtagctggggctacaggtgtgtgccaccatgaccagctgattttttttgtattttttgtagagatggggtttcaccatgttgcccagccttgtctccaactcctgaactcaagagatccacctgccttggcctcccaaagtgttgggattataggcatgagccaccatgtacagccacaaggagattttttaagcagtaaagttattttctatgttactacaatgttggatacatggcacatacatttgccaaaaccagtgaaatttacaacaccaagcatgaaccctaatgtaaacgcatactttgagtgataatgatgtgtctacgttggttcatcagctgcagcaaatgtaccacactggtgtggacagtggggaagcctgtgggtgtaaggggagggagtatatgggaactgtctgtattttccactcaacttttaataaacctaaaaaagagggaggggccacgactttcattcacattctaggagacagtgggaacagcagctgttcataaggacaatactagtcatggtagttcatatctatcatataaccacagaaattcctttcattgaggcttagagcaaaagaagaaataaagattattctgatgacagacaaaacaaggaggaaaagaagcttaaatccagtgatcctggctaactatcagccaacaacaatggcaaaaactaagctgccaagtctcattccagagtcaggtcttcaacttgtaggccagagctcccagaatgtgtctagggataaaatcataataatcatcacagtcacatgataggtgagctctgccaagcctaatagcctctgtgcatctctctacctttgcttctctcagaaactcttctcttctgttgcttggaaagaattaggaatcttttttcaaaacagcttcacagcttctctctaagatttgttctaggagaagggaaatgaaaagtatgattcaacagttcagtgaagatactgaacaatgggaatcattagcaaatctatcagaaaagctaattcggggaaggtaaaaaagggcaagttgcaaagaaggaaatgattaaattacatttcagtcctgaaaaatctgtttaacttgagactttctaattcagaatggccatctctgactgtgtgctgctgggaagatgaaataagaatggggttggggatgtaaacactcatcatcctggagacacaattactatctttctgcttggctgttatatgaacctgccctgggctttctagtctcagctctcctgaccagctgagctggaggagagctgagactagaaagcccagggcaggtccaactgaaaaacttatcaacttttcaaacagattgacagttgctttgggctggagggatgtgagagagggaaaggggaagtgactgctgatgtgtatggggttttttaggaggtgataaagatgatatgaaatatctagatagaggtgatgactgcacaactctatatactaaaagccattgaaatgtatactttaaataggtggcctgtatggtaggtgaatcatatctcaataatgctgttattaagaaaacactattcaaataaatgtctatcaatttgtgaagtaaaaaatggtaatcctattttttggatccatttcatttccttaataattaagagtattggtgaacatcttttcatttgtttaccagctcactgtgtatcttttagatggtctactagtgtcttatgtacattttaaaaacctttgttattttaaggttttttgttgttgttgttgttgttgtttgttttttagatggggcctcactatgttgcccggcttgccttgaactcctggcccttaagtgatcctcctgcctcagacttcccagtaactaggacaacaggcacatgctaccctacctagctttggttactttaacttttctcttatggattatctgagctctctgtaaataaatacactggcttctgtttacaaaaaataattctcagagcaagggaaccatcttccctttctgagtatatctgcatggcatcctaggaagaacacttaatcttctttccagaaagcttcattcaaatgcagtcttaaaatctgtcctaagaaaggggtataactaagtactcagtcacactcactctaatcatcatttaatctaatctgaaatcacagtcaatgtatcctatagcctggtacctggaaaaagtccctgatgacaaataagaagacttcttccatgcttagaagtgtcccaagtttctctgagttctcatttatgattctgacattgagaaaaatgcccaaatatatatgtgtgtctgtctgtttaaaattatagctttactgagatataacttacaattcacctattttaaagtatacaattcaaggttattagcatatccgcacagttatgtaaccatcagcaaataaattttacaaccaccatcattactgtctaatttcaggcattttcatctcccctaaataccgtacccattaacagtcactcccttttactctgtcccactcctgccctagccctaggcaatcactaattgcttctcctggacatttcatgtaatgaaatcatatggtaggtggccttctgtgtctggcttctttcactcagcataacattttcaaagtttatccacgcttattgcatgtttcagtacttcacttttttttttttcttccccaaagagacaaggtctcattctatcacccaggctggaatgtagtggtgcaatcacagctcactgcagccttgaactactgggctcaagcaatccacccacctcagcatccctagtagctgggattacaggcacgagccactctgcctggcttcattcctttttatgactgaataatattctatcatatgtttataactgaaccataggttcatatgagaattaaatagtagtttttattttatagaaaatatactgtgtggaaaaccagcaatcataaaaggacttaagataaatagaattatttccattgtaaagaaaaagtagggcttcaaagactaattctgagtgtattatctatagctgaaatagagtcttcactgtttcctgaggctaaaagatatgaagagtattagggaacgtcattttctgcaaaccacaaaaataaaatcccaaaaaagcaccacgtggctgtctataattctggcataggaaatgttctgagtaaggcacttggtctatcatgtttaggcagtttaataactactctaccagtcatttaatctgatgctgagattaatcattaaacaagtttgcaatatatttaacatga

SEQ ID NO: 1884510 - DNA, 4001 bp, Homo sapiens
taaacatgatagaccaagtgccttactcagaacatttcctatgccagaattatagacagccacgtggtgcttttttgggattttatttttgtggtttgcagaaaatgacgttccctaatactcttcatatcttttagcctcaggaaacagtgaagactctatttcagctatagataatacactcagaattagtctttgaagccctactttttctttacaatggaaataattctatttatcttaagtccttttatgattgctggttttccacacagtatattttctataaaataaaaactactatttaattctcatatgaacctatggttcagttataaacatatgatagaatattattcagtcataaaaaggaatgaagccaggcagagtggctcgtgcctgtaatcccagctactagggatgctgaggtgggtggattgcttgagcccagtagttcaaggctgcagtgagctgtgattgcaccactacattccagcctgggtgatagaatgagaccttgtctctttggggaagaaaaaaaaaaaagtgaagtactgaaacatgcaataagcgtggataaactttgaaaatgttatgctgagtgaaagaagccagacacagaaggccacctaccatatgatttcattacatgaaatgtccaggagaagcaattagtgattgcctagggctagggcaggagtgggacagagtaaaagggagtgactgttaatgggtacggtatttaggggagatgaaaatgcctgaaattagacagtaatgatggtggttgtaaaatttatttgctgatggttacataactgtgcggatatgctaataaccttgaattgtatactttaaaataggtgaattgtaagttatatctcagtaaagctataattttaaacagacagacacacatatatatttgggcatttttctcaatgtcagaatcataaatgagaactcagagaaacttgggacacttctaagcatggaagaagtcttcttatttgtcatcagggactttttccaggtaccaggctataggatacattgactgtgatttcagattagattaaatgatgattagagtgagtgtgactgagtacttagttatacccctttcttaggacagattttaagactgcatttgaatgaagctttctggaaagaagattaagtgttcttcctaggatgccatgcagatatactcagaaagggaagatggttcccttgctctgagaattattttttgtaaacagaagccagtgtatttatttacagagagctcagataatccataagagaaaagttaaagtaaccaaagctaggtagggtagcatgtgcctgttgtcctagttactgggaagtctgaggcaggaggatcacttaagggccaggagttcaaggcaagccgggcaacatagtgaggccccatctaaaaaacaaacaacaacaacaacaacaacaaaaaaccttaaaataacaaaggtttttaaaatgtacataagacactagtagaccatctaaaagatacacagtgagctggtaaacaaatgaaaagatgttcaccaatactcttaattattaaggaaatgaaatggatccaaaaaataggattaccattttttacttcacaaattgatagacatttatttgaatagtgttttcttaataacagcattattgagatatgattcacctaccatacaggccacctatttaaagtatacatttcaatggcttttagtatatagagttgtgcagtcatcacctctatctagatatttcatatcatctttatcacctcctaaaaaaccccatacacatcagcagtcacttcccctttccctctctcacatccctccagcccaaagcaactgtcaatctgtttgaaaagttgataagtttttcagttggacctgccctgggctttctagtctcagctctcctccagctcagctggtcaggagagctgagactagaaagcccagggcaggttcatataacagccaagcagaaagatagtaattgtgtctccaggatgatgagtgtttacatccccaaccccattcttatttcatcttcccagcagcacacagtcagagatggccattctgaattagaaagtctcaagttaaacagatttttcaggactgaaatgtaatttaatcatttccttctttgcaacttgcccttttttaccttccccgaattagcttttctgatagatttgctaatgattcccattgttcagtatcttcactgaactgttgaatcatacttttcatttcccttctcctagaacaaatcttagagagaagctgtgaagctgttttgaaaaaagattcctaattctttccaagcaacagaagagaagagtttctgagagaagcaaaggtagagagatgcacagaggctattaggcttggcagagctcacctatcatgtgactgtgatgattattatgattttatccctagacacattctgggagctctggcctacaagttgaagacctgactctggaatgagacttggcagcttagtttttgccattgttgttggctgatagttagccaggatcactggatttaagcttcttttcctccttgttttgtctgtcatcagaataatctttatttcttcttttgctctaagcctcaatgaaaggaatttctgtggttatatgatagatatgaactaccatgactagtattgtccttatgaacagctgctgttcccactgtctcctagaatgtgaatgaaagtcgtggcccctccctcttttttaggtttattaaaagttgagtggaaaatacagacagttcccatatactccctccccttacacccacaggcttccccactgtccacaccagtgtggtacatttgctgcagctgatgaaccaacgtagacacatcattatcactcaaagtatgcgtttacattagggttcatgcttggtgttgtaaatttcactggttttggcaaatgtatgtgccatgtatccaacattgtagtaacatagaaaataactttactgcttaaaaaatctccttgtggctgtacatggtggctcatgcctataatcccaacactttgggaggccaaggcaggtggatctcttgagttcaggagttggagacaaggctgggcaacatggtgaaaccccatctctacaaaaaatacaaaaaaaatcagctggtcatggtggcacacacctgtagccccagctactcgggaggctgaggtgggaggatcatctgagcccagaaaattgaggcttccgtgagccgtgattgcaccactgcactccagcctgggcaatggagtgagaccctctctcaagaaaagaaaaaaaaaaaaaatcttgtgctcacctgttcgtctctgcctccctgcaaaccaacccctaccaactacccatcatttttctgtctctataacttttccttttccagaatctcatacagttggaatcctatagtatgtagcctttgacttctttcatttagtaacatgcacttaaggttcctccatgtctttttgtggattgatagctcatttcttttagcatgaataatattccattgtatggatgtgccacagtttatccattcatctcttaaatgaagaacatcttggttgcttccaagttttgacaattatgaataaataaataaagctgctataaatatccatgtgtaggtgtttgtgtggacattagttgtttttttttttttttttgagacagtctcgctctgttgcccaggctggagtgcagtggcgtgatctcgactcactgcaagctccacctactgtgttcaagcgattctcctgcttcagcctcctgaatagctgggattacagatatgcgccaccacgccccgctaatttttgtatttttagtagagatgggatttcactatgttggtcaggctggtcttaaactcctgacctcatgatccacctgccttggcctcccaaagtgctggga

SEQ ID NO: 1884511 - DNA, 4001 bp, Homo sapiens
ctttgggaggccgagacgggcggatcacgaggtcaggagatcgggaccatcctggctaacacggtgaaaccccgtctctactaaaaatacaaaaattagccgggcatggtggcgcgtgcctgtagtcccagctacacaggaggctgaggcaggagaatggcgtgaacccgggaggcggagcttgcagtgagtcgagatcgcgccactgcactccagcctgggcgacagagcgaaactccgtctcaaaaaaaaaaaaaaaaaaaaagagataaaatgatttgaaatgtgggtccactggcaacagaggatggtgcctggtggtcaaggctgtgggaccacagctgccttctcaaagcaggccctgtggtgtccaggacttatgcagcctggcccactctgtgagcctcggcataagccttgcatttccatagatttaccttatcccgctagttacagtagaaactgttgaggtaagagaagtcacacacttcctacccaccagagcctagctcgtggccttccccattaaatgctgattcagcacccccagggaacaggctagtgagtggagttttaatgggattttcagggcctggaacagagctggcctggcctcttgtgggtcagactgaataggcatgcgcggacaccaaagcctcaagggcaagcagtggaactgtgtgatcagtcataaaggggacaagatcctagggattgtctataccgacatcctctgtttggagttgaggaaaaaggcccagaaaggtaaagtgacttatccagaacacctggatctgaaactcattcattcatccccttcactgactgtgtcccctaagtcaggccctttgagctctctagggacggagtgaaagccccctagtcttgggttgcttaaaggccagcaaaaccaagaaataaataaacaaaacaaaaaaaaattcaggccgggtgcggtggctcatgcctgtaatcctagcactttggggggctgaggctggggattgcctgagctcaggagtttgagactagcctggggcaacacggtgaaaccccgtctctactaaaatacaaaaacttagccgggcttggcagtgtatacctgtagtcccagctactcgggaggctgaggcaggagaattgcttgaacccgggaggcggaggttgcagtgagctgagatcacgccactacactccagcccatgcaacaaagtgagactccatctcaaaaaaaaaaaaaattttcttcaggtggaaccatttaatctggcaagaacaacttttcacatcttaccattttatgtctccacttgatcttgttctgaacttttcaacatacacactatcttaaaaaacaacagatgtaaatcaatgcttatgtaaaggaaagggtgagtcacaaaagcaggactcacatttcaggtacatttttccatgtatcaacatacctcaaattccctgaatgagccatgttgtcatcccctaccttggttcatgctggtcctactacctagaaagtgagagcttcctcactccctcctttgcccacttaattcctgcttatccttctatgaggacgagcataaactcccctcccccagcacagccagagccttcctcagtgggtccacgcagcactcacctcttaccaccaggtgctggaatgtctgtggaccggcctgagactcgataccccatgcctagcacttgaactgactggcagggggtctggctgaatggggaacaggagggtgggctgaaggatgagagcagggacaaggtctgggtgtgaaaattaaatttgatttggacagccggaaggaacccagaagagcactcaagccaagaagaaggtgagaaaaaatttcaatggcaagaaatcacaaaggagtagttctcacaggctaggaggtagcagaaccatccagggaacttggtaaaaacaaaggcccagcactattcaacttcaatctgggcctctgttcttatcagctctcgaggtgactcaaaaccctctccaaagtttgagaactactggcttcaggtactttagagagacaatgtggaaggatgatgcagcccagggtctgctctgatctgaggcagccacagccacaagcccccaggaagggcctcaacagctctggggggtgaactgaggggtggtttggtttgaggaaaactcaatccagaataaattgaagacgttctttaatggtctttaaacaaacaaggttgtgggggtgggggcgggcgtgggaaactgttgggctaaaaccaggatagttttggcggagaaagtggccaaagggagtgtctccctccgatgccctgtaaacttctgatagcttcttccagttctcccttcaacaaatccagcaatccaacaaatcttaaaaacaatcccatcggccttcgcaggaatttgggctaagagtgattttcctcactaagaactccatacggttttcataccaaggtcaggaagaacaatcctctgccccacccccagcgcctggcagatcgttttcctgcctgctgaccagcatcatctgtccacacagcacacggtgggtcacactgcagagccgtgctttgctttgtgtgctttcaggaaagaaaatcgacacttaaaaggcacaatgggtgcagacaaattctgtaaacggcaatgaactgtgatcaactgagtaagtcagcaatttacagaaaaagaacaatgctgtgggagtcagggctgagtttgagtctctgccccataacccactagctgaatgccatgggtgagccaccaattctcctgaagtgtcagtttccacatattcatgggggagcaatgtggccaaccacggctgtggcaggaaagaacttctgcaagctcttgcacaaaatagatgcttgaggcagggcatggtggctcatgcctataatcccagcactttcagaggccgaggtgggtggatcacctgaggtcaggagttcaagaccagcctggccaacatggcaaaaccctgtctctactaaaaatacaaaaattagctgggtgtggtggcgtgcacctgcaatcccagctacgagggaggctgaggcaggagaaatcacttgaacctgggaggtggaggttgcagtgagctgagatcatgccactgcactccagcctgggtgacagagcaaaaactccatctcaaaaaaaaaaaaaaaaagtatatgtttgataaacattatagctggctatacccataaggtgcactcgtcttcagaagtagcaacatttggctttgaacaaaagatattctccctctcctcctacccttctctctctctctccctctcaaacacacaatggtattttacccagttgaagatcattattagctattaacaataactaccacattgtacaaataaattgcattacagaaagagttgctctcttccaaagtttgcattaacaaagaaaaagcaaaaattctcaaagtctcataagtccagtccatctttctttgccatctaataaaacactttttatttcctttcatgggcttaaacttcactaaaaggcaaattgtctgagggcacgctgctgagacaacaggactctgtgtgtgctcaaataatcccctgttccagttgactgttttctatttttctgaatagacactggacagaattgggaatcagaaacggtcctgtgatctctctaattgcttccacaggcaagtccaaaatgggtaatttttttaaaagacacaactgactcaaactccaaatgcttctcaaggagcctcagccttctctccgaccatggcccggctcccttggccagccctcaccccctcagggctgggcaaagattcacatggcagaaagggctgcccctccaaagacccatcactacccagaacttagaagacaggggccaggaagtcggagaaaacatgttctcgggtatccatcctcttgctaccctgaagttgacccaaagtctaatccaaaatcta

SEQ ID NO: 1884512 - DNA, 4001 bp, Homo sapiens
atacctaacccatcaggtggaggaaaagggaggaaggagaggagaaagcggaaggattagctaagaaacctaaccttgcaatcatgagttctgatttacagagagaacctgactgccaaagtaaggaagaaaacaccaccagttaagagacagaatttttttttttaatgcatgctagaacttgtgttctaaatagtgcttagagatgcgttaaatatagctaagaggataaagaatttaggactagatgggtccttaaagagtttctagcctccacactcatttgatagctgaaaagttaaatacctgcccaaagccagttagtgagggtcagtgctcgaatcagacctcctgtctcctgactctttagccagtgacctcctccatcgtgccagaaaacctttcattccaggagcattaattctgacaaagatggtaaccttaccgaggggcataatggagaggtatttgcctcgaaacttgctggtgattttgatttcctgacgcaatgtccagccatttttggactcagcatggtgcgcagcagcagggggatgatgactcaccttgaagaaatcaggttcaaattaagacggcagaaaggagaagaaaaagatactgcctataaattggtgagaaacaccaaaattcacacttgacgtttttacacccacaacagtaggtgaatcccagaacctccagggtctccaacgctgacgttctgaagaaaaagaataaaagctgggatgacagggactagaatttctgcaaacataagacccaggggattaaccaaaaaatcatctctttcttcagaaaggaaatgcgttatggttctgaggttcctttacctgttcacagagggatcggtacccattctcctctaatcggtccagctcaaaggtctccccaagcagtgggttgaatggcttactggtgcggaagacagtagtggagtaggaggacacggtgaaagctgcaacataacagagctgttctagagaattctcacattttgcagctcggtctaacagctcatggtattccagatcttcagtaaggcgctgaagcatggacaagggctcattaaagtttacctgtaaggagaagaacagatataaaaactatgctcactcatctataagagacagtttaattttttttgcagtttaggaaataaatcactgggaaaagagggctttgctcagtagagcggctctaatatttaacccgcaaacaacccattctccttgtcaactgttcatgtctgtgagtggcagaaatcactgttttcatttcactaactgtaagctctttgagatgggaaccatgcctcttctgttgagtgctacatacccaagatccatcagtgactggcccacagaagactatcatcaaataggtgttggatgaataagttttttaaaaaagaaatgcaatgtattttagcacaagtatacccagagaggaaatcaggtatttaaaattcttggagaatgaaagaaacagtagtaaattataagtacagctatatcctgactagttataaaagttagtttccaccctggacaaaacaattgctaaatctcagttcagttctgcatcaggccaggattctgatttctcctctgaggctggataattgtgtttctgggagtgaagtgctcatgatgggggttgagagggggctgtgcatgctcttacctttctaattctgaagccagcttaaggcgaccaagtactggataaagcaagcatgtgtgtgtttatgtgtgtgtgccaggaattgggggcttctgttgggggagatgttcattcattcatttattcacttactcattccacaaatatttattgagtacccatgtgtgccagaccctatgctacccactggatagagagaagttaacaagagaagctgacttttttggggagtggaggggtagggagtgagaaacattgttcatgctccccacccttctactccctaaaaaagtcagcttcaaaattaactttgaaattttaaatgattttactatgtaaaaattcactataaaacaagtcaggttcccaagttagtccataaagcttatttaattaacaatatagatgaacaagtctaaatattattagcctgagttctaagtccagagaacaaaagaagaaagaaaaaattcccttttagtgaatggttctggccttaagcaacgctttacttaaacaaacaaaaaaaacacaacacttttctttctgatgttccatctcttttggcatttttgttcacccttctacccaccaatctctgagctacatattaccctaatatttgctatccccccaccgcccgctcaatcatgaaattaatatcgtataatttttaactgtaaaaaactttgaaaacaaagtatcaaggaaaaaattttcttgaaatgagatcaccactattaacattttcagtttgtttctatacattcatacatttttaaaagtaataaacttggccacgtgtggtggctcatgcttacaatcctagcactttgagaggctgaggcaagcggattgcttgtgctcagcagtttgagaccagcctgggaaacatggcaaaacaccatctctataaaaaaaaaacacaaaaattagcacggtgtggtggcgtgcacctgtagtctcagttacttgggaggctgaggtgggatgatggcttgagcccaggaagcagaagttgcagtgagccaagatcatgccactgcactccagcctgggcaacagagcgagactctgtctaaaaataaataaataaataaataaataaataaataaataaataaataaataaataaaattcataaactagagcctgctttttctctgagaaatatcccaaatgtttctctgtgaacattttccagtgaacacagagccacagagccaacaacactcatcctttgagaaataggacccaccaaaacagtgtgccataccccagagccctcttccctacactgaaagacaagcagtatgatgacacaaatgcacactgaggggtggcgcgctgcaaaagccataatcctcgattctttttaaagagggcacttattaactacacccaataaaatctgtccgtggcagaatttagacaatacgaagtaacatttccatacattttgaggaaaactggggacaggcagtgtactccactggtggtactagacataccagcagtgcatgggactagaatcagcacattgctatcactgcttttcacacacacacagccttgcccatcaacaaccagtttctccaaaagtgccaagcttcttataatggtcattttattactcaaaagccaaacagggaaagaaatgagtctgagtatttaaagtagaaggaagcagggagctatacagctgatgaaaaattaggcacccaaaaaaaaaaaagacaacccagagattagcagcaacaggaagccataaccattggtagggtggagagatggggagaagcagcagtattactacagcctagaggtgggggtccaagagaggaggatcaggagaatgtaaaacatcaaggcaggggaggcctctccagtgaaaactagagccacgtaggtgcgccagagcaccactcaagagggcatagagggagagacttcccacggctataacctcctactggtatcttgcattagtgaagcccagccagactccagtagccacggaagcctgaaaaaacacttcctagagggattagttttcctgtgttacagcctagagtaggggaagggtgaggacttgatctgcgggcaaacaggtacaggactgtacattcttaaaggcaagatcaataaggaactaatggtaaaggaggacagagaagtcacctagacccagaagctatttctttcttttttttgagatggagtctcactctgttgcccaggctggagtgcagtggcacaatcttggctcactgcaatctccgcctcccagattcaa

SEQ ID NO: 1884513 - DNA, 4001 bp, Homo sapiens
cgctgctgggctagctgatgtgggacaaaaatctcgcagatgcagtggccgaaatgtcctttcggggccataaatctgctaggaatggctgcatttgccctttagcccagaagtatccttaatctggccctggggggaaagcctctttaaactgtgtgttctctccagctggagaagctagccatcggggaaagaaaactgattcagaactgcaaaagcaataaagaaagaagccagatacaggaccagacacagatcttttcttggaaggtaaatcataccatcccttatcttgtgaatttagtctcaattatgtcccctgttggcagcaaatgccctgtcttttctgcacaccaaaacccattccaaagtcccagcaccaggaactatgaatatcaagaagtagttgggagaaaaacagaaacaagtgttcttaattcatattttgtgtctgctaggagaatccttcgtctaaaatacctcttccaccatgcacctaaaaaatccaacggaaaacctcaacctcttaactctaacacctacaaatactttgttttgatcagtgtaaatctgtttgctaggaggcagtttcagcttccacctatcccgccctggaagcaaggcgaaagctccaagtaccctgaaggtgtctctctcctgacagctcttccagaggcctcagcccttcagcccaggctcaccaagcagtaggcagcctaccacagatgagatgcaactgtctcacccagaaaccgtcagatgaggagaaatgggaggcactaagaggcaagaactggggaaaatcagctcaagaatcttcaggccctaccagccctttctcctctctgggtaacattttctccgggtaagtctcaacgcttattgctctggtctcaagctatctcaattttctcaggaaatgctgagttgggcttaaaagcccaccatcccgaaagatggtgccctgtcccaattccctatttcttttctatttgtctctccacttttccccgacctcaggtcttggagtcagctccctttagctaaataaatggggtggctttttccatcctgcatttcaagatgaagattgagctgcaatttagagctctccaatccctccctccacttggccccatgacaacttttcttctgtgacactttatatttgccacctccttcccattgcaaccacttccctaacctccacttgcatcattccggaatgtctgagttacattccctgctgagctagtccccacccaacctctgcctctccccattcccaggcagccacccactccgcccagaggttttccaaaaatcccattcacctctgggtagtcctggctcaagcatctcaggggcttcttattgtctcaaatcccaacacgcagctggggttcacagaatgaacttccagccctaatgctcactacgccccaccagcacactccaacattgcttcccaagtgctaggccctgaggattccacagtgatcaatgcaggcacaacctccacccttgccggcttcccactgccttcctccacgccagcgaggctggggcatcaccctctgtctcatcacctggcctcactcccattgccactgtccgggggcacccgcctcctacgaactcaaatatcacacatgcgaggaccagctcctccacccacctgagagagtcccctcatcttgcagggcctcggattcacatattctaccctcaaggggttcacttctaactgttcatcactggtcccattaacagagccaccattacggtgtgtccaagtgtcaggcacatgactgtgtgatttcatttgtttatgtgttatttcatttgtacagaatgaacgtgtgttatttcatttgtacaaaagttattgcatttgatctctacccaacagcccccactggttggtttcctcatctataaaatgggggtagtaagacaaggaaggaaggtcttactgccctcattttatagatgaggaaaccaaggcttgaagaagctaaggaacttgctgatcagggctaagcctgaactccatcctgtccgcctgactccagggtccatgctctcaactctgctatgccactccccggtaattccctatgtgtgttttgtttttgtttttgagatacagtctcactctgttgcccaggctggggtgcaatggcacgatcttggctcactgcaacctctacctcctgggttcaagtgattttcctacctcagcctcccaccacacccagctaattttttgtattttagtagagatgaggtttcaccatgttggtcaggctggtctcgaactcttgacctcaggtgatccacccgcctcggcctcccaaagtgctgggattacaggtgtgaacaaccgcgcccagccccctgtgtatgtttatgcatttagcatctcacctggcacagaagcaggatcaatgaggtcattactactcttccacgctagccagtcactatgcaagcatgtattttgtccagcacgtgcattccctctctcccaaccacggataaacaactcagggcaaggccaccttgtcagatcctcctgtggcctcacagcatccagtaaggagctgtgcatagcacagatgcacagtaaatgctgaaggaaagaaccatttcttggagtactgcccagtaataacttgtcctccttaagccactcagtcaactgagaaaacgcaggattagaaaatggggcattcattctgctagatactgattgccacgtaagaatatcagaagtataaatggacagaaagatggctcaggtcagcaaaaacacaaatagctattttgcaaccagttggaatggggcagtcaaaagccaggagggctgaagaaaaccttacagtcttactgaaacagccttgggcaacatggcagggagaagagccctgccttagatggaggtagactcccagttggccacaagccatgcgacaacaaatggctcttatgataaaagctgcaaacgtccatgaagtgataacttcagaaggaaaggggagggtctcaggttggtcttttcagccctgtgcactgtaacaccctgccacaccatattgcaacatcctgtggaacggcagcatattctgagaacctcaggccagaatctggtttgctgctgtcagagcttggctataactcttcctagtgaagctgagagagacactgaacctctctgaacctcgggtctgtcatccataagcagcaaaaccacaaccataaccagttccagggaaaactggttgataaaataaaactagccaagtgctgtagctcatgcctgtaatcccagcacttcaggaggccgaggcaggaggatcgcttgagctcagaagtttgagaccagcctgggcaacacagtctttacaaaaaatacaaaaactagccaggcatggtggcacatgcctgtagtcccagctactcaggaggctcaggtgggaggatcatttgagccttggaagttgaggctgcagtgagctgtgattgcaccactgcactccagcatgagtgacagagtgagaccctgtctcaaaaaaaaaaaaaaaaaaaatcagctgggtgtggtggcacatgcctgtagtctcagctacttgggaggctgaggtgggagcattgcttgagcccaggaggtggaggctacagtgagcttggatggtgccactgtactccagcctcgtgacagagcaagaccctgtcacacacacacacaaaaaaaaggtggggggggagagaaaaaaagaaaaaaatgaaataaaaaaactataaagtgctacacacacataagggatattatcaagaacagaacatcagcagtcagctccatatggtgtcctggagtaacactagttgagattagaccccagtatttgctgacgtcttgatggttaatgggcaggggagaggccaccaatattgttattggcaattgctctatttttcttgaggtaaagggtaaattc

SEQ ID NO: 1884514 - DNA, 4001 bp, Homo sapiens
cacccatgggtgcacccaccaccaccctccccagacagaaccgcaaagccagaggatgactgtgaggccaggaccctctgcccagggctgggattccagcctggctgctacttcaaaacacacgcagctggcctcccccagggctggcgggtccacagacacagtggggctcaggcaggcgtggtcatggagctcctaagggaattagggccctgcccccaggtaccctggcagccacagttaggggacaggctgcccgccaaccccaggcctgtccctaacatgcgtcagcagagtggaaggggtacacgcctgggctaacctggtcccctttctgggcctcagtttcctctgctgtgcaagttagggggctgggcagacagcacctgaggcaagattctcttcccagcgtctatttccagaggcgcgaggcacagctggggtccagcccagagcaccctgcggccccagagacaccttctcaccccagtggtccctacgtcaaggtggtcagaataaaatggcaaaactgcctgaagtgtggccgggcttcctgcaaagggcgcctcctgtcactctgcacggcgcggatctggggcctgcctggtcacaggcccctctcctgcccaagcccggccaccaggcagagcagatgggctcctcagctggaaggctggcccccagggaggggccggggcgtcccacagttctcgctcagcaaatgtggctgtgagtccctgaaattcctctaagaaaggagcctcgaccaagtcctcatcccagggcttgtgcaggctttggggtccctggagcaaagccctgcgcctcttaaatttctgtcattactttctcaacgagatccacaacccagaaaacacgagagactcaaaaattaccaaacagtctctgccatgggagggaaggatgctcaggcagggccaccagccacaccacccgagctccctgctgtacaaagaaggggatgcctctggcttcttaccccgaccctgtacttccctggcctcaggaacctgctgccgtccgaacccaagaaccttcctaccgacagagcagtgagccggcccggcactgccttccgccagcctcccagcctcccactccagtgcataacccgccaccagcagcagcctgggactcaccaccaggatcccgccaaacgcacgcatgttctgcaccaggcccaggacggtactggccaccacggccatcagctgaggacaggaagagagcacagcccttactcctcctggccccactgaggggacaccatcccggcccaccacgctgaccctgacagaaaggcaagatggggcaggccaatgaccaccaacccacacacacacacctggacccacagccacccccacacgcctctacacacccacacagcctgtcaggcccccacgtccacccatacacaccctcgcaccccaacacctacatctacccacacgcattcgcacacgcttgcatcgccacccgcacgcactcactcacccactcccgcatcccaacacctccaccccagcctcattcaagcacggacttcaaattcctgtgggaggcccttctctgcctcccaacccactgcaggtgggtcagctactctgtggcctggagacgccaaagaaatgcagagctagaggtggcaggagcacctgcaggaactgagtctgagaaggggcctctgagaaccagcagggaggccccggctccaaagagccgctcctcctcatcacagcctagccgggagaaaggccttcacatcagccccatcaacccacctgaggaatccaaactagacaacacagctgaacgccacagtggagaccagtcagcatgtacgtgtgcacacgttgcgtgtcatcgtgagcatgtatatactcacgtgagaggtcctgggaaactgcgacttcaagcaaaacggcatgattgcagggtctgctgtgcgccatttcccttaaagtcacagtttccaagaacctgtggatagcactgaggccttactgtggatgtgtgcacacacgatcatgcatcttacacgggcacaagttcacatggatatctgcatgcgatgtgtgcacacacgatcatgtgtcttacacgggcacgagttcacaaggatatctgcatgcgatgtgtgcacacacgatcatgcgtcttacacgggcacgagttcacaaggatatctgcatgcgatgtgtgcacacacgatcatgcatcttacacgggcacgagttcacgtggatatctgcacgcgatgtgtgcacacacgatcatgcgtcttatccgggcacgagttcacatggatatctgcacgtgatgtgtgcacacacgatcatgcgtcttacacgggcacgagttcacatggatatctgcacgcgatgtgtgcacacacgatcatgcgtcttacacgggcacgagttcacatggatatctgcacgcgatgtgtgcacacacgatcatgcgtcttacacgggcacgagttcacatggatatctgcacgcgatgtgtgcacacacgatcatgcgtcttacccgggcacgagttcacatggatatctgcatgcgatgtgtgcacacacgatcatgcgtcttacccgggcacgagttcacatggatatctgcatgcgatgtgtgcacacacgatcatgcgtcttacacggacatgagttcacatggatatttgcatgtgattatctgtgcatacggtgatgcgggcgtgcgtattaatgtacgtgtgtatgtgcatgatgatgtgtattgtatccaaacatgattgtatatgtgtgactgtgtatgatcatgtgtgcctgtgattgtgtgtgtatatgcatgtgcatggtcacatgtgtggttgtgtgtgagatcacgtgtgcttggctgtattgtatatatgtatgattgtgcttgtatggctgtaattatgtgtgaacacgtgtgcgcgtgtgtgtgcgtatgaaggtcccagcacagcagccccgtaggaaggctcaggacccctgagctgccttcaagtgggacatactgtcaggtgggacaggtgcacagctcagaggaaggatgaacggggacagaggagggacctggacactcagaacatgggtcttaggacatgatgccaggagcagcaaggcccagacccccgacctctgcctgcctgcccctttaaggtgcccattgctcctaaccggtgcattaagagaaaccagccctcagagatggtcatgagccacctgcgcccgcattagaggatcctggaaacaagctccctggccagggataccactgcccctcattaatagcaccctgggagccatggcaaaggcctttctgggaacctcagagacctgggggagcactggtgtccagggctccagccccaaggagctcctgccactggccaaagcattgcacccgccacacccttgcccgccttcctctcccaacccagaaatgcagggctgggctctcctgcttctaatgacccttccccagcatcacaagagcacggcagagagctgagggtgcagccagggagcccagggtgacgggcacagtcctcgggcccttcctgccccaggctcacccaccctggagcaacgcagcagcatgacccaggagggtggggcgagtgggggtggggccggcacacaccttcatgctggggatgatacgcaggaagcggaacacgatgagcatgttcagcatgcgggtcatgtcccacagcgacagcaggcccaccatctccggcctcctggggagagacacgggaggcgggttgggaggagcccaggagccccacagggaggagacaaggaaacgcgcgggttcctggacggaggcgcagggagggcaacagggcatgacgggagtgcaccccacagccaacaccgagcagaaaagcctctgcagggtggcgagagggcggggcctgggctactcactgctccgcttccacctgcagccccggagcgaccc

SEQ ID NO: 1884515 - DNA, 4001 bp, Homo sapiens
tctttggcttaactttccaaatcctccattatatggcctcaagtcatttattcaaccttatttcccactattctacagaatatactctgaattgatcaagccagtcttcccacttctctctgcgtgagccaagccttttctcatttccctgctttcaattatccaggagtggtaaattcaaacatcttcaggggtcaggcaggtaacagaaacaaattatccaggcaaggcccagtggctcacagcggtaatcccagcactttgggaagccaaggtgggcagatcgcttgagctcaggagttccagaccaacctgggcaacatagtaaaactccgtctctacaaaaatacaaaaaattagctaggtgtggtggagtgtgcctgggtcccacccacttgggaggctgcagtgagctgagaccgtgccactggactccagcctgggcaacagagcgaaaccacgtatccaaacaaaacaaaatgaatgatccagtggggcacatggcagatctaggaaacgctgcacccccctaaaggcattcaaatattttaattcaaatatttatgtagtgtctcactgtgagcatcacgataaccttttaaatagttattaatactctatcttgcaaatgagaaaacttccccaaggttaggtaactggcaaaatgctgggcacagtctctagacctgtctgatgccaaagcaagagctctacaccattaggcttctagcagtgcaaacaccatggaagatacagaaccctcaaagtcacttttcatgatacacaaccttaatagtaggatgggaagcccaaatcacagcttatctaaccatatcccaactgcctccaattctgttcattttccaaaccccatctttctgccaaagtatttcattcctagttatccaagtcctactgaattccttcttctgtaaattcctatagggtttatagattagacaacacaaataagtgctaaattatatactgtcttgcaaaatcagatactgcttctatgtattttagtgtcagcctcatcaatcaaactattgtattaatctatatagttcttctaccaaaaatgcctaacctgaatctaatcaagaagaatcagacaaatgctatgaaagacaaaaaggcattcagattaaaaaagaactgttcaaagttaaagcagactaaagacatgatagtcatgacaactaagtgcataaatacatgcatgatccttcaatgaatcctgaattttaaaaaactcaataaaagacatcactgggaaaagatgagaaatctgaacaagtattatatactggatgtattgaatcaatgttaagtttcctgagtgttaatagtactgtagttatataggaagatacctttttcttaggaaatacttgctgaaatagggattaaataacatgatatttacatctaacagtcaaaaagattcagaaaatgaaggataaatagacagcaaatttggcaaaatgttaatagtgactctaaatgagaagtatataagtatttgttacattattttgcaaaatatctataggtttgaaaattttcaaaataaaataatttagtaaggagggaaatcctgtattatatacttttttatatactcagctctgtgacagatataataggcactcattactttaggtatctgctcactacctaaggaaactgggcatttggaggtcagcaatcagacagagtccactttgctgcagctcatgaggggtatagtaggaaattcttagggaataagaggtttctccaaaactcacattgtcacaccacaggaaatctagaaaagcaggcaattacctcactcctcattgaggccatcacagaagtacaggcactgaacaaatgcccactcgctaggcagaatgcagctgctgcccacacgttagtacccagtggtaaggtggatacaatgtgacctcagaggaccaagagttgaggtcacattgcatccaccttgccaccgggtaccaaaaatttgacaatctgcaaaacaagtgtctctggccagtcacaggaaggcactcaagtatcaaataaacatgcctgaaatatatgcagtctttcctcctcaccagataaaccagtcctcagctgcaataaggcagaagaaatctgcaaggctgaatcactggtatttcctgtgcagacttcaaagaaactggcccttcaataggacagaaagggcaggcgacacagctgccaacagaggcctcaacccaggagcatgctatgcaataatgccttctctcccttctacagccatcagatacctcatttttacttctgccaaatggccccttattaccgcgactgattacctaatagccaaccctttaccttggttctctcctcccctcaatgagacccaagatactggcctttctagacagctcctcctccaatttgccagaggaattgtcaaaactattcccctggccaggcacggtggctcacgcctgtaatcccagcactttgggaggccaaggcgggcggatcacactgtcaggagatagagaccacggtgaaaccccgtctctactaaagatacaaaaaattagctgggcgcggtggcgggtgcctgtagtcccagctactcgggaggggaggctgaggcaggagaatggcgtgaacctgggaggcggagcttgcagtgagccgagatcgcgccactgcactcaagcctgggtgacacagagcgagactccgtctcaaaaaaaaaaaaaaaaaaaagctgcctaggccaggcacaatggcttacacccataaacctagcactttgcgaggccgaggcaggaggattgcttgagctcaggtgttcaagactagcctgagcaacacagcaagaccttgtctctactaaaaatcaaaaaaattagccgggtgtagtcccagctacactacttaggaggctgaggtgggaagacagccactgcactccagcctgggtgacagagcgagaccctgtctcaaaaaaaaaaaaaaaaaagttgcccacagtaggaggtagaggagaggccattattaagcacactctcagtaaaccatgaatctgacagagctacccaaaacatcaatgcagtcttaagctgcattagtagaagatgactctatgccccacctttgaagagcaaagttagaggacttgcagaggaagaacaccaatgaccatggcaaagggtctagaagtatatcatttcaaatatggaggaagaactacacacttttagccaggggagaacaagaaaacttttttcaaatatacgcatagctttcacatagatgaggagaaagacttatgagtccactataagaatacaaaaccagaactaatgagtggaagttacaggaagactgattttggtttgccacagggaagaaatttcagcatgttgtagaagttcagaatgtgggatgtagaacccagaatgcttggattaggatgtcaactccaccacttataaactgtgtggctttggggagattaatctacctgtgcctcagttgccttccctgtaaaagagaatagtaataatagaacttagctcacagagctttaagaagtagcttccgaggctggctgcggtggatcaggcctgtaatcccagcactttgggaggctgaggcaggtggatcacctgaggtcaggagttcaagaccagactggccaacatggggaaacccgtctctactaaaaatacaaaaaaaattagctaggcttggtggcgcatgcctgtaatcccagctactcaggaggataaggcaggagaatcgcttgaacccaggaggcagaggttgcagtgagccaagatcacgccattgcactccagcctgggcaccaggagcgaaactccatctcaaaaaaaattaaccagacggtagtggtgtgcgcctgtaatcccagttactcgggaggctgaggcaggagaatcatttgaacctgggaggtggaagttgcagtgagcaga

SEQ ID NO: 1884516 - DNA, 4001 bp, Homo sapiens
aatataaaccgagagtaatttcttcccactgtgaagaatgatcatgagacctaaatgagtacggctggaaacaaaactgcacatacttcctgcctggccaaggaacttgctcaccatggttggctgctgtccctgagagaggaatctcctacccccagagaggcaataaaactgaagcttcaggaccccttccaaggccctagacctaattatatatttttgattttgcattcttttgctcaaaaagctacttcctccaattttatcagcttcaggaccagaaatcctgaactttgccctgcctgtcctacctcataaatccaaatgtctgatgttccaatatgctcttgctcaaaagagaacagataagggtgaggatgactctgccgggaccaggcttgggaaaacagtacggggctggtaagaaagttgggttgggtataattttgaaggctggcccacaagatgtctcaaactcctaccttgtttctaccccaggagcttgttggccagacaaagcctgtctctcagatttacagacccaggattttagagctggcaaaggtctcattttgtcatcctccctaattttgcaggcatttagaatggcttaagcatcttgggctactgaattcccctccctgggaagtgaggtgacattgttggctaattctttaagcaggtagagtatttgtctcacttgttagatgtgatcttcttggtgtgtcctcgcatgggtggaaaccagtaaatgaggcctacccagctaagcacttcaataaaacacaaacgactgcaattctacacactgtcacttagtgtccattctgagcaaaacttctgagttactctctgaggaaagatgaaactgcacaggacagtgcctgtggacagtattttaagcttgtccctcatttcatagtaatagctacaatttatttaccacctactatggacccagcattttatcaacaatttcatttgtatttatttatttatttatttatttatttatttagagatagagtcttgctcaggttacccaggctggagagcaatggtgtgatcttggctcactgcaacctctgcatccctggttcaagatagtctcctgtctcagcctctcaagtagctgggattatagtcacctgccaccacgcccggctaatttttgtatttttagtagagacgggtttcaccatgttggccaggctggtcttgaactcctgacctcaagtgattcacccacctcagcctcccaaagtgcttggattacaatcatgagcaaccatgccctgccataggtattatcattctcctttcgttgatgtggaaaccaaggctcagaggttatgtgacttgtcccgggtacacatcttcagcatccctctgcttgtttggggcatgtggaggctaaagtttagggagtgtcaggccagaagaggaaggcagaaagacaatggccttgccaaacctcctttctccctttcacacaggcctgtgtttaagtcctagttctaacacatactagttatgtgtgcccttgagaaagctgctgttaatcttggtttccttatttataaattgaagaaaataacccacttcataaagcaattgagaagatgaaatgatagaatgtgagcagagctccttcacagcacattcaggtacaaaatagctcattttggtataaactgctcaccccctagccctgaatgcccaatttctcattttctttatgtctttactaaattgtctccatcttactgaaaccttccctggccaccctatctaaaaggcaaaccccatataatctcttcacatcccctttctgccttattttattaccaattaatatatgacaaattgtatttattttgtcttgtcctgtctccacccacaagaaggtaaatttttcttaggccagtaggcattgtctgcgttaggaggatgatacagaaatcctaacgcagacaatgcctactggcctcaaaaaaatttaccttcttgtaggtggagacagacaagacaaaataagtacaatttgtcatatattaattggtaataaaatgtatattggtcaaatgaatgaaaacaaacaacaaaaacaacaaaaagaagttgggaacctaaagacctatgtttgaatttggtttttttccttactatttgactctgggtccattacttaaaatgtctggtccttagcttcctcatttgtaaaataggaagaaaaatggtatctattattaagacagctgggatgactaaatgacataatttataaaccctctggcatatagcgagtgctcaataaatgtttgccattattattatttgtaataatctgaccgattgttaaaactgtctttctgtgcagctctgagtttttaggatatgggaagaggctaaaagtcaccagtgcccttggcattttcggcccagttgtcctccttgttaactgattaccagttgaatgggtgtgaaagtgctcagtgttcccacctccaagctgctcagaggtcagcattgccattcattgagaaataacaggctgtgagagctcaaatgacttacttatggtccctcaacttaaaaaccagggcacgcaggaaccaagcccagccagtcttgggcttcctaatactgtaatttctctctacagtgtggggtagttaagagcctgtgacttcagacctgtggtcaacggggcctttcaccggccatctcccgcagagtactttttcacaatcagttttctcgcaagcaaaacgtggaaaataagatccacacctcacaagtttgtggccagggtcacaggtgaaaacagctcttcggaaactctaaagcgccggataaataagcgctgcaacaggcaaccacacgcgaacccctttcagctgccagtcccgggactcgctcctgtctcctcccctctccaagaccgcggagtaggaaggaggattaacccctaggggaggagttccgccccccagcccccgccccgccgcccacgcctctctctgcacctacacttgcgctccccaagtctctctcgtgcgcagagcccaggctgcgcttccctggtcaggcacggcacgtctggccggccgccaggatgcaggccccgcacaaggagcacctgtacaagttgctggtgattggcgacctgggcgtggggaagaccagtatcatcaagcgctacgtgcaccagaacttctcttcgcactaccgggccacaatcggcgtggacttcgcgctcaaggtgctccactgggacccggagactgtggtgcgcctgcagctctgggatatcgcaggtgagcgcggggggagggggtcagggggatagagcgcctcgcggccggtttccagtctcgaggcagcggcttgcggccaagcgtgagattaaaatcactaggtcgcgaggcagtttttcctggtgggctggaaacttagtttcaaagaaaagaaaaacgtctgaaacttcaagtgcattccctggcgcttttgggctattgctttagctccttcccgcacagtcccctgggatctctctgcccagagcaggcctccccagggaaccagaggaagattgtctgcaattgcattctgttctccactccagctcgttttctgggcgcgggcagttctgccaatgacgcagcccagtgtcacgcacgtccttccgtgcaggggcggaccgaggggaagcccctaggctggttcacagaggaaaccgggatagttccaggctagctggagtttgcccattcctgtcttcagtggctcactttatttcaaattttgtcacctttctctctgcccttaagacaaaggagtttgagggtttttgttttgtttttttttttttttttttttgctttttgcttacagtaagccaagtacttttgtgtgtatatgtcaggggcaaagtattctttctccctctctttctgtatttctatctctctggctctctgtcttctatgaaaaggagg

SEQ ID NO: 1884517 - DNA, 4001 bp, Homo sapiens
attcttccctgtcaacatagattatgacattgcttccctgggttccactggggtgggacagggaggaaagccctgctgaaaggaagcactcttgatttctttccagttgtgagaggaaggcaatgatgtcagtgacggattggcatagctgctgtgttccacatcataggtatgaccttatcgtaagtttggcttcttatgcccaggacagatcccgattcctgatgtaacatgaaaacatgagaggcagctcccacgagtcaccttaaattctctggttagaaagtgactttcgactcccttgtagacttactatcagcagtgtccacatggaggtgaaaatgaggggacaccataaggaagcaagactcagccttgatggcacctgtgctccaagctgagcaggcctcaggagcagctggtgggctcggtataacacaggctgctggtcaaaacccttctgatgtagaaggtctggactggggtccaaaaatggggatttctaacaatctccaagttgacctgcagaccacacttgaagaaccacggtgatagagaatctacgaactcagataacccaggaaccatagaaagaccctaatacttccttgatatgtgagataattacctgtcaggaacacgcaaagggagtctacacctagaattaaggggatacactgacccacaaagattccttttccattgcaattgtgagtgagcaaatctagcagagtctatagtacgcataaagtcaacaatgaacaagactaagacaatttaactaaaaaatacaaccgtctatgtattttcaaactttccttggcatgaatacaatggcatggatcttagaatatctgttgataataagagtgaaaggtagatttcctgttattttcacagacaaacaggagaggtaagtgttcagattttctggttggtatgtcttgattctgaccagttccagtattcagctgttttcacctgtaaagtatggatttctctctgcaaaaacctctgtcccaatctgatgaagagaacacccaaaacaaagctcatgcccagagaaaggagcattgatatggatttggaacccaggcatcagctgccaaggctctgttgatatgacggcatgtcccactgaagtaaaaagaaggcatttgaagtattctatgcagagatctatcttccttgcattcctcctctgtattgctctgattcgatctaaaggagctttgaaaacgtcaaagaactttcatgttttgctagtttatcataagtgtctatcttaaaccaatattacaattttaagcatggcctgggtagacatgtgccatcttctaaaatgatttctgacacaaggtaagttgtaccagccgagaccaaagtgaaaagaatcataggctctatgacactcaggctctcctacattctaagagtctttttatttccccctaataaccattattaatcatttcagaaacacgtaatctcctgatatttttactattctagacttgacagaaaaggagggttttgaagttctggaaagtctttttatgtagagtagctccattcttccagcacacagctaccacaaggctcaactctccctaagcagaatgggatttatttatttatttcttaatccactgaagggaagctgggtgatgatgaattcttttaaagaaatcagcatttggctttcaaaatgttaagctatactggaagtgggttgtggaggcagagagcagtcgctagccatggaggaaagcttctcaaattcttactcagcttttgtttgggggaagaggttttcttccatttttatcagctctccgtcccaaatcctacaagctatgaaggaggggacccaccggccagggcaggggtttctgtggcttgctgatggtcacacggctgtcgggacaccagtatttctgaaatccttcctgaagaatttcagaaaaaagaatttcagaaatactggtgcctccacagccgtgtcgagggcacaggtgggcataggcctggaggtggctcctgaatggagcagcagcaagggctgtaaggggtctgcacaagggtgtttgattggcaggtctttgactctccagtcgaatgaccttcaggcaagttaccgaatctgtctaagcctcagtagttttcatcggcaaatgggtctaaggatccctactttattagattgctaggggatggaataagggaatgcatgcaaaactcagcagtgggcctggccacaggcctcagtaccatctccccgtggctggtccccattcagcaatcacaaggcttcgggggtagagaaacatgctgaggccagcacactgaaaccattacaggttttgatttttttttctcaccactctcctccctcctcagttcagctttctattaaggtatcccaaaacactaacgcagctcttggtgaaaggagaaagggaaaaagtggccaaatcaaggggtcgggggacagcagggccaaggtcaaacacctcgttggtataacatcttttaatttgaggaggagctcagtccccattattttcagtaaattctcaaactatgcagctctatgtttcctcttctacccttgtagcatcaactctgcagtttgaagtaaggttttgcaaaacttatgcaaaaagttttcttttctacaagagatgctgaagaagtcacctggaatttgctagtagaactatcagtaaaatgaagacagcaatcctgccttcagcccaactccactgcccagaaaggctggcactgtggggacgaagggggcagtggcagctcaccctgatgcagagagagcggcaagggactctgatggtgagtcagctgagggaagctgctggggtctcagcacaccgtatagaaaatccctccagcaacttcagaaaaactgaatgaaaggccaaaggtaacataaaccgccagctctaccaaccactcaggctgcagaccagacaagggagtggattgttcccatggtggctgcacctttccttcattctattcccgctatcttagttcacgctgcctgtggatcaactcgggatctcagacacatctcgtcacaattatcaagtggcaaaaaaggtgagccgccatccccttggaggtaaagaaaggcatgacgaagtcttagggccaacaggggaacgaagtcttagggccaacagggttcccccggtgtctctcctgcagcatgaaggccattgtttccagggcctgtggccaggatccagttatcttgcctggaaggatgttcaaacagccatggcccgtggtggttttttataatggtgttgttggaaattagtaataccatccagaggtgaaaacagagtagcacctccacagcctgcccaggagatcaggaataatgaagcctcattttagcatctgtttgttttgttttttcagcatttgcggggaatgacaacagaaatattggctccctgaccctggaagggtggaatcactccttgtggaagggaaaacgcctggagcggggcagggggcacaggcctggaggcggctctagggagaggtaggggctctgggctggcggtccccctgctggggaggactcaccttcacatacaggagagaaacatcatccctgtggcagggaaacccgtgtggtgggctgagcttcctcgctccctctctttgaagctctctcaagcccctctgagcatttgcaattgtacccccttagctgctgccacccttcatccggatcccctcaaacactccaccctcacaccctgcagaatcaggagagaggaacccgcctcctgcgagagccgccgccatctgtaacgttgccctcaccacccagaggcgaggaggagagccccccatccctcccgtcccttcccagctcccggcagccactaggctttccccttccccgtcctaagggacctcccgggctctgctctctctgggcaggttcagggctttgcaagcgc

SEQ ID NO: 1884518 - DNA, 4001 bp, Homo sapiens
caggtgctaagtgctctgaagaaaaaaacaaagccacttgtcaagaagggcagagccacagttgtgggtggccattcaagctctgcagggcagaaaccatacagtaagtgctctggcaggagcacacagtaggtgtgttgtaagcaggtttccagctaaaacttaacactgttttctttgggcccagtgcagcttcttgccaaccagttcagggtgtattgaaggcattgtgccagggctggggaatagaatgattggtgaacaaaaatcagtccttgccaccacggagcccacacccaactgggggcacagacaaacggggaagtgtaaaagagaagttgatgagggtcatggggcaggagagggacaatcagcatgtattgagcacctactgtgtaccaggcactgtgttaagccatgcattatctcatttaagccttaccacaaccctatgggggtgaggagaggattttattacccccattttaaagatgacaaaaccaaggttcagaaagattatgtaaccgtctctaggtcacaggcataacaagcagtaggggtgggatctgaaacctagccggacatcatgtttgttcttcgaagccctccccacagccacctgtcttagggaagcacagaaggcaagacattgctgccaacaaactccgcttccctgactctgcagagggatgcaccgcaccctgccagcctggcttcctttctgagcaggaaaggtcagctcggcctgccctggcagctcccctcaggcaccagaccagccagactcctgacccagtcccaggagcaggaaaggcctgtccagacttctactctgccccactcccacagaaggtcccatcccaggccgggcgcggtggctcacgcttgtaatcccagcactttgggaggcccaggtgggcagaccacaaggtcagaagttcaagaccagcctgaccaacatggtgaaacctcatctatactaaaaatacaaaaattagctgggcgtggtggcatgtgcctattatcccagctactcaaggcaggagagttgcttgaacccgggctgagatagcaccactgcactccagcctgggtgacagggcaagactccgtctcaaacaaaaaaaaaaaaaaaaaaaaggccccatcccggttacaacagccccttcccaggcaagccgtgctccacagtttataaccactttcaccctcttgattcgtctgaccacctcaccccagcagcttgtatcccagagcctaataccaggcctggcacacagcaggttaatttgacagacagcaggacagactatcccaatgaaaggcatgggctcccctgagccatctccatccagctttcatcagcatttcctgagctcccaggacaagcctggggctagaccaggcagtttcacctatggttcattattttaacctttccaggaaggtcttatctccattttgcagaagaggaagattgaagtcagagaagcctttccagtctctaatttacatggcaagtgaagctgcaggttcagcctgccccagaactggctcccctggatgcctttcaggtgttgcttctgtagggagggctctaacctatgacagatctctgctgtgggatgagagccccctgaggacatgcagcagatgtggcaccaacatcctagcccaaacgaaaacttgccacagcagggcagagctgggcttgggcgcctaaagcttacagagcttggaaggttttttttttgtttgtttgtttgttttaaaaaaaaaagagtacaaaaataatttccttttgcaaatttcacaaaacccctgagcacatggacacattgctaggccttggaaagggccctggagcgtgaagggctggaagctgaagctgcatcagcctcatggtgaatccgcctcggggctggaggaagggcccagaggcgatctgagcaccacccgccttcacaaaggccctgcctccagcccaacagacagatgaggctccggaagacattccttcttcttgatgggagtcccgctgctacttaaccctccctgcagtaggtccaagtctgtctgtctttctcttgccatggtttcagaagaagcagatcttggccggacgtggtagctcacacctgtaatcccagcactttgggaggctgagacgggaggattgctcgagcccaggagttcaagaccagcctgggcaatgtagcaaaaccacatctgtacaaaaaatttaaaaattagcctgggatggtggcgaacacctgtggtcccagctactcaggaggctgaggaggaaagattgtgtgagcccaggaagtcaaggctatagtgagctatgatcacactactgcactccaggctgggcaacagagccaggccctgtccctgtctcaaaaaaaaaagaagcagagctcagctgagtctcggacctgcctgcggaggtctgctgctcacaagggcagcactgccagatttctttgtgatcctggggcacaaccccaagaggagccttccatgcctgggctggaatcctgggcctggaatcctgggctggcaagggctgccctattaagaaccccatcctcaaacatttgtagggtatgatacagtttaccaaatgttcccacatcccacatccacatcccgtttggcccacacgacagtcctggaggtgagcagggcaagctttattgtcccccttttatagacggggacaaaacatgagacttgctgtgcacctattgcatactaaagatgccaaggggctttccacacgtgacaactcacagataccctgtgagaaaccaaggctcactcagtgtctggggctgggcctgagaatgagcctgcagccctgctctcccatctcgcagcccgtgcctctgccctgtctcatctcagtctggcatggacagctcagaaggcagtgggcaggcacgctgagactcagtaggttgaggaagaagaggcctccagctaccaaggcggaagagtagctgagggctcaatatatttaatagaaatcaaaaaagtgagaatcaaccgtgccctctctggatgtgtctgaggaagagcacatggcccttgggagcctgaaacctgtttgaaagcagtcaccttacagactcagggcctgatgtcctccccacaccctgccaagctgcagatggccccacccctacctcccactgtccacatgctaggccttccagacccttctgctgactcctctcagcgcccaaggcagccacccagtgcttgccctggcctgttcaagtcctactcctgtccttcactaatgcttgcttaattcgtggatatacctactctacgaatctttatgagaagatactgtagggtgacccacagtcctgatttgcccaggagtgagctgaggggtttcctgagatgcgagactgagactgtcccaggaaaattgggatggctgacgaccctcatgtactgcatgcctggtccctgggctgggtgccaaggacacatttatctaccaaacatagtcactgccctcaagaaacttccagtcggagagtggctgccactcaatgagaaaccactgtcaaaggcacctgttcagcccctcacacacatgatccatcaccaccctatgaggggaatattatcacctccgtggtatgcataagaaaactagggctcagaaaggtggcacaatgtgcccagagtcagagttacaagtgacctgctaagatttgaacttgatccaatgaaacagaaaaagggcagtttccagcatgaacattatggagatagaaaaagatagacatgttttatttaattcattttgtagctccagtgtctggcatgttctaggtattcaggaaatgcgtgaagggagagagggagatctaagccttatttaattatctccaggctaggagattccatccctcaattcaaaagccatacatttcccttttcaaagtcagtttcagaccaggcacagtggctca

SEQ ID NO: 1884519 - DNA, 4001 bp, Homo sapiens
attcgctagggggatacatcgacgccgagatccagaactgcttagccaagttggcatcttgttccgaggagccagcaaataccagtaatcccggggggcacatttcctgggactcttttcggccgctaggttcttcgctgggtcccgtttccatggcaactgaggacgcttctgcaagcgtcctctcccctccccccgccccgcccctgccccgcccctccgagaaccgccaagttggtaccagcccctgccggctgccctcggtttcctaggtaggtgttgggatccgccacgcgcgtgggggccgtcggaagcccacccctgcggtgatcaggttttaggaccagtccaaatcttggatatgggagagtcaaaacgtcaactttgggttgtgtcctgtcggagtcagtgggggagtagtttagcttcttatatcctcagtgggctgccacatcctctcccctccccccagaaagatagctaaataaactttaaattcctcagccccattgccccaatccccacttccaaaccagattgccagggacagcacctgctaggtggaagttctgagaacgttgcgctggagaattcacgcctgaaagcctagcccttgggagctagaggcctgaactgggcggatacgtgcccatgtgtacagtttctgtgattttaaaattctgaatcctttaaatcttaggaaacaagctggatttaaagtgtaagtgcatttactaatcactcccactaaaagttgcatagactccaacagttgtaaatgattacttaaaagaagggatacatcttaatgagtgaacagagtctcttcatggaaaaaagaagtatgaaaaattttgttaatgtatttcttataaaagtattaacaagtctgtgtgtatgagtagctttcccgggagatttttgtcatggcaggaacaacttaaccacttcattgatagaaaagttaagattactgtggcaggaactgagatggacatcataaagtcaatttagcaaaggaaatggacacatagcaataaccacaatttatgtctttatggcactttattctttcgaaatattactaacaatattactttcaaaatattactaacaatatagtctcaagaagttaataatcacatgttcatataataacatacatcagtcagctaagaaaaaaatcatattcccccttatatctaaaattttggttaagagcctgaaggaatattgaaaaaaaaacaaaacaaaaccccacatacatacacattacatacattgtaaacttagtagctgaaatgttgatttttttcttttggctgagcaattaataggcaatggatgaaatcagcattttccaacacccctcttccccacgcacattgatgatgcacaggcagctcatttggacgaattcccaaatctttttacctggccgtgtggttagtgattggtactattagcaatcagctaactacactgcctagtaactagactcatagaaaaaattgcagtctcaagttggtaccccaacacgttgtgacaggcaggcaattcattggttgagttggagctcaactgagttgctagcttggtgaatactctactagacgatggcaaatagacacagtgaatcacagcatacagtattaaccgttacatggatggaggggcttcacctccagggattttgctttcctggcatgagactgtttcatcttctgtgactcctagagagagctaacagtttaactgtatctggagaaaccgcgggtttcctcgcacttgcagcgggcgctcgcggggcaggctgcgcaggacccacgccgacgccgcgcttctcaggcatcttctctcgaaggctgcgggctgcccgagccggcgtcttcttcccggccgggcggcggtgatgctgtgccttgttttgatggcagtggagttagtgattgtaaccaccacagtacaatcagctaatgacactgcctacaaaccgagcaccgggcacccgcggctgcagctcccggacggtccgcagcgccgacgcggggtcggggcccgcctcggaccccatttcaccgggggacgccctaccatggctgggcgcaagcggcccccgaggacacccccgggcccagcgggacccccgccggcctcgcagcgcacaacacgcgtagctgggccagcgggcggcgctgccggggaggacccgcgccctcccaggccgggagccgcgccccgacccccatgacccccaggagtgccaggcctccccttcccgcagcctcccgctcctctcagggccctcccgctcaggttcccctcgcttttcctttccccttcgcctcctcggcccgggctcccacttccttcacgccaggcttcagttcccagccccaaaccctagagctggctctctcgaccccgtgcgccccgccgctctgagcggccgagtgactgtggcgggggcgaccaaccgtccttggaaccccgcgggccgaggggcggggcgggcgcgagacggggcgggtgggggaggggatggggggggggaggaggctgagagaaagcgctgtgggcggtccctgaagggcctccaagggagacgcctagaagatggaggcccagattcttgagacgtttctctttctgatctagcaggagggacaaagagctcctccactccctcattccccaagaaggcccccagcctacccagtttccgtgaccattccgccctgggaaagcggcttcccaggtacctcaaattataggtttgaattttccaaatggaggtgggcttgggtagcctctgacatatgggaggatggcttggagagtctcatctgcacctctgtgctctgttggggacttggccttatactcttagagggccatgcagtgatgtgaagcctgggccttctagtcaaatagtgagccaggcagcttgttagttacatcaaatcgtggtcctcttgagatcaaggccataccattcaagacagtatatatataataaattactaaactagggactatttagaatagtagaaactatttgtatcagaaatagaagggaggtcctcaatgagagctgtaataggtcaaagaaggttcccagaggaggtgagacttgagtagatccttgatgcacgagtacatttggatattcagggttagggctgtggatgccagaaaaacagtatcttgtgacagttgggcaaaagggacagttacagaggacttctgggagatctctgctaataactttccttcccctcctttgcctttaatgaattaatcaggagaggataaggaatgttctctttatcctcaccttgtgaaattcagctggaagcagcctcccctagaaatatggtcttcatgcatccagtatagagcacccattgctgacaccaaaggcttagttctaaattagtttctgcaaaagaaaacttcccacctatagattgattccctaaaaccagcaaatggtctcatagatgccacaagtaacatgaacaggggcaggtcatctggatcattcaatacaaactacaaactcacactattaaaacaactaaagaactgcccaaggatgtttgaataagttatagcattttctttgcatatgaaagacagcactttttttccaaatgcatactttgttctgtacaccccatagtgaagggaaagaaaccaaaatacaaaatatgtagcacagaaaatgttaattgtaaaaattaactcgtagaattaaattgtgaaagacaagccatctacaataactgtattttgtattcatcttatctttgtgaggggcacggtgttttagcacacattacataaatgactcacattcacctaaatatacatacatgaaactaggagcaaaatagtcttcattccattaacaatatgcagacttagagaaatcttggttaggagatagttataaaaatgattctcttctaccaaattgttagtcacttttacccaat

SEQ ID NO: 1884520 - DNA, 4001 bp, Homo sapiens
atactataacaattgcataacagtttccacatcctaggcctcactaagggctcacaggtccaggaagttcattggtaatgttgactccaccttcatctttctccagggcttttcatgtttgaattaaactatgtaaactatcctttcagccaacacatagcatttcctcagattattctatactgtttaccaaatagatgccataatttaagggaaacttatatgtttttagatgtaacatatataccactgatccttttcgggtggaagggttgctggaagggttcaggaaatatttatacatgcatttgtatgtacttataactatttgtatataccattgcagtttctcctggaaagggctctggtacctgcaggccagttacggtgaggcagatatgactgacaggaggccgctattctactcaccagaccctctgctcctcctgggccgcgccaccggcagacgctgactgctgtctctgcgcagcaccagctgagattcgctagggggatacatcgacgccgagatccagaactgcttagccaagttggcatcttgttccgaggagccagcaaataccagtaatcccggggggcacatttcctgggactcttttcggccgctaggttcttcgctgggtcccgtttccatggcaactgaggacgcttctgcaagcgtcctctcccctccccccgccccgcccctgccccgcccctccgagaaccgccaagttggtaccagcccctgccggctgccctcggtttcctaggtaggtgttgggatccgccacgcgcgtgggggccgtcggaagcccacccctgcggtgatcaggttttaggaccagtccaaatcttggatatgggagagtcaaaacgtcaactttgggttgtgtcctgtcggagtcagtgggggagtagtttagcttcttatatcctcagtgggctgccacatcctctcccctccccccagaaagatagctaaataaactttaaattcctcagccccattgccccaatccccacttccaaaccagattgccagggacagcacctgctaggtggaagttctgagaacgttgcgctggagaattcacgcctgaaagcctagcccttgggagctagaggcctgaactgggcggatacgtgcccatgtgtacagtttctgtgattttaaaattctgaatcctttaaatcttaggaaacaagctggatttaaagtgtaagtgcatttactaatcactcccactaaaagttgcatagactccaacagttgtaaatgattacttaaaagaagggatacatcttaatgagtgaacagagtctcttcatggaaaaaagaagtatgaaaaattttgttaatgtatttcttataaaagtattaacaagtctgtgtgtatgagtagctttcccgggagatttttgtcatggcaggaacaacttaaccacttcattgatagaaaagttaagattactgtggcaggaactgagatggacatcataaagtcaatttagcaaaggaaatggacacatagcaataaccacaatttatgtctttatggcactttattctttcgaaatattactaacaatattactttcaaaatattactaacaatatagtctcaagaagttaataatcacatgttcatataataacatacatcagtcagctaagaaaaaaatcatattcccccttatatctaaaattttggttaagagcctgaaggaatattgaaaaaaaaacaaaacaaaaccccacatacatacacattacatacattgtaaacttagtagctgaaatgttgatttttttcttttggctgagcaattaataggcaatggatgaaatcagcattttccaacacccctcttccccacgcacattgatgatgcacaggcagctcatttggacgaattcccaaatctttttacctggccgtgtggttagtgattggtactattagcaatcagctaactacactgcctagtaactagactcatagaaaaaattgcagtctcaagttggtaccccaacacgttgtgacaggcaggcaattcattggttgagttggagctcaactgagttgctagcttggtgaatactctactagacgatggcaaatagacacagtgaatcacagcatacagtattaaccgttacatggatggaggggcttcacctccagggattttgctttcctggcatgagactgtttcatcttctgtgactcctagagagagctaacagtttaactgtatctggagaaaccgcgggtttcctcgcacttgcagcgggcgctcgcggggcaggctgcgcaggacccacgccgacgccgcgcttctcaggcatcttctctcgaaggctgcgggctgcccgagccggcgtcttcttcccggccgggcggcggtgatgctgtgccttgttttgatggcagtggagttagtgattgtaaccaccacagtacaatcagctaatgacactgcctacaaaccgagcaccgggcacccgcggctgcagctcccggacggtccgcagcgccgacgcggggtcggggcccgcctcggaccccatttcaccgggggacgccctaccatggctgggcgcaagcggcccccgaggacacccccgggcccagcgggacccccgccggcctcgcagcgcacaacacgcgtagctgggccagcgggcggcgctgccggggaggacccgcgccctcccaggccgggagccgcgccccgacccccatgacccccaggagtgccaggcctccccttcccgcagcctcccgctcctctcagggccctcccgctcaggttcccctcgcttttcctttccccttcgcctcctcggcccgggctcccacttccttcacgccaggcttcagttcccagccccaaaccctagagctggctctctcgaccccgtgcgccccgccgctctgagcggccgagtgactgtggcgggggcgaccaaccgtccttggaaccccgcgggccgaggggcggggcgggcgcgagacggggcgggtgggggaggggatggggggggggaggaggctgagagaaagcgctgtgggcggtccctgaagggcctccaagggagacgcctagaagatggaggcccagattcttgagacgtttctctttctgatctagcaggagggacaaagagctcctccactccctcattccccaagaaggcccccagcctacccagtttccgtgaccattccgccctgggaaagcggcttcccaggtacctcaaattataggtttgaattttccaaatggaggtgggcttgggtagcctctgacatatgggaggatggcttggagagtctcatctgcacctctgtgctctgttggggacttggccttatactcttagagggccatgcagtgatgtgaagcctgggccttctagtcaaatagtgagccaggcagcttgttagttacatcaaatcgtggtcctcttgagatcaaggccataccattcaagacagtatatatataataaattactaaactagggactatttagaatagtagaaactatttgtatcagaaatagaagggaggtcctcaatgagagctgtaataggtcaaagaaggttcccagaggaggtgagacttgagtagatccttgatgcacgagtacatttggatattcagggttagggctgtggatgccagaaaaacagtatcttgtgacagttgggcaaaagggacagttacagaggacttctgggagatctctgctaataactttccttcccctcctttgcctttaatgaattaatcaggagaggataaggaatgttctctttatcctcaccttgtgaaattcagctggaagcagcctcccctagaaatatggtcttcatgcatccagtatagagcacccattgctgacaccaaaggcttagttctaaattagtttctgcaaaagaaaacttcccacctatagattgattccctaaaaccagcaaatggtctca

SEQ ID NO: 1884521 - DNA, 4001 bp, Homo sapiens
accccgtctctactaaaaatacaaaaaattagcctagcgcggtggcgggtgcctgtagtcccagctactcaggaggctgaggcaggaaaatggcgttaacccgggaggcggagcttgcagtggagccaagatcgcaccactgtactccatcctgggcgacagagcgagactcccgtctcaaagaaaaaaaaaaactatagcacgattgagcctttgtacagccagccactgcactccagccttagcaacatagcaagaaccccagctctcaaataaataaaatttaaaacattttcctgacccagttctaccaaaaaaattttaaattaaaaaaaaaaagtgacacccactgggttcaaaactctgcctctaccacttaaaatgtgtgatcacagtcaagttagtgaaatctgtaaatccctatgcttcccgttagaaatcagggataccaccaccagactgataacacagccaggaatgggccaatgggccaggccagtgtctgttctgagtagtctgtgccttgtcctgcaggtttgaggcatttgaaccacagccctagggcaggcatggtgatgcatgcctgcaatcccaccactttgggagaccaaggcgggacgaccgctggaggtcaggagtttgagaacagcctcggcaatgtggcgaaaccctacctctacaaaaaaaaaaaaaaaaacccaccacgaaaattagccgggcgtggtggtgcacacctatagtcccagctactcaggaggctaaggtgggaggatggcttgagcctgggagacagaggttgagctgagactgcaccactacactccagcctgggcaacagagccagaccttgtctgaaaaaaaaaaagaaaaaaaaagaaaaagaaactacaacccttgcatattgtcagctacctacctcacaggacagttacaggaaataatgtaaagttcctttgcgctctgtgaattatacacgttagctcttgttattagcagctattctctcccttcactgggaaaggcctggaatctgatccctaagaattaggtagtcacaaagccccatgtcactacccgccccaactgcttccgctctttcccagctagaagacagtcatcaccgtaggaggcagggtaattaaaatcacaagtgaacacaggcctctatttctgttcttctgaagtcttctctcctgcatatcgaggtactgcgaacacagaaagtaccctgcttcaacatatctactccccttgaagacgccaccactcacaaaggaggcaggacaggaaagggttcaatgttcagtttcctttaatgacccccatctccctgaagggcaggtgcaggcagctaggtgatggcaagagatgttcacttgaagatcttgccctgattgaaggctttgcccacatgctggaaggccccctcccaggaaaagtactctcgaaccagcgtctgggtctcctcgctgccaggatccagtttccgccatgtgtatgactcgtagtccacctgccaatctggactcagctggggataaaaagccagcatgtggtcaagttatgagacaccaccccacacctgtgttacttccagctcaaacacatgtcatcagaccccaggtctcctgtgaacatgaactgctccttcctataagcattcctgaaccctcctaaacatccatcaactcagaaataaaacacagtgcttcttatatccctgccccaccctaaagagactcctctcctccaccttcctcaccggaaaggcaagctcctggcctcggaagacccagactccagaaatggagctgctattgttggttccaaaaaggatgacactggcgaaggcattcttcctcagcttgtccagtcgctggaacattcctgaagcggcaagggagaacattcagcctttggaatcacagcacttgctacaccttgttctccttccttctcagacccactctcttaccagtgatgagattgcagctcatgaaggtctgagtgagttcttcagggaagcgatactctgagtaccacagggaccagccgtccttatcaaagtgctcccagaaatatggcagtgccacagagagtgtgtcctcattggagtacttgcgcttaaattcatccaacacaaaggtactaagaggaagaaagcacaggggtcaatcaataaggaggaaggttgccaggctaagagaagtgaagggtgctttcacttaaaatttactaatataaaggaaatggtcattgtgctggcagatgtgtatgaccttatgagggaagtaagctcaaggggtttgaacaggggcctaggacactcctctgcataagtatgcaaggcatgtggagggtggaactcaaagtgggactctgagacctgccccaggaagggcatggctaactgctgcccccaggtggagacagagtgaggacttctttttccctgttcaggccctccccaggctgttttccatgaaccacactaagtcactgactcacccaagtctcttcccccccaccatacaggcctcttcaggttacacaagctgtaacaggaatgtaagcagtgaacattctcaaagggcctccaccccaaatcttacacccatgtcctttagtccatctctgcctataaacaagctttagtcttttccaaggttttccgatgctggaaagcccttaggttcaggttatcttaaaagcaatctggcatactgagccaagaatgccagcatcaatatagcagaggtcactccctccacgattggtgctctgttttctttctttccagttataaacatatacactggccagatgcggtggctcacgcctgtaatcccagcactttgggaggccaaggcaggtggatcacctcaggtcaggagttcaagcccagcctgaccaacaaggtgaaaccccgtttctactaaaaatacaaaaattagctgggcgtggtggcaggctgagacaggagaatagcttgaacccgagaggcagaggttgcagtgagcagagatcgcgccactgcactccagcctgggcgatagaggaagagtcctgtctggggggaaaaaaaaggacaggcagggtggctcacacctgtaatcccaacactttgggaggccgaggcgggcggatcacgaggtcaagagatcaagaccatcctggccaacatggtgaaaacctatctctactaaaaaaaaaaaaaaaaaaaattggtggcacacgcctgtagtcccagctactcgggaggcagggacaggagacttgctcgaacccaggagacagaggctgcagtgagccgaaattgcactccagcctggcaacagagcaagactccgtctcaaaaaaaaaacaaaaaaaaaacaaaaaaaaaaaaaacaaccaaaaaacacatatatgtgtgtgtgcatacatgtgttaaatgcctaaccttgtttttactctaactcactactttgaatcttccctgtttgtctctttaaccacctagccttgcttctcatgtaaataagactctctctctagctgggaaagccggacaaactccaattgaccctttaatttacaagacactaagggctcctcacccaacccccttccacaaggagttgacctgtgttaagcagatcctcagcatttcaaaggagcccaattaactgataaggtactggcacaaacaatgtatgaagttcccaggatttttctcaaagtgataacaacataaagccttgagttgtgtcccgcatagccccatatctaattataatgaaggatttagagccctgcacctggtacggttgctttttgtaaccatttgtcttttaaattgtttatctctctgtaaccattttgcttcttttgattcttgcatgtttttacctctgtaaaattattgcatttgagttcccctccccttcctaaaccaaggtataaaagttagtcaagccccttcctcagggccgagagatttttgagcgttagccgtctct

SEQ ID NO: 1884522 - DNA, 4001 bp, Homo sapiens
tgcactctagcctgggtgacagagcaagactccatctcaaaacaagacaaaacaaaaaaaccccacaaaaaattagctgggtgtggtggcgggcatctgtagtctcagctacttgggaggctgaggcaggagaattgcttgaacccaggaggtggtggctgcagtgagccaagatcatgccactacactccagcctgagtggcagagtgaaactgcatctcaaaaaaaaaaaaaaaaaaaagaactgtgggtcgggtgtggtggctcacgcctgtaatcccaacactttgggaggcgggcaatcacctgaggtcgggagtttgagaccaccatgaccaatatggagaaacaccatctctaataaaaacagaaaaattagccgggtgtggtgacacatgcctgtaatcccagctatttgggagcctgaggcaggagaatcgcttgaacccagggggcggatcatgcccctgcattccagcctgggcaacaagagtgaaacatttcaaaaaaaaaaagaattgtgccaggaaaagcacaccccctcttcttgcttaccaaaggtgtctttggtcaaccccctcctcccaccttctccaccacactcctctggcccacctggagatgcaaacttatcagtatctcttccccaccttctccatcacactcctctggcctccgtggagatgcatacctgtcagtgtctggtagcagtgcaatttgaatgtgtctgtctccagcatctcaatgcctgagcttccctgttcaggagacagctgggagccgatggcaaagagcctatatgcaaaggaggcaaagttgctctaaggaaggagtgcttctcaaacttccactgaagtgtccctatttgctgaggagttcacattacagcctgggacagtcaggagaagtagtgtgaactgactggcagtagtgtcaaaatttctaagttcatttgaattctgtgaatattttacattcatactttgttacaagacattttacatctaaaactttgggtaaaatgaatactctaggaatatgtgccacgcttactaagcttgtgtttaagcaaaggccggcacatctgatatcacaattgagagcagaaaaagtttaaaggtcatttagttaaactggctttctttaaatatgaagaaactaaggctcagagaagagaagttgactttaagtaagatgacacctcggccgggcgcggtggctcactcctgtaatcccagcactttgggaagccgaggcaggtggatcacctgaggtcaggagtttgagaccagcctggccaacatggcaaaacccctctctactaaaaatacaaaaattagctggtcgtggtggcacgcgcctgtaatcccagctactcgggaggctgaggcaggagaatcgcttgaacctgggaggcagaggctgcagtgagccgagatcccgccactgcgctccagcctgggtaactccgcggcccctccccacccagcaaaaaaagatgacaccactgccgttattacctaaaatctagatctggatcggttgcgtttttcataacaccagaacgacgatttaagaaaaggtagacaaattacaagcgctgccgttcaggagacgggggacttacgagtggaacatggaggccagcataagcttctcattagaagtgaggcggggccggccaaatcgaatggacaccgggtaattagcagggttacccagatactccagcacctctttcccgtcggccgtgtacctgccattcacgtccatgccattgatggccagcactgcatgacccactgcagaggtgaagctaacggtcagcgaaggtgcagcccggggattccgccgaggggacaagggacccgacacaaccccttttcccccaaccccgcacctacaaccagcccacttctacagcactggggccctcccacccccgcacccgccacgggcccgagcctagcccacctcggatgccgtcccgctggccgaaagcaaccaacacacgctcatcgtgtagcttgagcagcagatccagcggataactgaaagttttctcagcctcagcccgtggcgcgtagctgtccaactggtaaatcaagccgccagctttgttcaccacatacacactaaaaatcgccatcgctgccttgccgctcggaaactggtattcagcctctacccgacggcccctccccggaaccgcatcacagcacttgccgccggccccaccccagcctcctcctcctcctcctcctcctcccgcgccccccgtgcagccacctgctgcacttgcgcactgggagcgacacgctcgggcataagtagtgccggaaagttagctgccgagacctggtggattgcttttcgtttatcagtgcaggaaaacagcgctatagtatgcgtcacaactagcgcagactccggcagtatttaggcggtgcggcttgggaactagaatccacttcctgtcttccgcctcaggctagagggcgagcgcttcgccgtgggacttcttctgcctggctccgccttttgccccggaagtactcacagcggacggtggtttttgggcccgtttctgagcagcgcttcctttttgtccgacatcttgacgaggctgcggtgtctgctgctattctccgagcttcgcaatggtaagcttcaggggtgtgaagtcgccggcgttcttgggtttgaggactcagtggggagagccttcggcgggagcgctccttggcctgccggcctcggttgcagggcgggcgcggttattgcttggcccatgtgctctggtggtggagtttgcgggggctgagggcgcagtattaggggactttggcgctatttgaggacctggttgcattcccgctgccctcctacagccgcctaaggacgacaagaagaagaaggacgctggaaagtcggccaagaaagacaaagacccagtgaacaaatccgggggcaaggccaaaaagaaggtagaaataagacctctctgaaagagactaggggtaactctctcgtaatcctctagtaataggtaacttgtatagtaagtggtttttcaggtgtagatttctagagtcaaaatgtgagagtttatcttcccgtcaccactcgttctttttcccattaggatcatgaaaatgggtctgttgtgcgaagtgtctgccgctgtgcctgctgtgttatttttaactgatctagtggggctcggcccctgtttgaaggccaaaaacgtgtcggtgttttttttttgtttttgttttagtaatgtgtaatttatccttgataacggtggaacagatttctctgacgcagattactcgagagggaaagggtgcttctgccagaaatactaacttgtttctgttttgttttggtgagcagaagtggtccaaaggcaaagttcgggacaagctcaataacttagtcttgtttgacaaagctacctatgataaactctgtaaggaagttcccaactataaacttataaccccagctgtggtctctgagagactgaagattcgaggctccctggccagggcagcccttcaggagctccttagtaaaggtgaggggtgtatcctacatgtgtgtttttgtaggttaaattgtcttgaccatgttaagcatcttcagtggttttgctggaaaagcagaattaaaaaaaaaaagcgtggcttgaccattggctgttagtaatgtaattctgacgtcttactcctgatcctgagatgaattctcagggttcttagccacttttgtgccgtggaccctgtggcagtttagtgaagcccaaggatcttttatgtttcgagtaaatggatgcatagaattacagggacaaccgtttttgaaataattagattactattttgaaacaactttgaaaatgtttaaaacctttatggtaaatattttgttgatgtattaaattttaaaaccagaaatttagtacggtctactcagtagtatggtctgattaccat

SEQ ID NO: 1884523 - DNA, 4001 bp, Homo sapiens
ggaaaagggcaggtgagcgccaggaaagatctaggaaggtttttgggttttcagttcctgggccataactgagatggggtgcccaggaggaagggccagctggccaggaaagatggggtatgttcactggagctcctgtaaccacagcctgggtgactgaaaccacagggatgaattgtctcatggttctggaggttggaagtctgaggtcaaggtgttggcagtgggggggttcacactggggactgcagggagactctgttccaggcctgtctctccagctcccagtggcctgtaggcaatctttggcattccttgactgacagaagcatcacccagagctctgccttcatctttgtgtgaggtttgctccgagtgcatggctgtggccacatttcattcattcattcattcatttatttatttgagatggagtcttgctgtgtcgcccaggctggagtgcagtggcacgatctcggctcactgcagcctccgcccacacagattcaagtgattctcctgcctcagccacccaagtagctgggactacaggcacccgccaccacgcccggctaatctttgtatttttagtagagacggggtttcaccatgttggccaggctggtctcgaactcctgacttcaggtgatccatccgcctcagcctcccaaagtgctgggattataagcatgagccactgcacccggtcccatttcctctttttataagaatatcagtcctactggattagggcccaatctaatgacctcattttcagctgatgacttctgtaaagaccctacctctaaacaaggtcacactctgagatcctcagggtgatacttcaacatatgcatttgcagggacacacttcaaaggggagtcaggggtctgggctcgcctggtggcaggctctgcaggagatgagtctgagggtccaagaggaggtccagggagcgctctgcaagccaccagccccgaagatcactggcaccataggagcagggcaggatgggcgggggtggggagcagagagcagagcaagggcaaccacagaacctggggccacaccaccttctgagatgagccacatagcctggcactgagcctccttcacgtgctgaggccacatctgtgtgccatggagcctgtgagcccctggagggagaggctgtgcctgggaccctgcggattccccaacacatttgctgaacaagcagggcagggagagaaaggaaagtgaggtcgagacaaatattataaatatgaccatatccctgatggagaagaaagtcaagaaagagttcatgttgaaaggcaacacgggccagacacacctggtactcaggggccctgcagggttttacagcaaactgtggccacatgggggctgggaggggacagccaggaaagaggcacagtccccatctgaatttgactgagagactctttgaagccgtctgagatttccatatacgatttctattaatatttaaggcaagacgcatcccatcctccataacaacaccgtcttgaaagaagcctttgaactacttgaaaggtaaacccagcattattcttggattaagaactcttgttcattcaacaaatacagccccacgacgacatccctgaacaccagagccagaggtgccttggcatgtgcacgctgcctgcttctgcagcagtaggatgatgcgtgtgtggcctgttacgtcacaccgccagtgggtctgggcagtgtcccattgccaattgcgggaggagtccttcagggcacggatgaataatcatgctaagtaggataaataaaaactataaatagcctcaaatcagttcaggtcaagtactactgccaacgagctacggagaaggcattcgcttttcagatctttttgcagatccacattgaaggtagggaactctgtctttactcctgagagctcgtgttggaaggtactcatgagtgaagacagagttccctaccttcaagtttacagaggagacggggtgcacagtggaaaggaggggaaaaaaaccccacacgcatgaagaggaaagacaagtaggatgcaggcttggaggtggaggctcggcgggacggggagaaaaaaggacaagacccttccctagaagcgcttggtggacacagtgggtgcaaacgaccaagtggctggatggagggaagagagaccctcagatggagggaatagggggcccccatacagaggggccccccacagaccagagtcaggggcacacaggtccgtgagctacgtggaatgagagatgggtccctggaccacattacttccggctccctggtgtatctcctccacgttctggccacctgcgggtccctgttttcctccacactgaccacttgaaaactgatgggtggcaattttcacccctcattgtcctaagggtcgtgggggctgctttgcttggtgctggagtctggggccacagtggaacatggcattgattgctaagaggaagggaccccacgatgccctgtagagcccagctcctcggggcaggaggagcacatatccactgtctgccctctccccacactcatgacctccacctcccccagccccaaacattacaaaagctaaagacatcctgggcacctgtgagaaaggaagagcggaggtagttcccacgtccatcctggtgcctctgcctcccgggtggcgaccctcaggaaggtgaaacctgcagcttgggccctgcagtttatagaatgatatgtttgtggttccctaaaacaaagagccgttgccacagcaaccgtggcatcccagcactcagaggctattctcagacactaaacaatgagttttgcctttcaaatgcatttgatacaatttgcttggaaggcattaacatcctctgacaaaacccatgaggaagaggagggcaggtgagagctgacaaggtcgagacttgcagggcttccaggaatcacacccattcatgagacaggagggcccaacggccccagacactttcaataggcaaacaggaaatgggaaacagcagaggggaggcaggcaggatccctaaccttccaacagcagttccgtggaggaggaggggctgcccagaggtgaggcagttgggatccctaaccttctagcagtggtcccatgaaggaggagcggctgccacacaccctttcggggcttcttcaggagagacgttccacagtcccatctggggcagttctcttcttcagggtcactgcaaagatggcagcacaggccagagcccgcagcaaccacttaatccaccctgctcactctgcaaaggacattgagtgcgtcccctgctcacagccagccattgcttcctccatttaccattttttttttttttgccagttcatgaacaactttgctattgtttacaacgatctcatgggattagaataccaaacagtgatgccagtgagaagaccaaataaccttcattcctagcaccagcctcctgtcactagcacgctgggcaagctgccctcaaaaacagctcccgggcgtcagtgacaggaacacgtgtcatcaggaaaaaggcatgatgtaggcaggctgggggcagcatcccaatgcaaagtacatttttgaacagactaaagaacatgtgaacagtacacagaaattcctccatctagccatctatccatctacctatagatccatccattcatccatccatccatcttatctatcaatccatctatctaatctatcctatctatccatatccatctatccatatctatctaatctatctacctacctacctaatctgtccatccatccatccatatctatatactccatctatctatccattcacccatccagctatccctctaatctaatctaatccaatctaatctaatctaatctatctaatctatctaatctatttatatgtaatctatctatctatccatgatttatctatctatctaatctatctattgagac

SEQ ID NO: 1884524 - DNA, 4001 bp, Homo sapiens
aagatccagttcaataaacaacatattgttctctagatattcccatagctggtgttaaatttgttcccatttatactgtggccaatgaaagcagaagaattggcctagattaaaaagttgtttgagtcaataatcctcagatcttagctggagctcagagttgtgatatactggtatatctgctcatgagatgttattgtggaacttaatcaatagaatcagccagatttttgccaccatttcagttgaaagaaaagcatcatttgccctctttggtcttctgtttccttgcttttaaagtaatctctcttctgcacagcaaaggacacaatcaataaagtaaagagacaacccacagaatcgaagaaaatatttgcaaactgcccctctgacaagggattaataaccagaatatataaagtgctcaaacaaccatacaggaaaaaaaattaataatctaatcgaaaaataggcataatatttgaatagaaatttctcaaaagaagacatacaaattgcaaacagaaatatgaaaagatgcttaacatcattgatcatcagagaaatgccaatcaatactacaatgagatgtcatctcacccaagttaaaatgaattatatccaaaagacaggcaataacaaatgctggtgaggatgtgaagaaaaggaaacccttgtacagtgttggtgggaatgtaaattggtactatgaagaatagtttggaggttcctcaaaaaactaaaaattgagctgccatatgatccagcaatcccactgctgggtatatacacaaaagaaaggaaatcagtatatcaaagaggtagctgcactcccatgtttgttgcagcactgcttacaacagctaagatttggaagcaacctaagtgtccatcaacaaatgaatggatgaagaaaatgtggtacttatacgcaatggaggactagttagccataaaaaagaatgagatccaggcatttgcaacaacatggatggaagtggagatcattatgttaagtgaaataagccaggtacggaaagacaagctttgcatgttctcactcatctgtgggagctaaaaattaaaacaattgaattcatggacacagagagtagaagaatggttaccagaggctgggaagggtactgaaggtttgggacgagttggggatggttaagggtacaaaaaagaagaaagaatgagtaagacctactatttgatagcacaataggttaaccatagtcaataatgacttaactgtgtatttaaaaataatgtgaagaatgtaattgaattgtttgtaactcaaaggataaatgcttgaggggatggataccccattttccatgatgtgcttatttcacactgcatgtctgtatcaaaacatctcctgtaccccataaatatatacacctatgtacccacaaaaatttttaaaaataattttaaaaaatcaaataagataaataaagcaacctctaaggacccttccagttaatacaacatttaattctatttctctgttttaactaagtggaatatttaccttcattttccaccgctttgaggacacagactaagctaaataacctagtcaggtgagaacttggtgaaaacatgctacaaaatgatgttctctccaatatctgcttcacccatcttgatccttatgtcagctagtggcaccccaattttctagttactcagaaaaaaaaatcatggtggtgtcctgggcttctttctttcgtactccaaaaccatttaatcaggaaatcctgcttacttttcaaaattctgagctgtatctcaaaatgtatccagaatctgaacacctcttgctaccaccccagtccaggcatctagatactagatctagattcgatgacctgaaaggcctggcacaatctgatctttactgagtgagggggtcagagagttaagataatcagtacaatctcacctgtactaattctcttaactctctgactccctcactcagtctctctgctccagccacactgatctgcttgctcatcctctatgtaccaagcttgcttgtgcttttgcacttttctctaccctctgcctggaagctcttatcctgatacctgagcacacactctcaattcattcaggtatttctttactgagaagtcactgatatggtttggatttgtgtccctgcccaaatctcatgttgaattgtaatccccagtgttgaggaaggggcctggtgggaggtgattagatcatgggggtggattttcccctttccattctcgtgacagtgagtgagttctcatgagatctggttgtttataagtgtgtctcacctcccgcttcaccctcttcctccttctctggctatgtaagaagttcctgcttccccttcgccttccaccacaattgtaagtttcctgaggcctcctcagccgtgttccctgtacagcctgcagaacctcttttctttataaattactgagtttcaggtagttctttagagcaatgtgagaacaaactaatatagaaaattggtaacagagaagtacagcattgctataaagatacctaaaactgtaaaagcaactttggaaccaggtaatggacagaggttggaacagtttggagggctcagaagaagacaggaagataaggaaaggtttagagcttcctagagacttgttaaattgttttggagggctcagaagaagacacgaagatgaggaaagatttggaacctcctagagacttgttaaattgttgtgaccaaaatgctgatagtgatatggacaatgaagtccaggctaaggtggtctcagatggagatgaggaacttattgagaactggagtaaaggtcacttttgctatgcgtttgcaaagaggttggagtcactgtgcccttgccttaggggactgtggaactttgaccttcagagtgatggatttagggtatctaatggaagaaatttctaagcagcaaagcattcaagatgtagcctggcagcttctaacagcatttgctcatatgcatgagcaaaggaatgatctgaaactggaacttatatttaaaagggaggcagagcataaaactttggaaaatttgcagcctgaccctgtgtagaaaagaaaaacccatttttcaggagaggaattaaagctggctgcagaaatttgcataagtaaagaggagccaaatgttaacagccaagacaatggggaaaatgcttcaaaggcatttcagagacctttgtgacagccccttctatcgcaagcctggaggactaggagggaagaatggtttcgtaggccaggcccaggacccagcttccttgtgcaacctcaggacactgctccctgtttcccagccactccagctccagctgcggctgaaagggtcccagatatgtcttaggatgctgctccagagggtgcaaaccataagccttggtggcttccatgtcatgataagcctgcaggtgcacagaggcaagagttgaggcttggaagcctttgtctagatttcagaggatgtatggaaactattccatgtccaggcagaagtctactgcaggggctgcgccctcatgaggaacctctactaggacagtgctaaggggaaatgtgaggttggagcccccacactgagtccctactgcagcactgcctagtggagctgtgagaagacagccactatcctccagaccccagaatggtagatccattgacagtttgcactgtgaacctggaaaagccacaggcactcaacaccagcccttgagagcagccatgggaactaaactttgctgagccataggggcaaagctgcccaaggccttgggagctcaccccatgcatcagtatggtctaaatgtaagacatggagttaaatgagattattttggatctttaagatttaataactgccccgctgggtttcagacttgtacagggcctgtaactcctccctttggctgatttctcccctttggaacagatgtat

SEQ ID NO: 1884525 - DNA, 4001 bp, Homo sapiens
tattaatcagaattcctaacccctagagactttagaatatagaagaacaacaatctaaactgattaaaatcaatagtaagaaatcactttcgaagaaaatagcaaacttctatgaccgtacctgccttcttccccacagtcatgcagttagactatgaagtcaaacagtcatgatgctggtgacaggccgccactcagacttcccttagacgtgatgcctgcattcgtggagcacccactatgtgttagagcctgcactggtgctttctgtttgtcatttaatccacactgcatcgggtagctacttatacccattttccagatgaggaaattgaggttcaagatgacaagccaggtaatgagaactagcatgcaaatcaggctctaactggctcgctaaatctctttccaactgacctctgctatgtccccaaaatagcagaatagacctgttgatgaagaatacataagttacaattgcttatggttctctctccaccctttcaaaggttataatatcagtattattgaggtagcagaacttttgatacacaaatcccaaattaattatacatctgaagtgttgaaggaccacccaaatctagactacagcaatgaccactgtgttctcacttctaaaattcctagccagtgacctcctcaacaatgacatttttcactgattggggccatggaacaagatatttatatttaatagatacccgctgcctatcgcatgctctgttttgtagtaagcactcattcaactaactgattcattcatttacccaaaaagaaagcattagacacctactatactcaaggttgcagggaatacaagacttgagcacatcaaaaacctactattgagcaggagagaagaagtgtgcacctaaagagctataaaattaaaattattttataattataaaagttggaagtcataaatgccacagaagaaagtaagaaatggaatgtaagaattactaagaggggctgggtgcggtggctcacgcctgtaattgcagcactttgggaggccaaggcaggcagatcacctgaggttaggagttcgagaccagcctgaccaacatggagaaaccccacctctactaaaaatacaaaatcagccaggcttggtggtgcatgcctgcaatcccagctactcaggaggctgaggcaggagaattgcttgaatctcggaagcagaggttgcagtgagccaagatcgcaccatcacactccagcctaggcaacaagagcgaaactccatttcaaaaaaaaaagaatttctaaggagggggaaatttattccaggggaagcatcatggaatgctgcatggaataatttccacccaggctgctttgcaggttgggtatgatgcagacctctattccaaatgaaacgctgagctaaatggaggcatgaaagcaaatggtcatggagaggaggatataagggtgggaaaagctttaagtgccagactatagaacttggacttaactttatacacaaggagaagccaacatcatccgtttttgagcaagggagtgacatgagatgagtaatgcttcaggtaggttaacctggcagccctatgtagaaagagatgggaaagaaaagtaataagaaaatccaatttggaagctattggaaatttttaggcatccatttgggaatcaaagagttgggtctatcttcactaattccaaaatatattcttcttctaataagaaatattatgaagggctgggcaaacttaaagtaaataaatctatttagtctcttgactatttgctgaaggcagagacaactcaagtcatccatctctggctttggaaaacagcagatggtatttttggcagcagatccactgtcctagttatatgttttgctaaggctaatgctgtactttgtttgcatttcttctgcctgcaccattggagcaaggggcaagcaatcctaaaatgtaacaagcaatacagagagctaccctgggcttcaaattttaacactcagatactccagacacaaacacaataaagtaggttatactcttcagtcccttattctgatagtattttttgaggcctgagcactttgtcaataattctgaccagtttccttcaaatcttcaaaaccccaaagacaacaagcaagataaaagcaaggagtagaatccgatcatgagtggctatgtatacaaagctggagaattcctgatactggttacagatttctggaaaacttcttcgtaagaaaaataaaacaatctttttgaaaactgtgttatttgcagacctgcctttttgatgtgctcttttccataatatgaataatggaaaaaaaatgttgcaggaaatgaagtgactcatagaattttctgcatggattgaatttctgcaactttcggtaagcaaatcagcaacagaacgaatggcatttgcatttcagcaacacccaatccacttataagggtgcatgacagtgattatagtggaggtgggaaacccattctttcctaaagagtctaattttatcttcccaattccactttacatctttcagcataaacctctggctgggtggaaatccatttctattcggatagaaactaatttttcaggtatgtaagtgaaaaataatacaggactgtcttctccaatgctattcttagccttttgtaaatccaggtgaccaggatagacaaccagatcctgcaaagggagttcgtcaaagccctgcctatgatgactgctcccagagcagggggtctaaactatggtttggaagcatttgatttaatactattaaaaggtctgtctcagagcaaaaaagggagtttcctgggaagcactgccaagataaggaaattaactcttcaggaaagttccaggaagagaaaggtagaagtagccacagatatgagttggggaaaggatggacatttcagcagtatgaaatccatttcactggataccaggaaaccaggataaaagtgaaggtgtgtacttacttgggccttgatctcagagtgttggagaagagagaaaaaaatacaaaggagggagatatctagccgtgtctccatgtggagacaaaggaaggtaagagaatggtcaattaaagggaataaaaagacgatatatattattttcataaccaaagctgtaggagactgctataatctccacagttgtaatgctgctgtaaaaacatgtttttaaaaataaggcctcagtggaaatcgaaatccaagctggaaagcctacaaggaaaacaaggcagtacttcttccctgaacagcacagtttcctgtgaatacacagtgaataagagcggattcatttcttaagaagacaaaacaaagacctcagttctcttgaatatgcttattaatatttagccagttaaacatgggcctttcccagttgcaacttgccagcccataaatatttactaggaattgacacaggcacatacagagacagataaaaaatatatatattcattctttctcaccccataggactggaacacccaaagaattgcctgtgtatcgacaaacccaatcttgcaataggagcatttaaagttacatttcttgaccccaacaaactcctgggagaaaggatccctctccccagattctaaattcctccttatattttctcaagccttgaagaggtcccaacaccaaataggaatgctaccgtcttccatgaaccctggagttgggatggaggaggctttccttgaggtacaactgcactctcatcaaagcacaatctgtatctaatccacattttcaggcctcaggtgcacattcaaatggctttttgaaaaaatataggattttacccaatttgtttacccattctgcctggtttgcgtccccaagtgttctttacaaatgacaaataatatgccctcctcacataaaaatggccctaatgataactaccatttattgggtattctccatgtgccggagccttta

SEQ ID NO: 1884526 - DNA, 4001 bp, Homo sapiens
tgccttgcagtcccagcccctgagatcccactgctggggcggcgggagggggatgggctgcaaggccccagggctggccttgcttcggctgctataggccctcggagtgctttctggatgagtaagccgcacccctctgaagcctcagtttccccatctgcacactcagaatgtagccactcagaccaagcgttcactccatgccagtctttgccaagctatttatttatttatttgagacagagtctcgctctgttgcccagactgtagtgcagtgacacaatctcggctcactggaacctccgccctccaggttcaagagattctcccacctcagcctcctgagtagctgggattacaggcacctgccactgcccccggctaatttttgtatttttagtagagaagaggctttcaccatgttggccaggctggtcttgaactcctgacctcaggtgatccacccgccccagcctcccaaagtcctgggattacaagcatgaaccaccgcgccctgcctttgccaagctttttaaaccaaggctcttgtttcatcccccggagctgtgaggcaggtccctggagcctcccatttcacagacggaaaccgaggctcacaggggccaagtgcattgtccaagggctgctccctgcctggggaggggcctgagtccttgcccctgtggggttcgggtgctgagggcccacaagacctgcgggcaccaggagggagctgggctgggctgcccttcccggggtctctctgaccccacaccacacaccagccactctggactcaaaggctcccaagagcaccagagcactgctcatggcccaagctcagcaagcacttaaagggaccgtcccgaaaagcggaactgggaccgggcgctgcaggaccagcaaggtcctccacttccctccagcccagccccgcccaaatcccagccctcagcatctttttgggggccactaaagaccttctgggagatggcagcccaggaccataaggcaatcgaagagggctttccacatgcgctgaggcagacagaaccaggccctggctgtggacgaggctgtattgatacttagaagagagggaagcgagcgggctggagaggctcggccagggggcagcccagcagggccccttccccagggttagactctctacagccggcccagcccccatcccctccccaacatctagggacctgaaaagaggttggaggggctgcatgggggtggggttgataggagattaggggattgagaaagccaggcctcctagccgtgtcccacccagcacggccccaccagtgccagacacaggcagacaagggaggagggagatgctgagcaggggtggcaggaggaaagcccctggccctttcttggggccaggcaagtcctatcctaactccatctgctaactgcctccaagctgcttgtgggttgtcggggaagggagtttgtggcagggagggcctctgagtcccctgtatcccccggcaggaggaggcaggcacatgggcccctgacctcagtgcttggagcagggccgctctggtggggcatttgtaggtcacagcatgaagggttccagcatacttcctgggttcccagtttccctgggagcagtggtatagacgcaggggcctctacacacaccacacgctcagggagagtggctgaggtgtccaggatactctgtccactggggcagggggtggcttctaagcccagtacccttcccagagtccccagtctccagctgctcatgggctgcagatgaggattcaaggttatgcaggggtcactctcctgctccatccctggcaggtgggacctcacctactgcttctttctgctccagagaagagcacgtccccctcatctcaaaagtgcctgtgctcctccttcctgagtggaacctacacttttgacagtttggtttctgaggcaaggctgcctcctcctcctgtcccaggtacctcccctcagaaaagcaatgggacttgggatagaaggatctagccaattcgttccagatgaatctagaaataatcctttagcctttctcttagacccagtcccaaccaaaatctgagcttcatcaccaccacccagcacccaccattcaccacccagcctccagcccccagcccccagcccccagcccccagcacccatgacccaccaccctgccccctacccgtggctctggcccattctcctgctgtcagcagtgcctgcttgaacagagggccacactgaacagatgcatgctgcaagcatttggaggctgcctcctctttaaatcacagacatttatccaccagggatcactcgggagccaatgaggccaccaccctgacctcccctgtccccatgggctctctcagtgctcaaagcacctttcactgggatgctgctctgtgaacatacattcgcaggtatgtgtcggggatgatgagaatgtgtcaatatgaagacagatccctgcccctgtagcccctgcttaggctctattgaggtgttcagcctcctgggccatggtggtctgctttatccttgggccatgagcttatgaaccatgtcttagttgcataagaaaggaaaaataaagattagaaaagaatcaattatggagaacagtatgaatgaatggaaagatgaatgaagaatgataggaagtaggaacaaatggatggatggatggatggataattgaatgatggatggatggataattgaatgatggatggatgggtggatggatggagggatgagtggatggataggtgcatggatcgatggacaggtgggtgaatggatgggcagatggatggggtggatgaatgaatgggttggatggactcatgtataaatagagtataactcatgcataaatagaaagaattatttagtaattgatgaatggatgaacaaatgagcagatgaacaaaaaatagatggatggacagaagaacatctgtatgtatatatggatgtttggatgaaagaacgaatggatgggtggatagataaatgcagatgtgatatttagaatatttaacaaagcatgtggtacaaatatgaatctactggaatgggtgctgattatatatattcctatattgaactgtgttgtacctgtgcatattggctgatcatcagcccaacagctaaatgagcaaatgtaccaaaacaaaagatgagtggatttatggatgaatggatgatggatgaatgggtgtataaatgggtaaatgaatgtattgatggaaggacacatgagatggaattatgtatgggtggatgattggatggctggaatatggacatataaatgattggaaagattaatagaaggatgtcaggagaagtagacatatggatggatatggataatagatgaatagatggatacgtgggtggatataacaagagatgagtagaaagatagatagataatgaatcaatagacaattgaatccgtgctgagtaaactattagaaagacggatgtgtgagtagacactactaaatcaggaattttgcactctcttccaggaacacttcctcccatttctctcatctcttttcaaataagaaaagaattacttctttccatgaggctttcatatataaagacccaaggaaagaattacttatttccatgaggctatcatacgtaaaatatcaatcccctccagaactccatatgcctttaccctgatttatattttctgtcatattttccatcatctgacctttatttatttatgtgtttgttcccacacttgaaacatgatcatcataagagcagggactttgttaatgctgaatccccagcaccttcaaagtgtctgaattcagtacagatttattgaataaatatatggaaggatggagagacagatggatagacagatggatgaatgaatggatggatggatagatgggtggatggatggatgggtggatggatagatgcat

SEQ ID NO: 1884527 - DNA, 4001 bp, Homo sapiens
aggttgcagtgaattatgatagcaccactgcactccagcctggacaacagagagagattctgtctcaaaaaaaaaaaaaaaaaaaaaacaacaacaaaatgaagaaataaaggataagacttacatttttggcttgagcaagtgggtggagagtcttgccatttactaaaatgaataggtaaactatgagaggagctggttgaagatactacaggggaaagaaaatcaagagttctgttctggcattgaaaacacatgaatataaagatatgaacaacagacattgaggaccacaagaaggaggagggagtgagggcagcaagggcaggtagaaagttggatatgtgtatctaaaggtcaaaggagagattgatctggatatataaatttagacaacatcagcatgcagatgatatcttgggccatgaaaataaatcatttaggaagagagtgcagacagaataagcactgtaaaaaaaaaaaaaaagcaatatgtagacattggtacaggaagagcacctataaaagagactgggatgaaattgtcagagatctagagaaaggaagaaaaccaaaggtggactgtcaaataaaggagtggccactgggatacaactcaagtgagaaactgagcaaaatgagagtataaattgtccattggacttggcaacctggagattgttggtaaccttgacacaagaagtttgggtgaagtgttaaagtcagagacccaactcgagagtctgaaaactaattaaaggcttaaaccatggaacaagtatgtaaacagctattttgagatgttaaactgtgaagcgatgcagagaaatgggcagtagctgaagagggatgaaggaatcaaaaaaggacttttaggcttaagggaatgtcaatcgtgtttgtgaactgaagagactagccctagagaagagggtaggattggtaatttaggatgaataggagatagccagaggagtaaaaccttgagaaggtaagaaaggacaggatctagaactccaggagtatccagctccaggaactggggtgggaacagcatattttcacctttataccagaaggaccagaagcagaagacccaaatgaactcagatgtaagctaggggcatttatggctgatggttctaatttttttaattaaatacaattgaaacaggataattagatcagagtgaagggtgcaggaatggagtagggaatttgagaagataggcaaaggtaggaaatagcatcctaaatgatggaaaagcaagtttattaactacagtttgaataccaagtggtgggttgagattatgcatttaaaaagaagcttctcagtttgtgtgattttctccagcaacatacagttgctcaaattctggcaggtaatgggttgagtacattcagcttggagttttgccaagtgagtatgacagctatagagagagacacagaatgactgaacaagtgatgaaaactgtggaccatataaagaatgctcgacagaaggaacatgttgacaaaagggcaggttctcactcgatttccagtctctggatctgggcttcccttcccttccatctccccacaaccacacacactgcatttggatacatgtatgcctctctctattctaactggaggttggaagagagatttaatcagctcccagcccagcttctggagtgaagtcttggtctcctctgacttacagatgcagattcagcatacagtactgagcacctctgaacccatccccgtgcccagattgaaacttcatgtggtaccctggttcaaagaacagggctatcatcacctagaacccctttctcagacctatgcttccataaagtagagaccctcaaactagtggctagagttctcctgcctgccaccaaccttctcacatcagggcctccccaccatggtcctttttctgcctctcatgtcaccagctctctctaaaggagaaaacactgtaacatgattggtcagaacccaaacaatcaatggaccatattttactaataggcttgatcagttttgtaggtggtgttttgtttcctatttgaccattgttccttgtgggcaccttccttagagaataatctagtgggaagaagggttggcatctaggcaggcctgtgttcctggccatcatgtcattatagcagaacccaaagctcactttgactcctcaaccacccaacaacctaccaggattcctggttaaatgcaccgtaaattccccatgaattagccctaccctcttaatgatatccccaaaccttcattttgacacccactacaacattacttattataaatcgagttgggtccccaaaaaagatatgttgaagtcctaacccccaatacctcagaatgtgaccttatttggaaattgggtcattgcagatgtaatttcttaaaacaagtcatactggagtagggtaggcccttagtccaatatggttggtgtccttgtgagaagagaagagctgcagagactcaggtacacaagggaagaataccatgtgacaaccgaggcagagactgaggtatgcagctccaagccaaggaatgccaaggattgctggcaaagcaccagaagctaggaagaggcaaagaaagattctctcctacaggatcagaaggaacatgatcctgctatcacctcaattttggatttctgcctccagaactatgagacagtaaatatctgttggtttaagtcaccgagtttgtgttgtgttccaggaagggtctacatgacatgtggccatgacatctatccagctcaggaaacacggagtgctccagccagcccaggaggaaagcacctgtttccttactagcagcgcaagaaagaattctgaaagagagcaagaacggctcacattgagccatctgcatagtgacccagggaagccagggcccctgggtgccatgtctctgcacactagagcagagaccacactcctcaggccacccagcatgtcaagatgtgtgagggcgagatgccaggaccctagagggactaaactgtcagcaaaatgaaagaaagtctgtttaacttcctctcaaaaatgaatgactaagccaggtccagtggtgcccacctgtaatctcagctactcagcaggctgaggcaggaagatctggagcccaggagttcaaggctgcagtgagctatgatcacaccattgcactccagcctgggcaacagagtgagaccctgtctctaaaaaaatagaaataaataaaaagaaaaatcaaaattatcttctttaaaaaactatttactatcagagacagaataaatttttagaagcctgcttgatgtttgaatatcatgaaagattcttggtctctgtaaggtagactaaaagaatcacaaataaagactcagctgagttaaaaattggaaaacaaagggaactggatgaaatttaaaagacataaagttacaatggaataaaaataaagtagcaaaacattttaaatagccctaaaggacaataaatgacaatgattagcaaaattgaccctccaaaaaatatcatctgcaatatagagagcacatttaggaaaatctccaagattagtgatgaaagaaaacaggagctgagaaggatgagcgaggaggcgataaccatggaaacagatattgaacatcaaatcacaaaaagtactcagaaagcaagaagcacatcctgatctagcatctaagggattagtccaatgtacaaggccactcttaggccagaggggtccctgccctggctcccagattttagagagtcctgctttggcccttccaggccatgcccctctccatgaagcaaagtcatggagccaacacgatgagcccatcccattgtcccttcccccacaccctccattcaaactatactctaggtatcctggattaaattctttgcccaaacagtttgagtctgcttcccagacttgtgatggcctcttccctggacttatccttc

SEQ ID NO: 1884528 - DNA, 4001 bp, Homo sapiens
aactcctggtgttttggtaacacttacaacgtccgtcctctttcttatccatatccaggcttaagtgttcaacacagtcatggtaatgatttgaccaccacctctaaaatacctaaaatgcccttattttcaggtgatctaaaaggatgataaagactggaggttgcacaaatgttctgcaaacagctggcactaaaatacaagaaggggcatcttgtagatttactcattcttaggactcacaggtgacacaaagtcttctcaggcttcaggacgtacagcgaactgtaaaaaactagctgttgacaccctttgtttcctagttaaaagagctaagcatctcatctccaaactttggatatggtaatacatcagggtacacttccagtgaaattgccatagattttacaattatctgctagcacaggtgatatactttcagctttcctatttgatatataaatcaaagatctagctcaacttggatatcaaagacccaatttaacctttcaaatataacacatgggcctattcacccacctaatccatctctcaacttatttctatggaaatagccaaagaattataagtaccaaggacaatttgaatttacttgagaaatgatagtttattcaataaatggtgctatgacagttggttaaccagtattcaaataaaaagcatttaatccctacctcataccataaaacaacaaattccaaataaacttaaaataagatcatttaatagaagtttaaagaaaagttaatatgtattaatgtagcctaaatgaaagcttttctaggcttttaaggaaaagaaaaaattataaataaaaattgaaaagtaaattatgaaaagaatataagggtgagccaaaaataacataagtaaattttaagccaaatactagcttaaaccaacctaataaccaacctataacaataacacatacacacacacacacacacacacacacacacacacacactgagagagagagcgagagagagaaatgtttcctaatatatgacaaaactgaatatctgctaacataaacaaaaatatgtccccaataaaagcatataagacagcaagaaaagttgagcaaagataaaaaaaatacaaaccgtcaataagtacattaagatgcccaaatctattgctactaaacgagggcaatttaaagcagcactgaaaatatttttatttaacatattaacatgacattaagtggaataaacgcagcataaaagtgaaactactctgtgttattatatttttaaaatgttaagattatgatctcaaagtaataataataatggtcatttaaaattttaacacagttttgcatttttaaattaaaaggtattttaataataaagcatatgttataatacaagttttcatacaggtcataatctgttttcacaagacaaactgcatgatttttggtgatcttgacagtcactaaaactcagatccatatcaaattgataatttgataagccactaattagcacatgctctgtgtagggccctgaggtaagaaaagccttagtctacctgtacacagagctgatgttttctgtcacagaatattgaggtattttatgtatcatcacaattttaatatattatctcatttaataaatcaacagctctgctaggaaggtgttattgacagcaccatatagaagataactagaaatgaaatgtacttcacttacagaaacccaagggaaatgagtagactaagtctttggcactacctctagctagaaaatgcttttatttggcttccaacagcttacttactagtcctgagcccctctgggtgaatttacgtctagtatttatgtttgagccaggtggttatctttaagttacattagcataggccatattggttcagaagtagtccagctcccactgctttgaaaaaaggtttttgatcacctcatgtctctgctgatttagctggccctcttctaaactcatagaaaacactggggttttttttttgtaccccagcatatatgacatcatcttactatttttggaatattttgtggggtttttgtattaataaaatttacttaattgtaattgtatagaatgtaatttgtgacctggttgttgaacaaacttctaacaaaatttcctgaaattttaaaaagcagctctgatgagttagtacaaaatcagctctatcacaaaactttgtaactcatataaccaaaagctctttagggttccctcaattattatttttagttacatttttgaaagcgatatatagtatttgtacacatttatggagtacatgtgatattctgatacatgcatggaatgtgtaatgatcaagtcaggtattcaggatatccataatctcaaacatttattatttctttacattcaaaacatttcaaatcttctcttctactttaaaacagaatatatattgctgttaactgtagtcattctattgttctatcaaacactagaactgcttcttctatctaactctacataaataaccattaaccaacctctctgcatacttcactttctacattctttccgttctttgataagtatcgttctattctttctcatttgtgtgtgtgctttaccactaagttttaaagtaccacactttaatgtgttttcatgatggtaggagtcacccttttattttcagatgtatgactctcttgagcattgttttgtggggccagtctagaggtgataaattctttcaatttttcctagtcttgaaaagattccatttcttcatgatttttgaaaggtagtttttctgggtatggtattcttgcttgacatttccctttcagcattttgaatatattatcccattctcacctccgctgtgaggtttctgctgagaaatctgccattggtttgatggggattcctttatatgtgacttcatgcctttcattttctgtctttagatttctctctttgtctctgacttttgaaagtttgatgataatgtgcctgggagaataccttttttggttgtatttacttggggatccttaagctctttgcatttggatatctaactctcttgtaagggttgcaaagttttcagggctttattattattattattattattattattattattattaaataggctttctatgacatctcccatctgtaatccttttagcacaatcccaaaaataaaatattgcgttacttgaccgtgttcctttgtcacttaggctttcttcattattttttattcttttttttctttttgtttaagttcagaaatttttttccctgcttgatttgatctattgttgaagctctggattgcattttttatttcatttatgaattagttcaagcatttctgtttggttcttttttatgttatgtaacttgttgaatttatatttcagatcctaaattgtttttaaattttcttttgttgtttatctgtattctcttgtatctcactaagcttctttaatatcattatttgaattctttttcagccatctcatagaggctgattttttcaggtatttcataaacctttgttggaatctgttgctgaagaactattgtggtcatttggaggcctcacattttcttccttttttatgtttttcatgccctcagtttatatgtgcatatttggcataactgttgcttctttccaattattttgtatgagcttttgtaggaaaagcctttttcctgaagatatatctatagtattgcttgattaaggtattttagctttgattttgggtgagtacagcagtgtagtgtctttgtatgagttctttggctgtaatcagcatcagtggtgtctgtgagttcctcagtggcttaggctgtagttgttaatggagtatgtggtgaggctttgctggggatgggtaaaacccagtggtgatggtggcgggccaaacatgcctgtccttgggtccacaggtggcatacatgagtac

SEQ ID NO: 1884529 - DNA, 4001 bp, Homo sapiens
ccttcaggctaggaagtcatcatcactctgcgagatggaaccacgaaacagggagtgagtgagtcaccagagataatgagctccgaggcaggaagatgcaggagtctaatgacgttcttttcctgtcctgatgagatctcttgtccataggccagtagagcacccaagcccagagcaatgggtaagggggtctgacttcaacctggggcagccgctccttggaaggaaccaggcagcaactgtgattccagcatcccagcccagcccagatgcacggtggctgaaaaccacgcctcaagctccgggggaactccctggctattcttggaaacacagagactcctggctccctgtcagagctgctccccactctaaaaagcccaggagtcactgctacaatatttttccttctgaaggaggtggcatctcagtaattgcaacgtgatgctctcttgacagcagtattaatcacctgtcttcatctcagccccagccatgagagaggaacaggaggaagacagagccagagggcctggtgttgttcactgtcctcatccaagggcacgggtacagcagtctattctgtctcttcctcaagctcattgtcacttccgagaggggactggggtcaggcctcattcgggttccctagagtggaaaggattggtaaggagctgggtagctctccttggccacctctaaaggagctgcaccacactgggcctgcgaagaggagaccaggcccacagacccaggcaggatggaggagatgggaggggtcagcagggggccaaattcaagagtttcttctcaaccctacctttagcctgccttcctgaccatcctgcacatgcccaccaagtccacctcccaaagccatggcttcaggctcatgtcaccgcctcgctcaaaatatcttctatgactcccctgaagggaaaagtccagattctttagctctctgtctttgatcttcccacattacctgctggcccctcctgtggacaggctagactgcagctggcgttgatctagtctgtgacttttgtacccctcgcttcccctcatcctcctttgaatgctgccatttctccacctgcctccccattcccaactgtccaaatccttccaactcttcaaagggaaaagcccacctcctagaatagccttccctgaaccctctgagctcatcaagacttcttcctgctgtgctcccatagagtctgatatgggaggctctgccaaggtaatattgtaaagttgaggcatgtcccagacccctgggggaggagggaaactgagatgccctgggaaattgggcaggtgagacaggaaggccttggcattcatgacgtttggacatgtcaagcacctgtgctacacaagtgagttgggaactgtaggcgtccttccaacatgagcagatcatgtgagccaagggcaggcttggaaaagcataatgctgcttccccctgagcacatgccatcataggtgcacagtaaaacttctagatgaataaatgctgggctagcagagtgacggccataacacggagctgctcccaccaagacggtgtcagccatgggaggactgttagccagttaagctgtgattttaagctggagtaacagttgaagagagtgcagaaatggtctgaatacctagcaagtggatatactcagacaagccggatgggtcttccaagaattggagccagagagagactaccagagaagcgaaaattcaccccaaagtcagagcaaaatggctgagagccaagaaagaaatcagggggcggtgtttagtgagcagttgtgggtagaactgattgctccctgagctaccgttcagattagcaccagccctgctgttccacttgtctcgctgtgcagttcatatctcttccattttgtatgcacttattcccagcatccagagctgcacctgccaccctccacgaatgcaatgttcacaagtgaagtagtgggaggtggctggtaaactggagagaatgggatccttagtctattgttgccatttgagaatggaaacaatatttcaaaagaagacagaaattggaacttttatttgaaatctccctatcatgaaatcccggcaactaactcatcacactagctgagccaaagcacttccagcttgcatcctctactcacaccatctaaaacaccaatgccaaacaagcaaccagagctaacaacattgttgtgctttttgaaggcctcgaaacagccctctgaccaagcagggcagggttattactccctctttaggagttgaagaagctggcccagagaggcttctctatttgcacaagattactcagctagttagtagcaaaggcaggatcagaactcacatctcaacattctgcctcaaaggctcctctcccaaaccccaccttgtctccacagcctaatggacagcagagccaaagcagttaataaaatagtctgagaccaacagtgttggctaggtgatcatggtatccttagcagagaaatagataggcagtctactacattctcactcaatctctttaagtagaagagttctatatcaagtgatcagaagtctaactttcttcaccaaaacagagagttatggcccctgattaattcccagatttgagccaattgacagatgcagaacccgtaaatgaaggagagatttggtcctcttgaggaagacccctgccaaaaatttacattgttaatatttctcccagctttctccaaacggaccactccttaccagggtaactatgcattgggaaaataaaatagacttttggaggattactagattaggtgagggctctgaccaggctctaatgacactaattcctggagacccaaaacatcactgtagcccccagtcaaaggtgggacttctggaggtcaggcaatcaatggagatttagctcagttccttctcacagtgggtccagtgggtctgtgaacccaccctgtagttacctctctggttccagaacacataattggaataggcatattcagcaacttgcagaatcgccactgcacaggactggctagattcttttaagctgttaagaatatgtatccaaaacttgttaataaggcagcaagcccacctcaggctttgattctccaggagaatctgttttgtttgtttactatttaccatccacaaagggcctaaacctatgagatagatgctaacagttagaaaagatggtaacatgtgagtgatttccatccagtagagaagattgtccaaagccttatgattttgttgccctgtgagacattaagttttgcatctaatttagcaatcttattccagatttcttccacgtatatatgtatatatataatttttcctgtatcctcttttatttattatttatttatttattttgagatggaatcttgctctgtcacccaggctggagtgcagtggcacaatcttggctcactgctacctctgcttccgggttcaagtgattctcctgcctcagcctcccaagtaactgggattacaggcacctgctaccacgcccggctaattttgtatttttagtagagatggggttttaccatgtcggccaggctggtctcaaactcctgaccttaagtgatccactggcctcagcctcccaaagtgctgggattataggcctgtatcctctcttaaacccagctttgtcattctgctagttgtctcattcatgagttaaatgaatctttgacatgtaattgtttgagaaacagatttttaatcttttgaaaaatattactttaacagtgtacatgactcaaaaaaataaacattcacaggaaaattccatagctgggatggattaggaagctgagtgagctccattgtcccatttcttctcccctcctctggccccctccagcccaacacattcaactcacaccccagcctgcctgccagcagcccaagaggcctgcaggaaagcctgcacgcttcttct

SEQ ID NO: 1884530 - DNA, 4001 bp, Homo sapiens
attcgcccccctcggcctcccaaagtgctgggattacaggcgtgagccaccgcacccggccccagcctctactctctacttctataattaacattttttagctcccacacatgagtgagaacatgtgatatttgtctttctgtgcctagcttatttcacttaacataatgacctccagttccatttatattgctgcaaatgacaggatttcattcttttttatgactgaatagtattccattgtgtgtatatatcacattttcttaatccactgatggacacttaggttgattccacatcttggccactgtgaatagtgctgtaataaacaggggatgaaggtatgactttgatacactgatttcctttcctttggataaatatccaaaagagggattgctggatcatatagtagttctatttttagtcttttgagaaacctccatgctgttttccataatagctgtactaatttacattcccaccaacagtgtataacagttcccttttttctgcatcttcactagcacttgttattttttgtctttttgataaatagtgattctaactggggtaagatgatatctgattttggttttgatatctggttttgatttgcattttactgatgataagtgatgttgagtattttttcatatacctgttggccattatgtcttcttttgagaaaagtggttacacatccattgcccaatttttaataagattacatggtattttgctattgagttgtttgagttccgtgtatattccgtatattagtcccttgttgcatgaataatttgcaagtattttcttccattctgtaggtcatctgttaactcttttgtttcctttgctgcatagagtttttaatttaatgtagtcctatttgtctgttttttgttttgttgcctgtggccttaaagcctcagccataaaaatctcccttgaccaatgtccagaagcatttcccctatgttttcttgtactagttctatagtgtgggtgtttgtttgttgttgttgttgttgttttctttttttttttttcgagacagggtatcactctgtcacccaggctggagtgcagtggcacagtcacagctcactgcagccttggcctccccaggctcaggtgatcctcccacctgagtttttgtatttttagtaagatggggtttcgctatgttgcccagactggtctcgaactcctgggctcaagggatccacccgcctcagcctcccaaagtgctaagattacaggtgtgagccactgtgcccagccataatattgggtttatttttaaagtctttaatcattttgagccgacttttatatatggtgagagatagggatctagtttcattctttggcaggtggatattcagttttcccagcagcatttattgaagagggtgtcctttccccaatgtaaattcttagcacctttgtaaattggttggctataagtacattatttctgggatgtctgttctgttccattggtctgtgtgtctgtatttgtgacaataccatgctgttttggttactaaagtcaggtagtgtattacctccagctttattatttttgctcagaattgctttggctattcagggacttttgtggttccatacaaattttaggatttttttttctatttctgtgaagaatgtcattgattttgatagcaattgcacatggattcgtttttgtcctcttcaatttctttcatcagtgttttgtagttttccttgtagagatctttcacttccttggttaaatttattcctggggttggggttttttgtttttttgttttttgggtggtttttgtttgtttgtttgtttttgtcttgttttggtttggtttgggtagctattttaaataggattacttttttttttttttttttttttgagacagaatttcactcttgttgcccaggctggaatgcgatggcgcgatctcggctcacgtcaagctccgcctcctgggttcaaccgattgttcggcctcagtctctcaagtagctgggattacaggcatgagccactgagcctggcccattatgccttgatatatgttttctgtcctcttctatgatttcaattacatgaatattaaatcacttgatattatcctacatgtcatatgcaaagctcattccacacatttttatctggccttattttttatctcagtctcagtttgatgagttattattagtgtctattaaaacctatggatatttcctctatagtgtataaactactgttaaggccatcttgtgaatttttatttcaaatgttatatttttagctctataagttctatgtggttcttcttttatcttctagttcattcctatttatcttcatgtttttctttaaacctctaagtatatttataacagcaattttaaagttcttgtctactcattccatcatctctgtcatttcattctttttattgactgatttttgtcttggctcatgtttttctgcttttcaaatacctactaagtttttactgaatctagacatagtgactgtttggttattaagtttctagattctattttcttcttataaagactattgagttttgttttggctgccaggtcagttacttgcagatcagtttgatcatttcgaagcttgcttttaagctttgtttgggttaatgtagagataaattagaaattagccctatactaatgccgtgggtatacaccaagttctctcaactctggctggatagagttgtaatatctttttttttgtttttttgttttgttttgtttttgagacaaagtctcactctgtcgcacaggcttgagtgcagtggtaatgatctctgctcagtgcaacctctgcctcctgggttcaagcagttcccctgcctcagcttcccaagtagctgggattacaggtgcccgccaccaaaaccagctaattttttttgtatttttagtagagacggggtttcaccatgttggccaggctggtctcgaactcctgacctcaagtgatctgcccgcctcggcctcccaaagtgctgggattacaagcatgagccaccacagagttttaatgtctttcaaccctgtacaagctctaggaatttttcagttcatagctctactgtagatattcttttcttagtagttattgtttgcctctcctcctggagttccacctgacatcatttcaacttattatagatttttatctatttagtatattatcaattccagttgtcattttaagttccatattatctaaaactgggagtccattcaactgacttctgtgtacttttgacattacccccgttagtccttgaatactttcttcctagtaaaacaagctatcacagtgttcaccttatatttttcctgcccagacttagaattagctgtttctccaagaagctctgattctcttaatagaaaatggtatttagacactaaggcctgggctgtgaaggtgcttattgttctaagtgtcattttcttttttatcttttctttgttgttagagctagggataactttttttaagtcatgagttcatgttgatatttccaattaacatggacaattagagggattttacttatttttagagacagggtctcaatatatttcccaggctagaatgcagtgactattcacaggcacaatcatagtgtactatagccttgaactcctggactcaaatgatcctcctgcctcagcctccaaaatagttgtgactacaactgcatgccactatgcccagccagagggattttattgaacttatttgatttctttgattttacatttatttatgttctttttgccttacaccaaaaagttttattcctaatcatattatctaatattttatttgctttatatatttaaaaaaattttttttgagacagtgtctctgtcacccaggctggagtgcagtggcactcattgcagcctccacctcccaggtttaagca

SEQ ID NO: 1884531 - DNA, 4001 bp, Homo sapiens
catttcataaaggggctactttgaaggagttaagatggaagacttccttcttgacaaattgtgtttttagtgaatttcttaaaccgttttatttagccctccttccctctttctagttggaagccaaatgtactcatgaaaacagccactcctattctgagtcttggtttcttcacctagaaagtgagggtttggactagatgagtggctttcagggtgttctgtgaatctcctcatgaatactttagggtaggggagggaagggagtgagtgatgctcaggggctgtcaaagtgactgcgttcatcagttttacactggggctgctacataatattttcatttgaacgaagaacttcaaaaagcacaggactagatgatctctgttccttttggctctaatatgctacaactgtaggccaattatcactttaccaattaagagttaggccagataagtgaaatttaacttaagggcacacagctaataagtaataggcctaaactggatttccttattccaaatcctgtcttttccccactattccattagaccccacaaatgttagttgtgtgtgtgtgtgtgtgtgtttttaatcactgtaaccggatgcatttttttaaggcaaaatttctcccttatctactatgatgacttcagaagatacaatggtcccaggggccaagtagaaagcatttttaaagattaatctgaattaagctttatcagtgtactctttatctgtgttactagtgcctggtatgtagtaggtgctcaataaatgcatattgaataactaagtgaatttcttttggcaactttttaaggacatgtgctcttagtacttaagaggctgctcaaggaccttcctatctatttctgtggtcaaattcagactacaggaggtctttttgaatcattatagttagaagaagaatccagtttctgcctgtgaacttatttgactttagattgtctcatcttgtgactttataatgcctgtcccctccactggtcaattcagcatatggaagtataaatgcagtctttttactaggcagatatatatgctatcttacagctaattatgaaattgaatgaaaatccattgttatcttagggattagttttgaaaagcccccgtttatatacatttgccctaacataggaagtattgtgtagtttctcattgtcattttatctgtatcaagtatctttttttaaattgttaaataaagtcagctaggactgtggctcaatagtttaaaactatttaaagataatcatatttaaagcaaatgttaaagatttttactcttaagattgggcaccatgaaaagctatcaataataatagctaatttatcttttactaagactccgacatgaatgacattcactaggaaaactcaaaattttcaaactgaagctcaccagacccagaagataaatcttcctttgttattttctctaacttctaccctgttatagttcatgagcaaagctatacatgttcctttccttttcccggggtattattttagtctgtccagctaacaccttgttgatatggactctagaataggattgcgctgttatccctagggtaacttgttccgttggtcaagttattggatcaattaaacgtggtaattcgctttgactggtgaagtctcggcatgtgttgctcggaggtcggattgtgctccgaggtcgccccaaccgaaatttttcacgcaggtttgatagtttagggcctgtggacttgttaagtgttgtttgcgttaatgaattaaagctccatagggtcttctcgtcttgttatactatgcccgcctcttcacgggcaggtcaatttcactggttgaaagtaagagacagctgaaccctcgtggagccattcatacaagtccctatttaaggaacaagtgattatgctacctttgcacagttagggtaccgcggccgttaaacgcatgtcactgggcaggcggtgcctctaatactgagaatgctagaggtgatgtttttggtaaacaggcggggtaagatttgccgagttccttttactttttttaacctttccttgtgggcatgcctgtgttgggttaacagtgggggtaataatggcttgttggttggttatagatattgggctgttaattgtcagtttaatattttggtctgatgtaggcttatgcggaggagaatgttttcatgttacttatactaacattagctcttctatagggtaatagattggtccaattgggtgcaaggagttcagttatgtgtttgggattttttagatgacaggtgtcgagcttgaacgctttcttaattggtggctgcttttaggcctactgtgggtattaaattttttactctctttacaaggttttttcctagtgtccaaagagctgttcctctttggactaacagttaaatttacagggggatttggagggttctgtgggtaaatttaaagttgaactaagattctgtcttggacaaccagctatcaccagactcggtaggtttgtcgcctctacctacgaatcttcccactattttgctacatagacgggtgtgctcttttagctgttcttaggtagctcgtctggtttcgggggtcttagctttggttctctttgcaaagttatttctagttaattcattatgcagaaggtacagggattagtccttgctgtattatgcttggttgcaatttttcatctttcccttgcggtactatatctattgcgccgatttacaatttctatcgcctatactttatttgggtaaatgatttggttaaagctgttcggtagtaaggtggaatgggtttggggctaggtttggctcagagcggtcaagttgagttgaaatctcctaagtgtaagttgggtgctttgtgttaagctacactctggttcgtccaagtgcactttccagtacacttaccatgttacgacttatctcctctatataaatgcgtaggggttttagttaagtgtcctttgaagtatacttgaggagggtgacgggcggtgtgtacgcgcttcagggccctgttcaactaagcactctactcttagtttactgctaaatccaccttcgacccttaaatttcatcagggttatcgtagttttctgaagtagaaaatgtagcccatttcttgccacctcatgggctacaccttgacctaacgtctttacgtgggtacttgcgcttactttgcggccttcgtcagggtttgctgaaggtggcggtatataggctgagcaagaggtggtgaggttgatcggggtttatcgattacagaacaggctcctctagagggatatgaagcaccgccaggtcctttgagttttaagctgtggctcgtagtgttctggcgagcagttttgttaatttaactgttgaagtttagggctaagcatagtggggtatctaatcccagtttgggtcttagttattctgtgttcagatgcattaaagccactttcgtagtttattttgtatcaactggagttttttacaactcacatgaattttagctttattgaggggaattgatctaaaacactctttatgccggtttctattgacttgggttaatcgtgtgaccgcggtggctggcacgaaattgaccaaccctggggttagtatggcttagttaaactttggtttattgctaaaggtttatcactgctgtctcccgtggaggtgtggctaggctaagcgttttgagctgcgttgctgcgtgcttgatacctgttccttttgatcgtggtgatttagagggtgactcactggggcggggatgcttgcatgtgtaatcctactaagagctaatagaaaggctaggaccaaacctatttgtttatggggtgatatgagcccgtcgaaacattttcagtgtattgctttggggaagtaagctacataaactgtatggggtgtctttggggtttggttggctcggggtatggggctag

SEQ ID NO: 1884532 - DNA, 4001 bp, Homo sapiens
aaagcagccccatgaaggaagcaaatagaacgctgatggaggctgaccacacatttggctttcgccagttagcaacacacggacgttggacaagctgcttaacttctctgagcctcagtttcctcatgtgataaataaagatatgcttagacccacgtcatagggctgtggtgataatccatgcacactatttaccaaacagtggcattattccggtcattcaggcttttacaaacatggattgagggctttcattgtgcaaggcacttcctggaacccagggattccttgaagtaaaagacaaattcctgctgtaagatactttaattccttagtgaacaaggaattagagtagagaagggggagctgtccttagaaatatataaccagcaccactcagcctaagacagccagatggaaggaccccaggacaccttcccaggccacagacacatccattccatccaatgctgtgtgtctgctatgcactgtgtactgaagagggaatgatgagaaaggctcagggttcccttctgaagcccacagactggtagagaagacagggagggaaacagatatatgttattcacgtgaaaaggaccatacagaattaggtttaagagctctctttgggagcagcagatctttgaaatttccaggcaccggaatgtgtaagttttacaacaagctaaatatatacaagttaatcatattcatgtatttgcataaattaataaacagcaattatatattatagcaatttctaagtaatatccccaaataactatctcaatataccaaaatagtaacaatggttatttctgggtggtggaattatgggtgatttgtatttctccccaaattctctacaattagtatgcattatttttgtaatagaaaaacaaacaaatgaaacatgagtaagaagcgagtggtttcaaaataccctgcagatgggaaatctgttcgcttgccttggattcagctgaaagcctctctatgacttcaagaaccatcaaaagtttgaagtagcttgaaaacaggtttttgcatcagaatgcggcaaggctgcccagtctctggccaagtgggtctgatcccttacctgtttattttgtggctgaggatcagaaaggagtatgctagcttggaatggagagtgtagacagaggaggacccattccacaaatggctgtgtgcaaagggcacttaggcctggatttgagcactttttctgccatacactagatgtgagatcttgggccagttatttcactcctttgagcctcagattcctcactctgtatgacttaaaaaagccatcctgaaccacccaggctcaactgggcatctattagagtccacaccgtaatctgctcagccctctgtgttacaatgggctacaacttaaaactagggaacacaccttgtccacagctgtgattcccttacctctcatagtgcctggtacagtgaccttcaatacacatttgctgaatgaatgagatgccaaagctcatgctaggtcctgtagctgcagagatgaacgacatggatccctggccatcgggagctcccactttagttggaactcagtctccccaacacaatatagatgatgaccaatgccttaaagggcttatgtgcaaagagaaactagaagaatggggaagaaaaggtgaatttccccaggggtgtctgaggaggtacttgcataggggggtagaatctgagcacagtctggaaaaatgagtagagcttctcctgcgggtacagagacaaggcaggcaaaggtgtggagtggagcaggaatgtgcacagcaaggaagaggcaagagcaaggctagggccaggcgtggagcaccgtggatgggtctgactggcattctggctgctgtaggagcccaggcttagaaggagagctgatgggctcctttctcattgcaatggcaagagcaagcatctaccgcctgtgctagatgccagcctcgcccagcatgcttccacctgcccatcaggagggcaaggcaataggaccagtttggggttaatcactgctaaatctagtctgctgctaagaacccctctaatttaaaccagcatctgtgagaagggccagctttggcaggggccttgaggaatgtggacatgattaacctctgccagttgcagcaaattaactgcaaaaagaacatcctggcagcaccccggatcttaagtgcagccaacccttgaagatgcaggctgattgctttgcctgggctggaagtgcaaagctgtgtctttactgggcacttcccattaggaagtataggggcaccagctaaactccatccctcctcagggccttcacctgtgctatttcctcggcaggaaaccccttcgcccaattgagtatggttggcctgttctgatctttcaagtcctgcttcaaatgttgtttcctttgtgatgtcttccctgactccccatctaaggtggctttgctattctccccacactcatcactttctgttccaccattctattttctacttttcaaagagtttattttcttgcatggttgttcatttcctttctctctacctaattctaactggacctatgctccacggtagcaggaaccttgtcttgctcacagctgtattcactatgtttggcacttaataggtgatcaacaaaaataaacgggatggaaggaaggaagtaaagaaggaaaaagagggggtttctaatacaatggctccaaaatgtccaccaaagcacttagccccactgccctgggaagatggctcattacccatgagcccacggaaaacctataggccagggccaggagtgttggagccccagggacaacacaggccaggaatctgatgctaaaggaagaataagggactaggaagggaattaacatttattgagcacctactgctcaatagtgccaggcctgtggttactgaatgaaacctctcattttacagatgaggggggctgtagctaataataaatcataataaacataaaatatctaacatttatttttgcacctgggctaatcacattgcatatattttcccaacaagtttgggaggtaagcatgattactgctcccattttgtaagcagtgggaaccaggaatgctcagtaacttgctcagttttatacaactagctagtggcaaagccaggatcagaactcaagtctttccaactcttgtccaacatcctcttttgacagaaaatgcccttcacactatcatgatggctggtttggccctgccttgcagccagctctccagggaagttgctggaaggagccctgccccaggccatggttctaggcagacttcagacaatccccagtcatccaccagctgctcagcaggccagtaaattagcctgccacccccaagtgctgaaagcacttgggccgcctgacacagcacccttgccaagagcctcccacagacacaggcaggtgaggagggatgggccttctagccctgcaaagcagccagctcagaaaccacccagggaggcctccctgacaggctgggtacaggggagggctcaggcagcactttctgtccaggagaagaaagcacagtcctcaggctctaccacctacctataagctggtgaccagataagtttcttaatctctctaagacctagctttcccatccataaggcttctgtgaagatgaagtgaaatggcagatgtcaggcactgcccgcggctggcacagggtagcagctcagtgaagctcagctgtaccaggtaaattctaaaatcagaacccgccaggaaatcctccttcccacctatatactcacgcatgccacagtcattgagtccatactatgtgcttggctgtgtgctgagcgctggagaaaacatcattaacaaaatggtcaaaatccctgacttcaaagaccttccagttcggagtgggtaaccaacaaaacaaatatgatagtatgtcagacaaggtgcca

SEQ ID NO: 1884533 - DNA, 4001 bp, Homo sapiens
tcctccttcagtgaaacctgaattttgtgatgatcagtcctttgctttttatttttctttctttctttttttctttttgagacagattctagctctgtcacccaggctgcagagcagtggcgcaatctcagctcactacaacccctgcctcccaggttcaagcgattctcctgcctcagcctcccgagaagctgggactataggcgcccaccatgcccagctaatttttgtgtttttagtagaaacagggtttcaccatgttggccaggctggtcttgaactcctgacctcaagtgattcgctggtctcggcctcccaaagtgctgggattacaggtgtgagccaccacgcctggcctttctttttttaaaattagagattttaattttaattttaaaatttttttaaaattgttgcccaggctggtctcaagcttccgggctcacatggtcctctggccccagtctcccaagaagctaggactacaggcacacaccaccacacctgactcttgcttttatttttttgataaagctttttctgacatatgtatgtatacctagacaatattccatttgaattggcttttttaaaaaaaaaactattttaaggttttacattatttagtgaatttaacaattgttttcctataggttctgcataattattaccaagtttacttctagatattttatatttgtggggatatatatatatatatatatatatatatatttttttttttttttttttttttttttttttgagacagagtctcactccgttgcccatgctggagtatagcacaatctccgctgaccacaacctcggccttctgggctcaaatgatcctcccacttcagcctcccaagtagctgggaccacaggcacaaaccaccatgctcggctaatttttttttggtattttttgtagagatggggttttgccatgttgcccaggctggtcttgaactcctggcctcccaaagtgctagggacacaggcttgggctaccatgcccagcctagagtcttttatgtgggtaatcataccatctcctaataacaaaggtattagaaacagggaaggaacattgttatttgtaaagatatggcttggcttggttttgaacttcatgagaagggtaaggacagctgtcctttggcgtcctggcggggatgggggggagttggttccaagaccccctgaggataccaaaatccacagatgctcaatccctgatataaaatggtgtggtattaaatatttgcatatttagcctaccacatcctcccatatactttaaatcatctctagattgccgaaaacaatgtaaatgctatgttaatcgctgttacatggtattgtttggggaacaatgacaagaaaaaaagtctgtacatgtttagtacagacacaaccatccatttttttctccaaatattttccatccgaggttggttgaatccatggatgtggaacccagggatacagagagccgcaagtatccatcttctgggactgactttttccactcaataccatggtgcaaagattccttcatgatattggtgaacctgtgggtcacctgcttgcattgctgaatgatctccaccctgtgaatgtgtctactgtaatttatttatccattctcttatcagtgggccctggggttatttcaggattttttttgctattagggacaacgtgaatatttttgtccctgtctcttggcgcacttgtcagagaacttatcttgatttgctgcctggggggatgtgtgggtgacagcctctgtacctccacttcgtgagataaggccagattgctctccctagggggctatttggagccgcatcctgactagccacatgcaggagggcctgctgctcccctccttgccagctctggctgaaggacagttcccttctgcccttcagccagctctggctgaaggacagttcccttctgcccttcagccagctctggctgaaggacagttcccttctgcccttcagatggtgtaaatagcatctcattgtggtctgaatttgcatcgccctcatcagcagtgaggctgagcctcccttagatggtatttgagcaaattcgttttctctgccctaacatgcctgcgctgcgtgtgtgttatctatttttttatattggattgcttgattttcttttccttgatttgcaagagttccttatgtatttttgaggctatgccccgctgcactccgcaggcatctccagttgtgacttccttttcactttctctgaggtgtctccgcttctctctcccccccccacacctgtcccagggaggccacttggcattgttagtgtggggggaggtcgtgtgcctctcagagccctgtttaaactgactccactgttcctcttgtccctggggccttaaggaacccctttcctcttccttctcagaccccctcccatttttggcgaagacaacttagtttggggagctcctattgggttgtgggcgagtatcccgggacaactcgggcctcactgcaatggtgtccccccccccccgtctcggttatttatcacttccggctgcccacctgggggggctgggccccctctccgctcgactgggccgcagccgggcagctcgggcgctcccctgggggcgggcggcgcgggggaggggccctaggggggcggggccgggggccgggcctgcggcgggggctggagttggggggcggaagctgccggagcagataagggccgaggtcggccctgcggtgggacagtgcgggacaccgcctccgcccccggcctccccagagcgcccccgcaccctggagaccccctcctgctacccaggcttggcatcccgggaggagaccccagggagcagtgggggatgaggctccagcctgctcacagcctcagcgacgagcggcagcggggcttcacgcctcagttatctcagctggaaaatgggggtaggagctcggttttccccacagggctgttggtgatggaccaagtgcaggcttgtgaaggtctctgtgggttgggcgagttttgaacagagggtcctctaagcatcgcatcgcctcattcatccccattgtatagatggcaaagtggggagtttcacccaaagccccagagccagcatgcaaaaagcaagtgggagggggttggaacgctttccaccgccccaccctggggacagatctaggttcccaggagcctgaagcttaaaaccatttgggggggcactctttaaggaaaagattacaaagtcacaaatacaaaattgctgagaggctgggcgcagtggctcacacctgtaatcccagcaccttgggaagccaaggtgggcggatcacttgacgtcaggagttccagaccagcctggccaacatggtgaaaccctgtctctactaaaatacacaaattagctggacgtgatggtgggcgcctgtaatcccagctactcgggagactgaggcaggagaatcgttgaacccgggaggcagaggttgcagtgagctgagatgatcgcaccactgcactccagtctgggtgacagagctaaactctgtctcaaaacaaaaaacaaaaacaaaacaaaacaaaacaaaacagccgttcgcggtggctcacacctgtaatctcaacactttgggaggccaaggtgggtggatcacctgaggtcaggagttcgagaccagcctggccaacgtggtgaaatcctgtctctactaaaaatacaaaacataaaataaaataattagccaggcgtggtggcgctctcctgtagtcccagctactcgggaggctgaggcagcaaaattacttgaacccgggaggcagaggttgcagtgagccgagattgtgtcactgcattccagcctgggcaatagagtgagacttcatcaaaaaaaaaaccaaaaaaataaaaaacaaaaacaaaattgctgagaccccttccagggcctcagaaggagctgagc

SEQ ID NO: 1884534 - DNA, 4001 bp, Homo sapiens
agggggagctctctcttcccagcaaggttccaggcacatgctgggaggctgggagaagagaacagaatagggtgggggtgaccccctgccttctgtgccccataccaatctcagggggccgaggagggaggtatgtacgatcagccctgatggaggggtgagggcagcttcggtgttggggcccccatctatttcccacttctgtcccgggcaccagccccactccaagcccctgctcctgggccaggccctcctcgcaagggcagtcctgccccacacaggcacgcagtccatcccagaggtagcggctcctgtcctagaaagggtgggcctaggagacccaaaccccagaaagagggagggtgttgggtgccctgcatccagactcagggagacgtgacaattctgtggccctcagagaccctggttccaggaggaagctggtgcctctgttatcagtggctccatcggggactggacccagcccagacttcttggtctgacaattgcccacagatcagccagggtatagtcagtcctcttactacctaggagtgtctgaagatgagccccagccctgcctgtgcccggcaactcgccaaaagtagccgttccattgacctaagtagggacccaccagtcccgcaggcctaaccagccaaagcttcctagagcccctcctctcagagtggctgaagcccatcagccagaacataggctcaggtgcccagtcctggagcggcttccagggcgcggaagctgcccccgggggcgcccagagcccgggaaccagcgccgcctatgagcaggtcttcctcctcctcatcctcaaaggcccgcgctgggcgccggggcggaggccggggcgtgggctcgtcgcgctccgccatgcgctcgacggcgccctcgcccacgaggaacacggtgtccgcgacgcgcgggggcccggtgacggggttgtggtcgtaggagaagacgcgcagcgcgcgcagcgggtgcaggtcggggaagccgcccaggcggttgcggtcgaggtcgaggatgtgcaggcggcccatgcgcagcagcgcgggcgggaactcctcgaagcggttgccgtagagccagaggccgcgcaagcccgtcatgcgcggcagctcggccggcagcgcgcgcagccggttgtcgcccatctggagcgactgcagcgccaccaggcgcagcagcggccgcgggaagcgccgcaagaagttgccctcgatccagaggcagcgcaggctctgcaactgcgcgaagtcggcgggcagcgccagcagccggttgccgcccagatagaggcgcgtgaggcgcggcaggcggcacaggccgtcaggcagtcgctcgagcttgttgaagtccagcgccaggatgcgcagctcgcgcagctcctcgatctcctccggcagctcgcgcagccccgtgccgctcacatacagcttctgcaggcggctcagcgcgcacactgcgctgggcagccgccgcaaccgccgcccgctcagctccagctgctggtcgccgctgcgcagctgctcctctgcgtccgacggcagctcatccggcgtggactcggcgatgcccatggtcacgggccccggccggggccgccgccactgccaccgccaggcatcgccccgccccggccgccccccagccgccccgacggtgccggagccgcgccggcccccgggccccccgccccggccttcccccgcgccgggaggggggccgtgcggggccgggaggaggcacccacttggggcaccgccgccgcgcgccgcgctccaccgcccgccctcgggcctcccccgttgcctccgccggaggccgactggctagggttcgcgctgactcgcagcttagcgacccgtcgccctggcaaccccgacgcgcgtgcggctgccaatgaggcggagggagggcggggcggggcggggccaaggcgccaccctagtggggtcccagcgccggagcccgccccctacctgcccatccagcccaccgcggagcaagcacaagccgagagattccccgccccggccaagcctggcactgagacccgacgcccgacgctgtttggtgtgcggttgtgtgcgccccagagccgcgggtccaagaaggcgaaggaaacgctggcggtggatcaaagactctggactagaggctcacaaggaggggctgaggggcgcggtcactgcgagccattcacgtccagcggcgtgcggccggcctacctgctgggatcacttcagtgtagtaactcgaaacagtgttactgtccggcccttttcacatctgctggttttaccgggccccagggcttggctccgccccgcctaattgccctacagcttcctcattgctacactcacacccctctctcctgccaggatccctccaccgacgctcaaagtctgtgtgtggctgcggtggacagaggactgggacacgtgaacgcctttgagccaccaatcatggccactctcattccatgactcttcttccttcgcctgctaccaccagcagcagttcccccctgccttctccccccacctcccatccggagccctcctgcgggagctcctggcagaaaagcactggctgtcactggcttcgagcccacgtgtgcccagcactatgctgaaagcattgcgttgagtccttggcacagcctatgaggtagacaccctcatcaccccgattttaaagatggagaaactgagggtcaaagagacatgacttgagctgggtcagtctgagctgagtgaagtgcccaaggtcacccagctgatgagcagctggattcgaagccaggtagtgtgactccagagcctgtgttcctaaccataaaccataccgatagatggaaacaaggttcactccacctccagcaatgaattttctcacaacagagcctctgattctctggacaaagctacaaagacagcactataatcccacatgaaagatgagagaagtggcctcgcggggattaggcaccctgcttacggtcacacaatgcatagaggttgcagcccgggagccaaattttcgggctccaagcctcctgcctcctgccttctcttgaacccggctggtgtgacccatgtaactggctgagtggactgacttcaggagagcacgctgccctttggcccacccccattgccatccccactgcaggggaagggggatggaagacagcccaagggcagagagcagttgccaatgcaacgggaggaagggaaccatccccactggaaagtaagctgcccagccagggaggtttgggcatctccttccctgctggcacaggctctagagcatacagtagacattccatgcaaatttttatttatttatttatttatttatttatttatttatttatttagagacagagttttgctcttgttgcataggttggagtgcaatggcgtgatcttggctcactgcaacctccgcctcgcctcctgggttcaagcgattctcttgcctcagcctcccaagtagctgagattacaggtgcccaccaccacgcccagctaatttttgtattttagaagagacaggggttcaccatgttggtcaggctggtctcgaactcctgatctcaggtgatccacctgcctcagcctcccaaagtgctggaattataggcatgagccactgcgccttgctgaaaaaaacttaacaaaaaaagtggaggcaaacattgcatacagtgaaatgcatagatcgtaagtgtcttcttggatgcgttttgacaaatgtacacacccctgtcccatttccatcaacccaagagttctctcaagcctcttgcggtcaatccccacctcacagaggcaactatgatcctgacctctatccttatggatcagttttccctgttcttgaatttcacacaaatgaaattattcagcacatgctttttttcagataatatatatttgttggatacatgaatgaaaggacagagcaat

SEQ ID NO: 1884535 - DNA, 4001 bp, Homo sapiens
agaagagtgaggcctgcactgaggcacagggccttgtgatgcacggccagggtagctgtggggtgtggccacctgcttccctgcagaaccaaataaacgttatgggagagaagccaagcagtggcctggcctcagggacccctcagtgagtgccagcccatctctgagccagtgttcccagggcctgtcctgactggtccgaggagtttggctggggcctctggaggcaaaaccccttgccctgccctgtcttggacacatgttcagacacagacatcagtggcttttttactccctgaagtcctcttttctccacagaatatttacaaacagggaaggggtggaggccacttccgccaccaaataaggggctagggaggggggcagtgctaagacacgcctctgcgcagggagagttcctgaggagggcccagtgtgaccacagtgccctcaggggcccaggtggttccagacggctcaggccaggtcggcggtgggtgagcccagctgcttggaggccaggaggaggcgtgtggctgcactctcagactccgcctgcagccgccggttgttgtgtctcaggctccgcacctcctcctccagggccgccctgtccgccttctcctggggtgccggggagacaggagtcagagccgccagcccctttcctggggcagccctgtgactccccccaagctcagcccacccctcaccttctgcaggtcctcctgcagcttcctgagcatggactccaagtgagagaccttctctgagaggttcccaggctctggcctgaagacatgggggtcaagactcagcaggaccaaggcagggggcagtgcaccagctgactcccagccccagctaatgagaggggccccgctggtcttctaggcatatgtggcagcagagcccaggacagagctccaccccagcagacaggcacgaagggggggtcatgtgggcaggtaaagcggctgtggggagttggggagcttactcagcatcagattttggagttcccttagggtctccactctctgggatgggctgtcctgtggggacaaagggatcaggtgggcaggtcagaaagggggcaagagcactgcccaggcttaccgcagcaccctggtggcctcaccctctcgggacagcgactccagaatggtgttgcaagtagaggcaatctccgagatggcctgccactcgtcctccagggtcccactgcccgcctccgacatgactgtgggcacaaggagcaggctgagctagggaagcccaggagcaccccccaacccctcccctgctctcctgggtccagactcactcctgctgatggagttccgcagagacaaggtacgtggcagaaaggaggccctcagctccggcgccgggttgcccttgtcctcagagccactgggactgcctggcctgtcctgtgccacagaagtggatacagattcagtgatgcccactgtcaccactgtgctgttgggctccagagcctggtttctgctcacctgggtcaggggtgtctcactgtcagcactgggtactgatggcttggctgtggtggccaggaggaggtccggggtggtgttgggcaggactggggcctcatccgacagagagctggggagagcaggggtggctcagaaagggaagccgctttcccagaggcctggaggagagggaaggccaagagtgtgcacctgcgtggtgacagcgagttctggctgtgcaggaactcagtcctctcctcggccagatccccaggccctggaggactgccaccatcttgcaggcacaggtgcagcagctgctttgtggtgggcagcagggtcaccccctggacctcatcctgcacaggatctggggccccccgccggctaggctcctgcagcgacagcgtgtacagctccgaaaaactcctgtggggtgggacagggtcaggcaggacttctccagtccccagcgtcctgcatcactagccccacccccagcccgccaggctcacttccaggagcaggagagctccccggcatcctgacaacagtgaaaaatgtctgcctggttactggccatttttccagaccatggttcaaattccagtgctgcccctgtatatcccaagcaaatcactctgaacatcaatttctccatctgtgaaatggggataatagtacgaacctcatagtgtgctgtgaggatttaaataacacgtgtaaattgcttaaatcccaaaactactgtctgtagccaaatccagcctgtgccttttccttttcttttctaaagcagatgtgccagtttctgtactgcgagctaagcatggattttacttttttttttttttgagatggagttttgctcttgttgcccaggctggagtgcaatggcgcgatcacagctcatggcaacctcctccacctcctgggttcaagtgattttcctgcctcagcctcccaagtagctgggattacagatgcctgccatcacacctggctaatttttgtatttttactagagacgggtttcagcatgttggccaggctggtctcgaactcctgacctcaggtgagctacccgcctcagcctcccaaagtgctgggattacaagcatgagccaccgcgcccggtccggattttacatttttaactagtggaaaaatcaaaagaatatttcatgataagttaaaatcatgtaaaatccaaatttcagtgtctataaagttttagcgagacacaggcacatttatttattcatttacctacgacagagtagctgcggcagagaccagatggtccagaaagcctaaaatatttattatttggccatttacagaaaatgtttgcctacccctggcttagcacaggaagttatcaatagtgtgtagtgtgtgtgttgggtgggcgggtgccaatacttaaaaaaaaagatagtgggggctgctatttgatcttttaagcagtgggagcaacgcgcttaactggtcccattctacatatgaagatagaggttcagggcgcggtgactcacgcctgtaatcccagaactttgggagggcgaggcaggtggatcacctgaggtcaggagttcgagaccagcctggccaacttggtgaaaccccatctctactaaaaatagaaaaaattaaccggccgtggtggtgcatgcctgtaatcccagctacaagggaggctgaggcaggagaactgcttgaacctgggaggcggatgttgcagtaagccgaaatcacgccattgcactccagcccgggcaacaagagggatacttcgtctcaaaaaaaaaaaaaagagagaggagagagagaggaaggaaggacagagaaagagagagagacagagacaggaagagacaggctcagacgggctaagagacgggagattctttccagaaggaaaggtatccacactgggttcctgaaactgctgatggcgacccgggaggcgcagactgcgcggtggccaactgccggccctcccacctccccgcgtccccggcaccctgacctgcggggccggccgctctcgtcggggggcaggacggtgacgcagaccttgggcgccgagcgcaggagctgggcagcggcctcgggccggaggctgggcagagtctggccgcacacgcgcaggaggcgcgccccgggccgcagccccgccgtctcggcgaatgtgaagcgctccacgtgcgtgacgaatccctcggcgtccacctcgaagcccaggcggccttgaccgtcgcggggcagcgccagctcgcgggtctcgcagccacggctcaccagctgcggacggggcgggacgagtgggcggggctgccgggaggtggggccgccccagcgcccgccccctggactgcgtcccaggccacacggaactttccacagtccccgagggccgcgtgtgccaccgcccgagggatgaagaccagaagtcgcttacccgagggcaccagttccggccttgccaagccccgg

SEQ ID NO: 1884536 - DNA, 4001 bp, Homo sapiens
tgttttctcttctctatactctgaaatagcatggctggtgtgatgatgtaactcttctatgataggaattcttaacttaggcccacagacaggttcaatatatcaaagaaatccacagagttatttacataattttgtctgtaggggaaattatgtatttttactgagaaaaatttcatatattacacagaagtctctgaattaaagcagattaaaaacaacactttatgtaagtactatccaatgtgaatataatgtgagttacaaatgtaaaccacatatttaattatacattttctagttgctatgctataaaagtgaaaagactggtaaaattcatttcaatagttatttaatttaccccaatatgtccaaaacatagttttcaatgtatgtcatccatcacttaatgacagggatacgttctgagaaatgcattgttaagtaatttcatgattgtgcaaacatcagagagtgtacttacacaaacctagatgggatagcttaccctacacctagggtatatggtatagcctattgctacaaatctatacagcatgttactgtactgaatactataggcagttgtaccacaatgataaatacttgcgtatctaaacatctaaacatagaaaaggcacagtaaaattaccttattataattttatgaagctaccgttatacatgcaatcagttgttgaccaacagtttgtaatgtggctcatgatggtatattcaatatgaagtcattaacaaggttttttttaataagttttcagatttactgtatatattacactcatagcaaatctcaattgggaggagtcaaatgtcagatgctcattagccacacctgcctattggctgcagtaatggacagtgcagctccagcgtctcccttttgttttatctttctaccatgatatggtttcatgatttttatctcatccactggctttcagcatgtcctgatgtcttactatctctctctttccctccctccctccttcttttcttctccttctcccctttcctgtctcccttctggttaaggcctctgtcctaaacatccattaattcagtaaatacttttaagaactatattcaagatgaggtcagagagatcagttatttataacataagttgaattactgctctcagaatccattatgaagtcaaagtcctatgtgtaggatttcagtgcattcataaaggaaggaaggtttagaggttgcacaggtccatgaagaaatcagcctatgcttttacccaaaatgttccctctgcacacatattctttgttgtaaataatttctatgtaacatacatgttgctaaaacactttgcaaaagtaaatttaccttctcatgtataatttgtaatatttttgtacattatcctatgaaatggaactgttatgaaaagcaagtggacattgacacaaacaatactaactctctctcacctctctctctttccaaataaattattcccattacttagtcttttaatcatatctctaacttttgaagtcttttgtgattttgagcttctctcaccaagtaacctttttatatcacttattgttaaaaaccccatcaatagcccatgttctaacatgccttctgctaattcactcaatcggcaaacatttatttagtgtttagtatatttcaaatattgtgataggttttaaatagacagatgataattacattagtgagatgcttattttatttgtcctagtgcagatactcatgaactcatactttatgccccactgagtgtggcttaactgaattttcagtatatctgataacaaaaaaaagaaaaaaaattaaaaatgtatttaaaaagccagagactccagtgagaacgtaataatgtctatctctgacattttggggtaattagtttagtttctaatatgcccaaatctcttaccagagaccattaagttctggtctttggccagagatttgagcattgcagaaactatactacatacttaaataaaaaatgtcaaactatatatataaataaaaattccaaactatataaataaaaatccatgaatgattatttgtgtaatgatcattacacttaatcagcctaaggtacaaaacaaggtcacatatcttttactatttcacttaaaatgttggaactttgattttcctattttaaaactcttctgctttacacaccagcttcttctcttctgtgataattttacaaaacactcacaatattttattatattgaatagataatttctagtcattcttagctggttgttgaatcagaaattactttcacaacttcaggctttgagaaggcccaactcttcaaagtggttacttcagaacagtttgttgcaccaagacagagattcgttgttacacttgacagcctagatgttcaaactatttaactattataacaaaaatgttacaatctgttattctaggcaatgtaattgagactgtttccttcaaccttgtaactagtatgattccaaatgatttcatccatttaaaaaatacattggaacttctacttctgggcaagattgagcaataaggatgaatgtatgttacagcttgaaaaaaccaaaacatgatacaatggctaacaaggcactggttgcttgaaaacaaaaaaaaaagtaatctctgaaagatgagaaacaaataaatcctaaaaattcttccaattcagtgcggtgaatttctaggcagcagcacagggagatagcattcagttggagacctttgaattcccgtgttgtggagacaaaactaagagttgaggaataagaaggtgactagagttaccagggcagagaaaggaatgctacaaagagcgagaactctagagatcaacagaggagtctcctcaaatattcagctgagtgttgacaagctcatgcatgcacagtaactgtatcaggcctgagaaggaaccacgtcagactctattattagaggaaatagtgactagtgcttaaacaggtgctgggacaagtgcctgttccaaagagaatcgagaaattcatgaggcattaggtagagaacacagaaggttcttgccttagaaggataatttaacactatgctaaatgctacactgttcttgatttataaaaattagcaagacatataagaaacacactctatctaattgacttaagtgagtaccaaaatgaaacttttgactgttttttaaaaagaatattaaaaatctgtcccctaaagtacaaaatccttaatgtttagtatttattattattttgcaagctgaaaagcaagaaaatgaaaacaatattcaggagaacatttagacaaaaccaattcacgactgacacagatgttaaaggatgaggatattatcatagttataactatgacagggtagataccaaaaaatatacaaatcaaattccagaggtaaagactaaaaattttgtagtgaaaaatacaagtttttttttttttttccccaagatggcagattagaggcttttagtgtgcctcagctacttggaaatagcaaaatagtgcataaaaatctactctctgagctttaattcaagaagacaaacaggaaaccactgcaattgtgaaagacatcccagatcctgggaaaaaggtgggcaaactgtcgcagtgatggtgtctggctgataaaaatgagttaagcctcagttggtgagattggcagaaagcttacctctgtgacttgcttttgcactgggaatctgagcaacccaggacatgggagagcactttatttctccaaagccctggagctatcctggggaaaaggttggagacactgagagagagagagacactgggaaaagttgcaggcatcttccaagacccgggaccaagagcaggataccatttttaattcagatgcataaaatgtcagtcactctttagtaacccatcagtgtggcctcacaggtattttaatctcgaaccagagattggag

SEQ ID NO: 1884537 - DNA, 4001 bp, Homo sapiens
gcacttaggttgatttcataacttgattattgtgaatagtgctgtgatgaacattggagtgcagatgtgtttttgacacactgatttaaaatcttttgggtaagtacccagaagtgagattgctggatcatatggtaattctagtttaagcttttcaaggaacatccgtacagttttccataatggctgtactaatttacattcccaccaacagtgtacaagggtttccttttctctacatccttgccaacacttgctatcttttgtctttttgataatagccattctgacaggtgtgaaatgatatctcattgcggttttaatttgcatttctctaatgattagtgatgttgaacatgtttttcataaatgtgttagccatcaacacatatttattgagtgccaactctgggctaggcaggcatcttggattattatagatgtctgctttgaaatagttttctagctcagtgatttcttttcagtatgagtgtccattcttatatatgtatatttagttatttataaattgtatatcccacaaacatatagctaattgtatgtattataaaacattcacaataataggaatttaaaaagatgaggtaaatataaaaataaatattttaactattttatttattgactacaaaaattcatttgacctcattaactgtaaataacatctagaaggagcatctttgtgacatactgatttgaagatctgggtttaacttcaattgatttcggtgttttgtcatagctgaaaaagataccatacaaagatgtttagatccaaataaaaatagtatatcattgattatgctaaataaattacaaaagttattttaaaatgtcttccatcagtcatgcaaaggtgttattttaaaatttggtcagcaaatttccaccttagctgatgtcaactggtcttacacacttattgaaggagttgcctttttaacccattgagttaaaaccactcaaactctttatttggaaaaattttcagcaacctaaaaaattctgcttctacatattttttaaaaaggctgaagatatggaagtttttatgggtaacacacacctatattgttgttagcaacaatatcacatgatggaaacattcctaaccatctactaaattttcacttgctaaatgttcccctcattgcatgaatttcaaaaagcattaatgttatcttgatcttgatgggctggattaagtacaaattgtgtttactacttaaaaaaatctgcaggtaacgtattttggacaaccaacttatcaaccaaaaaagatcagcaaatttagtgtgcttgtatttgtattaagtaaatagatatttaatatctaaattataattaatttaatttaatgatataactcattaatttaattatatgattaatttaattatatataattcattgctttaattatatacgattaatttaattatatatgtcattgctttaattatatatgcttaatttaattatctataattcattgatttaattatctatatgtgattcatttttaggtttcacagttcgttgggtgtctttagtcaagagataatcagtgattctttttatggcacaaaagggtctcatatcattataaagactgtacatttagagatgttgggtccataaaattaaccacactgatatcatccttaaatctcaatatgttgcaatatgatggaagtgaattcactgagggcatcactgttaccccccatttccatgcataacttcctcttgtccctcaggacactctcagaaccatgagtcacacataactaaagcgtggggagcaccagcactacggtgaccaactcatcttggtttgcctgggaatttcttggctttaacattgaaagtcctgttctaatatatccttcagtctggggcaagcctggacttttggtcacaccagtccacattaatattgtctggtccacgttaatgtggactggtgtgaccaaatgtccaggtttattatttatatgtattttcaaatacaaataaatcttaatttcctttttctttgcttattttttcttttacttctttttcttttttaaaataaattagaagtttcttttcgcattccaatggattgcctcatgtggtccctaagacacatgtgtcctactttggtctctttggagcttataaaagcaattcttgcttaatagattcctcactcaaatcccgtctggagaccacaggagagaagttggctctggcctgaggaaccctgacattatttgttctaagatgggactgggtccaggggcatcaatggttctgccagggggccatcctggtgtttgtcaggcagtagcatgagatacaccatctttatatgctctcctacaactaaaatccgcttctcattaaaagttttctttatccaaactatcctaaggtgacactcatattaatatgatagtgttaactcatctgggaaaaccttaagaggaagaaaacacacttttcataagatccagatgttgtctttccccgcccacgcccattaggtggaaatctgtaacagcagttctcaaacttggctgcacattagaatcacttgggaatttgaaaaatccctgtgtccagactgtgcctttggctgattaaaatggacttgctgggagtggatgcaggcatcaggaatttttaaagctcttccaggtgactccaatgtgcggtgaaagctgagaaccaccacacatctacctttcccctccagtggtgggtgggactgtggttgagtctgaatgctaagaaagagttctcagaggcaacttgtgtgtggcatgtagcatggatgctgtcctattcaattagaagttttttttcccccttactaaaccaggcagggttatggtaattcttactctcttcattagagagtgaaagcccagtggtcttagcagtcactataggaggtctttagagtagactgactcagcaaggaggtatcagctaaagtgattgtaaatgtcttttatctgacagcttgacgacttgcttttcatgtgtgtagacccataagcaaatacaagaatgaaacataaagaaaatagcaagatgtcggaggcatctgccccttgtctcacctgtgtacttttaaacctcagtagtggattgacatattcaaatatggggcaagctgggtcaggtgaaaagataatggagacagcaactatggtagaaccccaaatttaagactttatttgaagtctactcatcgcctccctgggcaaagggctttatgacattcaagccaaaccaaaatttaaagaacgagccatataggactgataaatctgcttttcctaattataagaactagtgttccacaactagtgtccttatttcctattttcgattctgcctatttcagtggagaaaggttttggtgtctgcagtagctggaagagctggaggacttgaggctcaggagcctaaagaagattgtcaccaacttctggtagatgagaatggagactcttgcttcctttacaatgtgctatagcattcatgtgctgcatactgtgctacctgctaaggaattcaaagaaaagtcaggtgcatccttgatcacaagaaactcagagttattggggcaaatggaaggttataacatagtaaaacaagtagagtggtagatataaacacagatgctttacatctcacatttgctaaggagatgttaccacgatctcacttaagcctctcagaaagcaaataagggatgcactactttaattcccaagtataggaagaagaaacagacttaaagaggttaagtcacttgtccaagtttacatagtcagtaaatggcagtgctggtgttcaaatccagcatgttcaatgttcgttcttttaatcctgtagccacatagctactgacattattggtggccatttggatgactactatttttattttatcaagccttagctcacatcaatacatc

SEQ ID NO: 1884538 - DNA, 4001 bp, Homo sapiens
tcccaacgtgggggcagctaggagcaggcaggttgccactggatgtgtgaacgcctgccctacctgtggtagttgtgtgtggagcagagccggtgtgtcatacctggaggctctgggcatctgagccttcctcagctccctcccccagctaggatcaagtccactttaacccttagcaacccttaggctgctagctcctaccctcgcgtcactcggggtgggggagcggatggatatctcaggccctttgtcaagccgcctcttccgctcctccgattcattctcctggtatgcgcctggccttccactcaggtgactcgcacctgctccctgtttgtgagcttgctacccctccccacctaaccccctaagagggaggcacggtgacgtgttcccagagccccatccctttgctttctcgtacctcaagggcccctggcctggtactagcaagcccccttcactgggtgctttaaaattgcattgggctgggatcagccctcttggcttcccatcaccaggccttccaggtgtcttcggagactgtgagtgtgtggaggaggaggggtcttcgggagctggggcagactcttgaggggcaaaggggggaggtgtgagatgggaaagtcctgactcatccacgcttgactcagctcgccctgcggcggggtgggagagagggggtggagtcccggaggggagggtgactggaagagtcttctggggaggagcctaggcctgaacggccactggagaggactgattttctaatagccccttcccaaattcttacaggttctcaatttttgaggctgtgaacataggtagtgagtggcccttgccctgcccctccccccttatgggggacctgggcactgtggctggaatgtgggaagcccaactatctgatgcaggctcagaggagcagtcatggctggcgtggggaggtggggtcactgcagtgtctggaatgagggtccgtccccacactgccacatactggatatgtgactcaaggtcacgccacttccttttcccagacctcagtttcctcgttgaaatggggtcgatccttttgagaatcagcgagctggtgaagggagagcctgagatgcatgccagccaggagcctgctcagagccctggtatctcagtgactccagcctctgcctctgctcttccctggttgtgatggagaagctgggggtggcgggctgcttcccaggcaggtcctggactttggaaccttcccccaggagccttcctccccagagacacggctggagtggcgaaggccaatgtgccctagggttaagttggggttagactcccgcagggtggcaggtggggccccctcacccccaggtccccgcccagcctccagcagccccgcagggagcatcaggagtgtgcaccggtgtctggccgggcctgtcaccgggacgaagctcctgggcccaagactcctcccctttgaccgggatcggctgctggagggctgctggagggcgggtaggggaggcgaggggggagccagggctgggggcggttgggtgaggcctctgtgtttgtgtaagtctgttgctgtatctatggccctgtgcgtgtttctttgtgactaccaggctcaactttcttcggctctcttgtggccggcctcagtcttttcatctgttcaatgggtccggcgctcccactcagccctcgggcagccccggtgtctgcgcgtgccccaggctgtctccgcgcctcccgctccggcggcgcttccctggcctcggcgcgcctctagcttcctgggctccgtgcgtgtcttgtctccctgtccacgtgtgagctgtgagtgtgtgtgagtcagagttcgggtgtctgtgggtctctgagcctctgctggcagcacccggggctcgccaagctcttgccggctggcgcgcgcccagcccctggcgggacttgtccgtgtgtctgtccgcgcgcggggcctggagaagcacgctgcagtcctgtccgcctcccgctcgctgcctcgctggctgtcgctcgctcgctctgcctctccgcccgggctctgccgaagggggcggggtgggggtgcagggcggggggaggggaggctcctgcattcttgcggtcggggaggaatccgagccagcgttactggtctccagaagagcccagctgcagccccggggccccgccaggcctctcgctgcccgcccgggcctgctgggatgggcacgggctaggcctcgagctggggacggggcggggcgtggccccaaccccgggccccctccacggctggagcgctctgggggtggggcacgaggggtaccccaccctgggtgaggggcgcgtctgggagcaggaatccctcagggggccaggggagacctcacagccgccccacacggcacctttgctacctagccttttagtgaattctgtctctgccgcccgtcggggcggaggcttgctggagactgcaagccccctgagggcaaggtgcgggagggatggggacagggctggcctccaggatcgagaccccatctcgtaatcctctttttccagtgccaccccaccctatccagctccctagtcccagggctgttgggtcctcccttctcccctccccctctgacaccccctccccaagtcacgagttttctctttggggcttgttgctgcagtccgtgctccagtaccgagtacctggctgggccctgggcacgcacaggggccgtagccccactgtgtgtgggagccatgaggatcctggctaacaagacaaggtgtgtgggtgtcgtggcgggtgggatgtgtgtgtgtggagtgcgggaagggaagggcccagtggtgatggggcccaagctgtgctggccaggagaggagccgccctgggcacctggctcccaggccaccagtgggctaaaggggggttagcatgggaaggcctggcccgaggcaggaggcgcagccagccttagtgcctgggcctgggtggggggcagaggggactggcagccagctatgcttgcggcttctggtcccttctagttcttccctccttaaaatggtttgagcagaccccctcccaccctactgtggggtccgaaggccgcctctggcctcagtctagctggaggtgggagctggagtagggggcggtgcctgcctccctcccccctccccggagaagccggcagacagggccaggcggcagcagcaggacagcagagctgaaataaatctgagctggtgtggaatgaggggggataaatatcctctcccgtgatgtgatctttccagcggctattaataggtctccggggagggggaggcggcggggggagcgggctggagcttaaagggcccgcagcctaggctgcaggaatccttggcttcaagctacactccccatctgcttgacacaccgctcccctccccctttcctcctgcttctgcctgccggcctggcctgccaagcccccctcctcaggccttcccctccagctgtctggaccagtgggtagcactccctggtgtgcgttttcccactgtccctggggaatgagacccgggcatgtgcagtgaccccaggtcctgtggcccttctctgctggtgttgggacatatgggagttgaggtttgagaccttggaaggagtctgaagacagcagatcttagaagagaggatgcttaagtctgatacagaggacagggttgccacagaagcttgcaggctgatgggtgttttggggctgaggtgggtgaattctgccaactctaggccctggtttccattcaaattgtggaggctagggggtggagggtttccccatctccactccccaaggtggatgagggcttcagcccttgtctgaggaagccatggagggaggtagagaatagctggtggtggtcttgagataccaccccttccccccaccctcccccattgttaggggaggcaggatggggtaattaagttgcaggca

SEQ ID NO: 1884539 - DNA, 4001 bp, Homo sapiens
cattcctgtttattaccgaataatatttcattgtatggttaatatcacattttatttatccaaccatcggctcatagatatttgggttgtttttacttttcagctattatgagtaatgctcctgtgaatattagtgcacacatttttgtgtggacatgttttcatttctctgggatatacacctggaagtgaaattactgggtcatatagtaactgtatgttaaacactttgagtgaccgccagactattttccaaaggactgcactattttacattcagtgtaagtatattgcatatatatgcgggttctaacttctccatctcctcgtcagcacttgttatcatctgtcttttatgttataaccatcctagtggccatgaagtgctatctattgtggttttgatttgtatttccctgatggctcatgacgttcagtatttttaaatgtacttatcgaccatttgtatctattcttttgagaaatgtttatttaggtcctttctccagctttaaaaaaattattttgttattgagttatagttctttatatattctagacacaagtctcttgtcaaatatatgatttgcaaaacttttctccaattcatcaggttgtcttttcatttattgatggtatcctttgaaacacgaaaccttctaatttcgatgacgtccagttcactcaccctttattgcttgtccttttggtgtcatagctaagaaaccactgcctaatccaaggttacaaagatttatgccaatgcttctgagagttttatagttttagctcttacatttaggtctttgatcctcatggtctatttttaaaaagcaagttgtatgacatttaaaactcagatactcagtcctcattaaaacttcatctgaaatcaagattagaggaaaaagagtttagcagagtccttccttgcaagtgacccaaaaggttgcagttttataagacaaaaatagactagacatctccagagactttattatgacttttattaggactttattatgactttcattaaggcttgggtttcgaggtgttcaaacctgcaaatatgggtgatagacggatggaccctttgtagttggcgttaggtgataaagagaataggaggctgctgcccaccgccgtttcaacacggccagcagctctgctctctgcctcctgtcctgtgtccttcctcctttggatctcttggcctgagatcctttcagatggtgatttttggtccccttttgtccacgtagttgcttacacatgctagtgcacccccacagcctcatgtctgcctgtccaccccatctccctcctcattctgggactggagacagtttggtttttttatgtatcaggataatgaccacctctttttcttcccatatgagctcccactcccttcttctctacgtaccttccttggagctaattcacacatacctcagggtgcttcttatttttcatgttttttttctcttcctatagatagaactcataaggtttccatggaaacccctgatcagaggtaggggattcttgaatagaggtgagatacacaagctttgctcatttctgaggggctctgggagtgtctccctcactcctccgccaactccctctccaactcttcctgggtcagctcttgggtctgtctctataagatgcttcaggagcccccagaactttgtcttaggatagaacagatggtggtgacgatggccctgagagtccgggctctaggaagaggctgctgctgggtgggttgtttggcatctgcagaaaacctgaaatctggtgtgtttcccaggaaaagggaagtgcttaatggcaatccaattctccctattgcgtcatgagacaagtcctggttaggagagctgggtcccaaattaccagcattgtcttcctcttattagacagagatggaaaggccttctggaggtaaaggcatggctgtgataatcaccggaaggccttcccatctctggttgagattcttgtatgcccggtctttatatgaatggcaggtcttaggcatgcatataagcaaattaacatgctggaactggaagggattcagagtcgaggttctaatatataggttgaaggttcctggaggactgcagagttacagcaaaggctctaagaggccatgtgtgcactgaatgctgcctggggaacaaatacatcaacgtggtcaccatctcttggaactatgctatttttttaaatgataaaaattaatcccatacttgaaaaaattgcaaactactgatttgttgtagacctattaccttgcaaatgaagtaaacaggggctcagacagcaagagtgaggtggcgactagcctgaagtcagccagctaggaccggaggcttggggtggggtaagtgttagtggcagcacctactgctctgtttacccacactgtggaaagtgctatactgggaaaaggaggcctcctctgaccagcaagtgcctactcctgcagctcagagcctgagaaagaaactacacattaaaagtgaaactgaggtggtttcatcttcccagaataaatgaatgatatcagtagaaaagctaggggatttttctggggattggggggaagggagttcaaggaagcagcagttctgaggatactgatttcattcattatctttttgaaaaataaattaatattttaaattaggttcctaatcacagagtgtgaatcataacagaaggattgggtggcctccctttcaagaccagcgctgggaagagctttgaacctgagcctaactgtggatttagatctggtgcacttctccccacttctgtacctaggccagtcaaatccagaacttgttttttttaggggatttcagaggagttgagaacacgaaggtccataattaagcatcattgatttttaaattattttggctctgaggtttaaactggcattgaactctcaggttcagtttagaactctcttatattgtgaaaactgcctcagtgtttccattctgaagaccttgcagttgcttgatttgcatataggagtgtgatatttaagtgtgtgggaaagtggatgaatgtgggtgactatgttatgcgtttgtgaaaaagcatccaggaatataggtgatcatgtggcttgtcaggacttggcaggatgcagatggcacactcggatagggtaatggggggcgtttaagaaagggactctctttaaaggtgtgggtaaagttaagggatatcagcaaaggataaatggagcaaaggataaatgaggcaagagaggtcacctgacctgagctgtggccttgggtgcagagatgcagtcaatccacaggaaagtagcaagggagaagctgagggacaagcccctgtcccaattctcctcttgccctcctgtatccagccagtgcctcccttggcaggacccaaccagaagccagaaggcaagagaactggttacacttctcagaagggccagcctcctgggtcacagagcaagatggggctgtggggctgtgtagcaagatggggggatctactctacacatgcagagtggatccagagttgaatgtgtaatggtaggtcgggtaaaatcttactgtgagaacactcaggcattaactggggctgacctggacttgaatttaaagagtgcttcctacttcagagtcttgctctctctctctctctctctctctctctctcatttcacctattctgcttctttctccctgtggtagggaagaacctagtttccaatgtgtggcatcttgattaaatggaaagtacatgggctatggagctaaatcatattagcttgaaattttagctcagccacttactgaatgtgagccttgggctagttactaaccttgcaagttccagtttcctcatctgtaaaatgttggtaatgttaaactccttgcaaggttgatataagaattaaagactatgtatctttatctgtgtcagtatcttcatc

SEQ ID NO: 1884540 - DNA, 4001 bp, Homo sapiens
cgagatcgcgccattgcactccagcctgggtgacagagcgagactcggtctcaaaaaaaaagaaaaaaaggaaagaccagtgtcttgggagttgggaaacctgggctggagactcactgcatgacccctgagaagttgcacctcagaacctcagtcctcgcatctgcagaatgggtctgtgaacacctcagctgcccgaacgtggatgccgcaggctgacccagcactgagctctaccaagaccaggggccagccgtgtgctccctccaggcctgtgcccagcgtggagaggcctcgtcccgtgggcgctggagtggagccttcctggtgtttgtggacatctctggagagggccagaggcaggtgggtgacacggggcatggctcaatcatgggtggtccagactggagaggtaccctcgggctgggagcggggaggctggccagggtagacttttggggcctccatggataccctcaccatctggaatcggagaggggcacggcacaaaggagggcggggccagggccaggactggagtcgggggcacctctgtgccaacaggggccttggatctggggtacagcatggttccccggccctgaaggggctggcgtgtgggacaggcttcccaggaatggataggcagggatggatgctgcctgattggggcgggaggctggaggcagggcaggtgcaggcacctgagggcagcactcacctccacaggggtccaggggcctccccagcctcagcacctggcctgggctcctgcctccagagagcctggccccaaggaagagtctagtaagcttagttcccatcgggcttccatgaaagcacaactggcccggcaggaaaccgaattaaaaagcaatatttgtatcagtggaagacatttgctgaaaggttaaatccacatccggcagtgtgggccatgagcctccggcgtggtgttcatcaggcatgtctctcctcctggcctgggcacctgagcactggggccgccctgggcagagctggggcggggtgctggggggcctggagctgcctcaccgagggatcctcagcagccgaccctgggggaggcaaatgagactctttctggggaccttgaggggagctcgggggagccatgcagagcttcaccaggcctggacactgggcatggaggctgggccacccaagggccatcaccagggactcaggtgggtgggcctcagccctgggtgacagaagctcacgggccgcagggcgaggccagaggctgagccttcaggctgaggtcttggaggcaaatccctccaacgcccttctgagcaggcacccagacctactgtgggcaggacccacaggaggtggaggcctttggggaacactgtggaggggcatagcatctccgagagaggacagggtctgcactgggtgctgagagacagcaggggccgagcggtaggcttccctgcccccagggatgttccagaggagcgcaagggaggggcattaatatcgtggcaagaaagggcaggcattgcagagtgagcagcgacggaactgggttttgtgggatgcataggagttcacccggataagaggtgggtgaggaatgacactgcaaaccggggatcacggagccccaaatccttctgggccaggaagtgggaagggttggggggtcttccctttgctttgactgagcactcagcctgcctgcagagggcagcgaggagccacggaggggtgtgggacagggatgccatggctgaagcagttttaggaaaggtcccaggggctattgttgaagagagaacggggagcggggagtcccacagctgacaggagcagagtgggccctgagagatgccagctctggctgccacagtgaccagccggggtaggccttcgagaagtcagggagcgtctagggcttctggctcctgctgggcccagggtgtcatcttgggctgccaacaccagaaagcccagcagatacaggaagccccaagccctgtcggaaacggttcttctccaggagggacagcggtggcagcgttcagccgcaggccatgcactctggggccacgtccttccctctgtacagtccagcattgtcaaggcaggctctggccatctctgctgaccccagagggatggggaggcctccccttccaccagaagggccagaagccaccctgggcaggggcatcactctccctgggtggggcagcggctgggagcaggaggtgccagtgggcgtgggctggatgcgggtgcctgcggggcggacatggaacttgggggaggctctaggctggggttgtcctcaagggagttctcaggtcaccccagggtcaccctcaacccggggcctggtggggtagaggagaaactgcaaaggtctctccaaggggaaggcatcagggccctcagcactgagggacgtgcgtgctctttaaagaaggggccacaggaccccgagggaagccaggagctagcagtgggccatagaggggctgagtggggtgggtggaagccgtccctggccctggtcgccctggcaaccctggtggggactgtgatgcaggaggtggcagccatttggaaacgcgtggcgtctccttagagatgtcttcttcagcctcccagggtcctccacactggacaggtgggccctcctgggacattctggaccccacggggcgagcttgggaagccgctgcaagggccacacctgcagggcccgggggctgtgggcagatggcactcctaggaaccacgtctatgagacacacggcctggaatcttctggagaagcaaacaaattgcctcctgacatctgaggctggaggctggattccccgtcttggggctttctgggtcggtctgccacgaggttctggtgttcattaaaagtgtgcccctgggctgccagaaagcccctccctgtgtgctctcttgagggctgtggggccaaggggaccctggctgtctcagccccccgcagagcacgagcccctggtccccgcaagcccgcgggctgaggatgattcagacagggctggggagtgaaggcaattagattccacggacgagccctttctcctgcgcctccctccttcctcacccacccccgcctccatcaggcacagcaggcaggggtgggggatgtaaggaggggaaggtgggggacccagagggggctttgacgtcagctcagcttataagaggctgctgggccagggctgtggagacggagcccggacctccacactgagccatgcccacccccgacgccaccacgccacaggccaagggcttccgcagggccgtgtctgagctggacgccaagcaggcagaggccatcatggtaagagggcaggtaggtgcccggcggccgcagtggaccggagcccagggctggtgccagctgcctctgctactccccagcctggctggcagccccaggctcagggtccatgcaaacccctgggacgcggcgtggatgtggaggcctgggcacagcggcatcccctgtgcctggtgtttgagtccctgttgggggagggtgaggtgatgcctgtccctgtgtgtgcccctcttaggccgacctctctcgggggtcgtgtgggtctctgtgtcttgtttcatcttgaatcttaacgatcggaatgtggaaacaaatccatccaaaaaatccaagatggccagaggtccccggctgctgcacccagcccccaccctactcccacctgcccctgcctccctctgccccagctgccctagtcagcaccccaaccagcctgcctgcttggggaggcagccccaaggcccttcccaggctctagcagcagctcatggtggggggtcctgggcaaatagggggcaaaattcaaagggtatctgggctctggggtgattcccattggcctgttcctcccttatttccctcattcattcattcattcattcattcattcaccatggagtctgtgttccctgtg

SEQ ID NO: 1884541 - DNA, 4001 bp, Homo sapiens
agagatgataattaggtctacttcacagttcaatctacatttgcccactagtctttcccttcatagcccaataagaaccaagctttcagccaggtctcaaaggtcaaggagactctctatggagagacaggattaataggcaaaaaggatctatctagaaagcaacagccaggtatcctacttacacatgggcaaccctggcctcatttggaaaccagacctcttggaacatctggaacttaaaagggtattgcccaataaagggtctaccaccaaagccagcttctggatccatccatgaaactccccagccaccatgacctatatttccttttctgacttgtatcagcaggtgcccactgagccattccctcatttgaacttgcttatgctcagaaacaactcatctataaactctccccacactgcaggtcacagctttgggcagatcacagccaaagggtgagagaaatgggaaaagagaactgatctcgtaagccttatgtaaaatgactggattttaatagagttccttgatgggtacagtggctcacacctgtaatcccagcactttgggagggatccctgcacaacacagagagacagtgtctgttcaaaaaattaaaaatagaaagaaaaaaaaagttagccaggcccagtggctcttgtgtttagtcccagctaccgggaggctgaggcaggaggatcacttgaacccaggagtttgaggctgtagtgagctgtgatcacactactgcattccagcttggacgacagatcaagaccctgtctcaaaaaaacaaaacaaaacataaaagtgttcctttctactgcaaaagtataccagggctcctgctgcctgataagccttcacaactgcataggaaaaaccatgacagatcaaaagtagcatggtttccctagcaagcagactcagggaaaaaaaaaaaaaaacaaaaaaaaaaacctgtagcatggaattcccaccctcatcagtcagaagaaacagaataagtcaacaagtggtcccaggaattatatcatgtctatgtcaagaaaaggccatttaacaccctagttgtaaataggattccatctaagaaaccgcctggatatttcaaatgcgcacagcaaagagacaagactacctaagggaagggtgggactagggttcccacggttgttggaataggcacacctgaacaccaggctttcaggcaacagaggtggcccagccttaactttccctttccaacataagtggccccaacctcccccatgctgctcagtactaaaaccgaataggagcaatgaacttatcatctcaccaggccattcttccagacaagtaggcctaagatggggtctttccttgctgatctaaaaggtcaagttgccccaaaggcttcttcttactgccaacaaaaaaaatcctgagtgcgggggatgaggaaagttgttcaggaaagatacaggcatttgccatgactactgaccagaaagaacttcttgaactacttggaacaggcagtgccatgtgtgaatcctccatgaacctcacatgtacaaacctagatttcaacttgcccacttcgggccactcagtcctgagccaaagcctccagcccagtccagcccgcagcaaggccttacctgctgcagtggactcctcagagttggcccccgagctggttcctgtcgccttctcactgtgactatggctgaggctctggccctggtgcaggaggagtccccagaggagccacagggcaagacggacgcatacatccatgactctaggtctcagtcaacatgcgtctgatgtggacacctcgggatcccagaggcaaagccaggagcccgggagtgcagccgacggtctccaggcaagatgccctcgcggctccgcagctgtccagccacccgcgagcctgccccctccaacagccaaaggtcaagtgctccaagtttgggtgcgggaggagggctggctcctcaggtccaacagtgggtccgccggggctgcggcggcctgagctcgtgccgcttccggagacttcgggcagggtggctgcggggctgctgtcagctccgcagattactacacccctgcggaagggggcggccggagtctccgcgggcacagaagtggaggaggaagagaagagaagagaagagaggcgagaagggggcacctgacctcgccctgccgaagagcggcgagcagcagaagctggggagggcgtgcgacccgcagggtcctgagggcgcgggcgtctccgggatcctgggcctcctaggccgaggtcagcgcccccgcccagtcccgtgcccaggcggctggcggtgcccaggtccagcaggcggacgcacaccggccaggcccaggacagcggcttccaggcgggcgggcggcgcggggcgggcccggggcgggcgggggcgtgcgtctccgcgcccgccccgcgccgcccggtccccagcgaagcccgggccagccccagcgcccagctggatcccggaataaccggtgaagacggctccccggaatccccgcccctagcgggctctcccggacccccggcccgcgctagtctttgccaggatcccgcgcaaaggatcaagtcccagcttccctttccccaccgagagtctccagcgccaaccgcgggccgtcgggcgggtccctgacccgcagttactcaggtaactcaggcctgcggcggcggcgacagcagctgccctgccccgatctccgggccttggtgctgctccactcgcctcagttctagagctgtctaaacagaggcccaggacacgacgttagcctcccaggagctgcctgaggcgacaacagcctgacccggctcggcccgggggcgagctcccagcccccaactcccggccagttcccaggctccgccctcgcgcctcgcctgacaaccaatcggcttccgcctctctgcggcttgggaacccgcgcgcttcgtcgcccatgcgcagcggcccctggtgggaaaatcagcaaactgcagacaggactcggcgctcctgggagggcctgctcttttgcagagggttgccgagtgaagctaagacccgccccgggggaggcccacgagggccactggggcctgcgagtgttttctgaggaaatgatgatgccagaaagcaaaatgaaatgtccaaaccactctagctaaaattcccctacacattccttgagtctgggctaaagggtgccatctgctttcccgaccccgcctcccttcccctccaagctaagtgggatgccctcccttagctctcacagccctttttcctacctgccctcaagctctcagccctttaaggtttttcggtggggcctgtaaatgcttcctccctgcatctcattctcccagctacctctctggtggaggaggtgtcagcgacttgagaatgagtgcgccaaagaagacagagccacgcctgagcctccttcaacaaagcctgcacttcctgttctcttctcaagcgtgctgtcagcagatcttgactgaaacctctgtgccctaccctgtccttggcaccagacgcaggggaaaggatcaggcccagtccctcctctgactgacagtgctaaaccagctacctgttctgagcaaggcccctgaagactgggaacacgaatttgcccaacagctgcctggcttaagggttaggccgttgatataaaaatacatggctaatgtaacctactaccactctcccggctctgttaagctcctgtcacactagccttcgttaagttcctaaccacgtcaaactcagccacctcacagcctttgtatctgctgttgcttctgcatgaaacactctcgcctgctcccagttcctcatgtagctggtctcttactcttccagatacagctcaatgtgtctccttagaaacttttactctgcccaccccttcaaaatcagtctgtggccaaaattggaccattacatctgtctgcccc

SEQ ID NO: 1884542 - DNA, 4001 bp, Homo sapiens
tgcctcagtggacaggactgtgccggccaggcatgtgtgcccagggctccgttggtgcgtgaagctcaaaggctgtgtttgtgtaaggctgtgtctgggccctatccccaccccactgagcctcctgcccccaaccaggcagaaaggaggggccccagagggagaggcctcaccttgagggggtgcagcatccccttgcagtgacctgcaacagagcatgatgtgctgtgaccggctacggcacaggccagctggtcgccctccccaaccccaactgggggcatcttcatcctttccacagtttattgagtgcctgctacacaccaagcactattccaggcactggggatacagcagggaaacgagacagaggaaggccttgccctcatggagcttacattctagttcagggatacaaacaagtcaaataaataaggagttctgagagcaggggtgctcttaagaattcagaacaggtgatgtggcacccctgcagagggggtcctgggagtgatctctccaaggaggaaacagccaagctgagattcgaaggggatgggggtgggggagctccggaaagatgggggaagagttggaggcagcgatgacagaagtccagtggtggcaaacacctgatgcctcaaagaaccaagagaagagagtggggcaggaccatggaggtgaactcagggagggggctgggagcccagtgcaatgacggggggcctggggagaatccacgtccaaagggctgctgagaaagaagcttctaggttggggagtggcctggtatgctctgcatttttagttgaccgtggtatggagatgggggttcgagggcacgaatggccacagggatataagagctgggggccagggcgtggcagccgggaagggctggtggcagtaggggtggggaggagtgctcaggtggtgggtccgggggctgccaggactggctgaaggatgaggtccagaggagggagaagtcagggagggaaccagggtggacgtgaggccgcttccccacagaaccacagggctgaaggccgtcaggtgggctttggccaggttcaggttgacaccatttagttaactggtggaggggctagaagcagggattcagaagtcatcggcttacaggtggggctgaaagccaggggctggagggacgggacaccaggactcaccggggcgtgggtgagcagggtgaggtggggagaggggaagtgggggttgggaggtcaggccgggccgatgcccccagcagctcagggtccaggatataaatctcatcctgtgcgatctcagtcacatagttgaggtgctcctgtggggggaggtcagggcgggaggtcagggcacctgacggtgggggccgaggggcagcaaggctggtagacctggagaagcctctgccatgagcacaaacactgaaaggaggtggccaggcaaggggccctgcctgtccctctcccactccttcccattcctgacacctcctccgactgcccagactttaccaggtgagctggcgcctgaccagaatgcctttgcttctgtgtctccctggatggctctgggcttccaggccctcctacccacccagcaagcctttggtaggtaccccactgcctttctggctggcaccgccctatactctccagtgtggagggcagggccgcacgctgtccatgcacacaggcaatagtaaaagctctcagaggcatgaggacagaggtgagcccatcgggggagctaacagggaaggcgtcccaggagaggcgaccctggggcccggaagcagctgtggctggagcaggcctgcaatcgctcacctgggctcggtcgatcctgtagaagcggctggcagtggtggctgtgggagagagggcagctgaggatcagggagtgccatgtccaggcccaggtcctctgctgcccctacctgggatcccctagggagggaacacgaaacagcttggcaccctgggagtagactcaccgtccaggaagcaccacttgggggacagtttctggcatgtcggggacttggctccagcaccatcgggctcctgttgagagaagcaaaggccaggctgggatagagtgggggccagggagggaagggaacttggagtagggggaaccagcacagaggaggctccgcagggcgagctggctgcgggaggaagaggcctggcctcacttcccaccaccctctcggtgggcacctggggaagcccccaccccttacctgctggagtctctcaatgtgggcacggcagagctctaggtcactgtctcctgggaccaccacagtgcccagcggcacagctggagaacagagcacctgtcagcagctggctgcaccccacagccctgcccaagggggccccggctgcttcagcccctcctggccaccctgccaggccgccccaccgcactcacaggcctccttgagctgctccttgtcgtagtgcagggcctcatagtcgtgcatgctgacgcgactcacctggatgcgcaactgctctggcaccggctgctggctgtcgggcagggccggcaagcgggggctcagcaagggccctgccttggtgccaccctcggcctggcaccaaaccacttgccgagagaaggtcccgctccactcccaacacccctggggcagagggacagtcagccccttttacagatggggaaatcaaggcccagagagggcagggtctggccttggcacccagggcacgtggcagggtgggacgtactcgctgtgcaggggggcggcgctccgccgcttggccttctgcaccatggtggcctggttgcgcagggcgatgcggatgcgtgaggctgcaagcttgcagggctcgccatccacctgcaccgggatggccttggatgtggtgagcaccacctcgcgacactgcgtcagccgctcgccgtgtccgcccacctgcagcgcggcctgtgggcacaggaagcttgggtcagatggcaccagggctgggggcaggggggtcccagactctgctccttccgaagcagaaactctagccagagaacaaaggtgagagtgacccctggccagagggcagaggggaggctgagaccccaggtaggaaagggaagggacagaggcaatgagggtgacgctccagtcagagtggggagtgaaggtatcccgaggcatagtgaggagagggggtaggtgccgctctcaagccagaggaatgagacaaagaagggaggtgagggtgaactaggccgccgtggcccatggaggtgagtatgggtgaccccttccacctttgggctgtgctcccaggcaccatgggcccagggcccactcaccaacgacgtcatggtgaagccaatgacctcgaggtagccgtcgtcatgccgctggggctcaaagtcgtggtgctccccagggtggccccagggcatggtgcccgcacagtacctgcaaaggcgggcgatgacatgggcctcaaaacacagtctctgcaggacaaggacagcagggctccccccagctccggtagccccctcctcacctggggatgttcaggaaaacaacacactggggtttcaggtcctggatcttgggagtcaagtccattccatcacactggaggcgggcggggagggtgttgaggtgcatgtgccaggtggcctccgcctccctcccttccggcccacccacccacggcagcctggccccgctcaccaccactcggatgtgcttggccaggtccttggagctgcccatcaggaagtcagagaaagctgtctgtgggagacagagggcgtcaccatctgctgacagagatctttcctcaccagcacccggcagggctcctggggcctggtggacacaggtgggcacgggcacgggtggtagaagaggtgggcacaggcgggggtgcagaccccactcaccccggcgtagaacatcttattccgaaagcggctgttgaatttctctgggttgg

SEQ ID NO: 1884543 - DNA, 4001 bp, Homo sapiens
gggagggtgctggcggcgaacgtggcgaggaccccactcccatacacatcacccgggcccacggctaggccacctctcccctgtcgggcccgacagtagtgcctcccgtcccctgctcccgccagtacctctggggctcccgcccagccgccgccgcccgcgctggggtcccgctgccgctctcccgctaccgctcccggcgccggctccgcctgggggcggggccatgctgggaggcggggccatgccgggaggcggggccggccgggagctgtctgcggcgggaagcgcagcagcggggattccaggcctggcggaggtcagcaccgagcagtgctcattctaaggccatttcctctcctgagaaacttgtgcctgccttccagaccaaccgggagggctagcggaggccacctagcgtccagctcccggccagcaggtgctcaagagtctgccactattttatggagcacttgctaagcactgggccctgggcaaccattccactagcgcgctctcatttattctaaaaacaccttagataggtgtcatctctttacgccctggagcagctgaggtgcagagaaaggctttggccaagaacaagcctgataaatgtaggagccaccagacctggaagtctgaccatatggtgggaaatggcagacaatacccttcagataaaggcttgaaaagggagcagccatgcggtgaagaggacccggttctacctgaaccccaccttggtctgcccttgatctctactagacttcagccccacatccttcacccctctgcgtgcttgtccatcccaacttagccgcctgtactatcatgtacccattcccaggtagaaaaagaaactgccaaccaaaatcaaaaatagtgttattaattctgatgtctccgaagcacaaaaaaaaaaaaaaaaaagaaaagaaaaaaaaggaaagaaagaaaccacccttcccacaattcaggccccaggtccaggccaagggggccacacctgcaggcagtgcaggcccaggggctgaggtggtcctggccacaggctccaagtgggaccagcccatggtttggctcttagggcctggctgggaggctgactgcctccatctggggagcccaggccctggactggggatgagagagatcaggggtcaaggtcagaggtctgggtcactcagttttggtactctggccaaggcagccaaaggtcagggttcagacatgtaggccaaagccactcagttctgtggtccagcagagaggcagcagagcaggtccgttactgaatcctaggaggtggtccagtgggcgccaggtagctcagtactggtgttccagcaggggctgggctgccgggctctcacgctcctcaataggggcaggccagtcgcccagggcacccataggtgtgccactctcaggggcactgctgtccaagcaaggaatgtcctgggaagctctggggggtgaggcctcagtgctgacatcggggctgaggctgaggctgaggctgaggctgaggtctagaggcgcctgggggaggggggagaggttggcgggtgagcaggccttagccttctgggacccaaccctcccacaggtgccttacctgagatttgggggtacctcctttggggctccctgaggctggctccccgtcagatcctcccagccccttccggccccccaggctccactttccactggggccctcagaactgaggagacccgggccagggggccgtgaggtccggggaccctctgtggggataggcgatgcagggggtggtccagggagccgagggggaggccactgcagcagaggtgggggccgcccatcaccagagccactcagggaggaccgcggcccccagccagggcctggtgggaggggttggtcaccattgcctgtaggagacagataagacagcagaggcctcagctgggctgcactcctcacccacgggttcagcccagcctcgcctgctcacctgccgtgttctcaggtgtggggtgtgccacgggggggttattgctgagggaggtcaggccaccgcccccactacagtctgaatcatccacgttcccgccactattgcagccggcgccacagcccttgtgaagcctgggggtggagaggtagaaaagggatcaggagggacacggctgaggccagaggcctcacaagcatgagtcctcagccccaggacaagtcatctaacacctctgagccccaggatcctcccctctaagaagctgccacctactttgcagagtcttttgagggtgcgttgtcaacagtgcttgatgactaaaggccactgtcagctctgggggtaaggtgacatctaggaggggcaggtcagctctgggagggggtcatctctcgggattcaagccctggctccagcacgtcctccctctgagacccaggagggacgtactgcacctcagcttcctcccgcgccacacgtcaccccttcccgaggcctcacctctcccaggtgcgcaggagccagtgggcaatggcacccaggctgatggggccaccccacagtgcccgtagctgggggtggctgccagccagcgaggtggtgagaggcgacacgtagatggggtagcccagcggctggtcacaggaggagttgatcatgttgcgaagcgcctgcttggcgttctggatgctgccacgctcggggttgcggttgcgcaggaacaccagctcctgctgctgcccggcccacaggccgcgcacgcactcccggttcacctgagagccacacgccagggtcagggggccggcccaagggggtttggggcagggcttagggcaggtggggccggcccaaccttgatgactcggaagctgaggtggcgccggttgagcatgatgatcttgtactcgtcggaggcatcatccaggacatggcgcagcgccagcagggagggcgtgttgctgaggatggcgctgcgccatgctgggtcaccctcatgtgagatgaccagccgctcctcgttggccgcaatggcatcgtatagggctgctggctcctcatattcatctggggacgtgaagtggtcctggtagagaagacgggaacaggggtcagtggcccctgccctggagagaggcttcatcccccacctgcccatgctgctgggcacacccctccccaacctggtgaagcttgagggccatgcgaaccccaggcgccacaacgcggtgaagcaggtccatgtcggcaaagacccactcgtcacgtggggaggtgatgcgaaaatcccccttgaacagggcgtgcaggccgtagaggaagggctccaggctaagtgggaggaaaaacagggaggggagagaggggtgtcgaggacccaggggtaaggcttcagagtgatccaagcagaggcctttcctcacgctgagcctcagtttccccatcttgacaaagaggccaatctctgcccatgtctctcacagagcactgaggagcaggcaaggtcatgaccaggaagtgccctgcccgtgggagaagaggtaccccaacaggaagggccactgcagtttctgtggccactgtggccagagaccacagtgctcttcgtggaagaggtggggtggggacggcagtaggccccgcgggacacccgagcactcaccttgcagacatgctgtgagaggctgtccccagggcccggcggcccagcacacacaggccaaaacacagcgtgaccagcggggagttccaatcctggtccacgggctgtggcataaggacccccatcccagagcccagctcagacctgggacagggaccttggagtgggggctggggctcaggctaagggaggctcagagtgagaggaaaccaaatggggagaaggggagcagggaagcccaggtcccacagccccaggtggcagcctcaggtagtggagcctgacctggctgcgccgggaggcgcagtactggatccactcgaggtgcacag

SEQ ID NO: 1884544 - DNA, 4001 bp, Homo sapiens
acaagtgtgcatcaccacgcccagctaatttttgtattttttagtagagatggggtttcaccatgtagaccaggatggtctcgatctcttgaccttgtgatccgcttaccttggactcccaaagtgctgggattacaagcgtgagccaccgtgcccggcctgccttgcctgtttgtcagctgctggcgtcatctgccaagaaccccctctcacgagggggctgttcaccgctttgttcagtgtagcacccgctgccctaagggtctcaccctgcggtgagtgctgagttacagtcccgcctcgcctcaccaagctttccagatattttgagttttacaaattgaaggtttggggcaaccctgcataaagcaagctcactgatgtcattttaccaaccatgtgcttgcttcttatctctgggtcagcactttttaggaataaagtttttgttgttgtttttgttttttgagacagagtcttgccctgtcacccaggctggagtacagtggtgcagctcatagctcactgcagcctcaacctcccaggctcaagcgatcctcccacctcaacctcccaagtaactgggcctacaggggctaattttttgtattttttgttgttgttgtagagtcggggttttgccatgttgcccaggctggtctcaaactcctgggctcaagtaatcccctcaccttgacctcccaaagcacttggactacaggtgtgagccactgtgcctggcccctaaagtatttttaattaaggtatatacattgtgttttagacacttcgcagcctacagtacagtgtaaatcctttttttttttttgagacgaagtcttgctctgtggcccaggatggagtatggtggtgcaatcatagttcactgcaacctccgcctcccaggttcaagcaattctcctgcctcagcctcttgagtagctgggactacaggtgtgcaaccccacacccggctaatttttgtatttttactagagacggggtttcaacatgttggccaggctggtcttgaattcctgaccttgtgatccgcccaccttggcctcccaaagtgctgggattacaggcgtgagccaccgcaaccggccctaattttttttttttttttcaattttggctcactgcaacccccacctcccggttcaagtgattatcgtgcctcagcctagcaagtagctgagattacagggacctgccaacgtgcccggctaagttttgttatttttagtagagacggggtttcactatgttggccaggctggtctcgaactcttgacctcaagtgatccgcccacctcggcttctcaaagtgctggaattacaggcatgagccactgtgcccggtctaaatctaacttttaaatgcactggaaaaccaaaacagctgtgtgactcagtttaccccgatggtctggagccgaacctgcaacatcgccaagaatgcctacactgttgggtgcaatcctgtgccttaaatctacttctctccatttgatggatgagaaaaacaaggttccgagaggttgaggggctccccaaagctacacagcaagtgggggcacagcccaaactcaagggcacgtcctaactctcagttcctgggtagcccgctgggggaggggctggctgggaaaaccttcaaatgtgcttggcaaggactctcatatgcccccatcccagaaatgtagtgtccacaactcacagtgggacctgtggctggcaggctcatcctttagtgcttataaagatggagacaataacctcgacctcctcgaggggttgtggagattacaggagaggctgtgagtcacacacatggcacagcaccgggtctgtctgtggacagcactcactgtctggaagccaaggttgtgaccatcgtgactgctgtttggggacactcctatgcactctcagtccgtggctggagtagagacatcagggccgcagctcatggcctggaggacctgggagtgctccagaggacaaactaggatctggacaggagccacccgagtcacagaacactgggaggggttgctgtgcacacagaaagtagcggcggcggctgccggggctcctgccaggcacacacaggggtctgaccagagctctgaccgagtcatattgttcccgtgctggcaggcctggcccccacgggtaagcacgagacccactaagagaacggaaagccgggcctcaggggagcagccactggggaagggaagctgcaacaggcacacaagcaggactccggaaacggtggctacatccagggaggcgtggatggcctcaggtgtcaccccatggctcagaggcccaggggtcacacccttggccagaccccaagggggaacctctgtgtgtcaggcgcctgcccagggctggaagcttcactctgccaactcactgactctgtgctctggtaacaagccctcatcattcccattcacgagggaagtggctcagagggggaaagggacttcctggggacgcacatcaagcaggggctagggtttgggcctagggctgcctggcctccctctcccagtggcaggggctggcgtggtggccggttggggcaggggctcacctgggcggggcagatggcctcgcagagcttgcaggcaatgcaacgctcctccccggatgggtaccggcgcagcgcatgctccccacggaagcgagggctcagcgggcccttctcgaacgggtagttgatggtggccggttcccggaacaggtagctcagggtcatgcccaggcctgtgggcagcacgggtgtggtgggcaggggcaccctcctcccccatgcatccgtgcccacccggcaccttccctgtcccctcatgcccaggacgcacctcggaagagctcagtccacagcagggtgcgggctgcccggtcagtcactgacttcatgtccatctcgggatcctgcatgttcacatactctgcagagaggcgggcagggaggccatggcaagaggcctcacacactgtctccctggagcctcagggagagcagcctggccctcacttccaggtgcaactgctgggctacaaaggggctgtacactcaccacacctctccccagcctcagcaaggaccctggaggccgcctctggcctgagcccgtccgtgcctacctctccctgtgcttgggtggccattggagcccagacgcacttccctgcccaacagggcttgaaagaggaatcaaggggggtaggtggggggcttgagcctttgccttcaccagggactggcaataggcacaggtacccatggctcacacctggcaaccccctccccatcacacccagggagctctgagatcacacatgctaacctcggcaatgatggaccctgcccctgtgaatcagagtcagtctccatcaccataatcattttaaaagtggaaacaggctcagagaagaacgcccctgacaaagccaggactggaactcaggtctcttcccctactccagcaggaccagtcaggaacacctgaggctagaggccacccaggtactcactgtaggtggctgccactgcactgctgtggaggctccggccaccaggaggtcctgcaaaaagaagggcgtgacgtcataccaggagactggactcccctacccccagcaaaggcttctttggtcctacctgcacgtgcagcctgggccagggcccgcagcagcataggcgtggtcaggcagcgcatctggtggcataaaaagggatggagggtggggtgtgcccaagaaccatcctcttctgagactggcaccgcaaggatcccaagtctccactgacatgtgtcactttgccctctactcgcaccccattgctgtcagaggcacagatggctttcctgttcccagcgcctcccagctttccatctgattcagcttggctgagctacaattcagtttctgtggaccccaagttctgcctcacctaagaaaccttttaaatc

SEQ ID NO: 1884545 - DNA, 4001 bp, Homo sapiens
ggagtgcagtggcccaatctctgctcactgcaacctccgcctcccaggttcaagcgattttcctgcctcagcctcccgagtaggctcccaggtgcgtgccaccacacctggctaattgttgtatttttagtagagatggggtttcaccatgttggccaggctggtcttgaactcctgacctcaggtgatccacccgtatcggcctcccaaagtgctgggattacaggtgttagccaccacacccggcccctaggttcttatttctgctttgtccctgctagtaggatctttgtttctctatctgtacagggagggggtggggccagatgcccttagtctgaggggtctttagttctgctgtggggagttgaggggagtgttagggaccaggtcatggggtggctggctccaggcaggtgccctgacccctcccccaacagccatcagggggtagtgaacaaaaagtctggtgtgactctttccaagtgctcccttccccggttgcaggagtctagatcaatcctgagttactggagtccccttagggcttctgacttgctgtgtgatgcaggggtgccccgtgccccccacaacctcagctgctctgtctgcgaggggcacgtgtgagatccaggcctgcccagtgccctgtgtaatgatgcctcacattcccacgccgcttctcagtttgtcaagcgccttctcgtacacagtctcaccttctatgcccactctggctcctgctccgtgatgccccattctggaactgggacccagagagcagccagacctggactctggcctcggggctcagagagacatctcaattcacttcctgtggaggggaccatatctggggcaggggactgcagtgggcagagcaggggtcatgctttgccaaagctgtttccattgtttgatcttccatgagaatcaaaacttgccaaaccatcatgtaaagatgttaccttaacactttttgttggaaccatgcatttttggacagtgtattcctccctgccccagtcacccccaccagttatatttttagttacttatctgggggtgaaactggcacatatacaactcttttccctgccacaattctcagaggataggtattattattccagatgaggaaactggggctcagagaaggcctgtcaccggcttctggtgacacagctaggaaatcagagggccaggatttgaacccagctccacaggccctttgtgctgctaggttgtgggtcctccccagactcctctcccagagcccctccagccctcctgggctcattcttctgctctggagcagatggggcccttctcggctgcttaggggtgttttgagaaggatatgaatgggctttgtcacgtttgagaggttttcatgagacccagagccagagatactgaaattcctgggaggggtggcatttgcaagggcaaattaatgatgagtagaatgaggtgatacccttctacccacctgctggcgaggtagcctggcctaaacctaggacccaggggatgagcccagggcctggctgcctgccaggtcgcccacctttactgacccaagatccaaaagattcttggttcttctgtgtttggctctgagtgatggtttcattcttgccatctgcacctctctgagtttttatctctctggcagctctctagggtggggaagtccttctatcagtctgccctcactgctacctcctggccttgtcttttttaccctggactggatggtgggtatgagaggtttgctgccctggtacctgctatctgctgaggtgtgttttattggggccctaaaaaggcaggagccaccaggccagtgctgccacctcttttcctcgtggcagatccaagaggatacagttcacaaagcaaagcaggctttggctctaatggggtcccctttgggttttatctgatacccacactgcctgagtgtcccacccaggcagtgtgggtatcaagtaaaactgctgaggcctggggaggggcagtgacctgcctagagttagaggcagaggaggtagatagcagagaatcagagcctgggcatcctgagcccagagccagccccctgccacctactcattcccagacacttttcaggagtgtggtttagaagggatggggtgattatctgactgtgcctcccacactgcagatggaaggcctggagatctaaggtcattcacacaggcctcatgaggacctgcagcacattgtccaggattcactttgcaggatgccctttagggtcacttgccatcatagctccccgctcacccccactcatttttaaaatgtggcctaatttacaaacatctcagtgctttaagcacttcaggaagaaacacctctatttgtgaagcaccgtgacaaatcctcgactcctcgtttttttcttagcacatttaagaaaatctgttccaccctagagctctaggctggtgaggctaggaggcaccttagggttatccattctgattcccttttctggaaatggaaaactaaggaccagagaggaggaggcagcggggcacagacaggaacggaggtgggaggaggctgagatctgcgtgctggtcaggatgaccgtggcaggttcttgttgggccctgttagttgctcatccagaggagctcaccacagtcactgcgacagactgccacactcaccctggcctggcctcagagaagttgagctactggcctcagttcacacagagcagatggaggaagagctggcactaggacccagggggcaggggggagcctccctggctggaagggatggcaggagcgctggtgcaggtagctatggagctctggccaactctgcctggggaggtaagagagcccagagccctgggccagatgctcttgagagcctagtctagtccatagcaggtgtgcgtgtgtgcgtgcatgtgtgtgtgtgtgtacacgcgcgttgtgtgcatgctgagaaggggtgctggtggacaagggccagagtgtggggctggagggagtcccggttcaagctcccaggtaggagtgagactggggtggagattttgcccacatctggccagcttgtgaaccttgagccttgtgggttggatcggcttcctgctgggtttgcacagcccagtgggaatggggttgggtgtgtgtaggcttggtgtgcctctagcttggtgggggatgcaagctgtgggcatctctgagctgctgtggggctgtcatccctgcgagttagtctcttgattgtcatgggggtgtgtgcccatctttggatctctggggtattgcatgggggcgtctctgggttgttctggggacagcgtgcctgtgtgtaaatactgtaggttgttgcagaggtgtgtacctgtgagtatgggaggtggtggagagaaggggttcaccgttaacttccagaattcctcttcttgcacctcgtggcccttcctcgcagagcccactctgtcttggcatctcctcacccctttccctgtccccgctggggacttgcccctcgcgcgcagggtcccctcccagggccggcgggggcgggcgctaggaccctgcggggtggggcggggcggggctcggagatccgtcagcttcacctccgcagcctggaaaatcccgagccgcggccgccgagcccccgagcccccgagcccccagcctagccgggaggggcgcgcggggctggggcccggggcggggccgggcggcgggacccactgctcctcccaccagagcccccgcgcggccccgggtctcccgggcagctgcggcggcggcgctggcaccccggccccggcgggccccggcggagcggcgggcaaaggtgagcagcccggcctggagggcgcccctcctgccccgccacccgccccgcgcccgcccggcgtcgctgcgagttagttgagcaggtcgctccgcgggccccgccgcaccgtccctcccctcgggtcccggcca

SEQ ID NO: 1884546 - DNA, 4001 bp, Homo sapiens
cttctgatgagaaaatcacatcagccagagaaactgacagtaatcggaacaactcctttctcaagtaaaaaaagccttagattttaaaaagaaaaagaaatgagaaagaatgtatgtaagtagacaaagataatgaaacctttctcagctgtctctaactcatggacacgtcaagaaattaagagacatttcatgatgagctggagtattaggactatatttgctgaatttattttttcatggttcaatgatgaaacagtaaattccacaaatagatttcaagtttggtcaagcattttggcttttgaacattaatctcctgagcagtgagctctgtacatgcctgggaaggttcaacacaacaatgacatgtgacagccaaacatccaagcactgagcaatttagattctcatatcaccaaatgggattttgtgggtggaggagaaggaaggacccgaagttattttgctgttattctgttacagctctttcttctctgtgttgatgctgccaaaagctatgctggcagcacactggattttcagtgtttatattaactcgtcttaatcaaggaatcctgacttaaccttattctttctcacagacacagttcaatgctgcaatggagcctgtggtgagcactgattcaataggtggtttgcctccttagacgcagaatcacaggactagaaggagtgaaaacaacactttatctctacattggcttcagggaggacagtgcccaaaccacctcaagtacagaataatttactctcatttagaagatctccagacagagctcgaatggctcccttggcaacaaattttagttttaacaatctttgtagctttatccttccctccagataatgccataactgtgtactctagattaaacgttttctccttttctgcccacagtgcttttgaagccaaacatgatttcacatatagtgttgggtcatcattaagtcacctttcagaagtccctctaaattaaggagtcctcatcctttccttaaatttttcatgtgtcctgacctatgagaatctgttatacgcatgtttaatttctatggaatacctcatcatacaacttgaaattctgattgactagtggtttttttcctgcataagtgctacttcatctatgcctcagtaacaaacaacaacaatcacttaatggaaatggtggcaggcagaattctaagatagctgccagattcctgccgcccctggtgtgcattccttgataatcactctcctttgagtgcaggcagacctgtgtgtatgataccactgctatgattacattgctcatcaggcgactgtgagctagccaaaatggagaatattctggtgggtctgacctagccaggtgagcccgtttctgagtcatagagattgaaagtgtgagagggatttgatgtgagggggaattctctgttgctggttttgagtataaaaggggccatataataaagacttgagagtggtcactagttgctgagatccatccctaattgaagctagcaagaaacacttctaccaacaacttgaaggaatttggaaaagaatccttccctagtcaagtctctagaggggaatgcagctaactgacaccttgatttcagcctcgtgagaccctgaacagagatatcaaccactcagttgcctggacctctgacagaaatgaaagataataaatgtctgttgttttaagccactaagtttatggaaatttgttacacagcaatggaaaaccaatataggcccctatccatgagttacattgtagtaaacacctttcctacattatagatatctcatctaactcctacagcaacccttgaggtaatcactgtgtccattgtcagagcaagaaaactgaagctcggcttcataaacagaagcagcaaggattgattccttaaatactgtgaattccactctcactttatttgaatttgtgacagtgaaattcacagtattctttaaacattttacccccaagcgatgctctttcctctgaattgctttgcctgtcctaataattttatttatacaggctgatgctggtgacttgggaatagtatttttatccaaaccatttggcttcttataggtatgagccactgagggagctattttttatttaattgtgctttggaaaaatcaaacgtagccttgagttttaaaattattaagcttacactttttcacaaaatagaaatggagtaatatagctctgtccttccgttttttaaagccaaaaaatgtaagaatggaatgtactggctcactgctcccacggtgtccttaccagcacaacttaccccatccctccctagcccactcttgaggatactttcttgccactgtcaggcttactcctgcctcctagactgaggaaagaaaagcctcctggtttggagctcataatcaagtcagccttgctgcagggctcattttaagccagtatcctggaccaggtgagtctttttattcatctctgctttgtatccaagttccatttatcaggttactaactggccccatcatgcattccttcagtaattactttatttttagcactgccaagaaagcaagtcttttcctacaaaaacacaggatttccagtggggttaaataaatgtgcctatgttctcacttgagacagcaaaaagggaaggagcgaaaattgtggaaagaattgaagacagagggtagagggtagggtgccaagtgtgggggaaaactgaattatgaatattaaggaaaaatgaaaaataatattaaactgaaatggagagaaataatataagtgagaatagaaaaacataaaacaaccttccccaaaacaaaggataaagaaaaaagaattcaggggaagctgtaaatatctaagacatagcagcaagggcctgggaatacttatagtgtttgaagttctgagctttatttcgctgcagtgaggatcttaaagatgcttaaacatatgaataagcaacaaagtaatgtgaccgttcagctacaggaaaggggtcccaatccaggatccagaccccaagagaaggttcttggatctctcacaagaaagagttcagggcgagtccatagagtaaagtgaaagcaagtttcttaagaaagtaaagaaataaaagaatggctactccatagactgcatccacgacggctgctggttgcccatttttatggttatttcttgatgatatgctaaacaagggatggattattgatgccctccctttttaggccatatagggtaacttgccatggcatttgtaaactgtcatgacgctggtgggagtgtagcagtgaggacgaccagaggacactttcattgccatcttggttttggtgggttttagccatctcctttactgcaatctgttttatcagcaaggtctttatgacctttatcttgtgccgacctcctatctcatcctgtgacttagaatgccttaaccatctgggaatgcaacccagtaggtttcaaccatatttaaccagcttctattcaagatggagttgctctggttcaaacgcctctgacagttttcagagattattgtcaattcaggagtcaaatcattagagactttacaaaaaatcagatgagggtaataaaacttatgataatataatattgacattttaacactaggtataaatattgttctaagcattttaactaatttaatcctgaaaaaaaaagtcctctatagttattactatttttatgcctattttacagataaggaagctgaagctttgagaatttaatttgctcaaggggaggccaggacaagaaataatgaagagtccgatgtggcaggaatgtaggaaacaagtcaatgatggaagataaatatggagacgtgatgaaggcaaaattctgaagggtcttagagcccattataagacgtttggtttttatggttagtgagaaggaaaaccattgggggtggttgggcag

SEQ ID NO: 1884547 - DNA, 4001 bp, Homo sapiens
aaatattatcccctccacttcatagatgaggaatgttgagaataaagggttttgttcactccgtttattgagcacctacatctctatttgaggcactgggacacaagaatgaacaaaacaggagggtcctgccctcatagaaagtatattttagtgtgaaggaaccaggtgatgtaatacctaagcacagtaatttcaagtaatactaaaggcagtgaagaaaataatgtaatgtgacaagtgatgggtcagggaaggcctctctgaggagggactgtgtgagatgaggcttgagtggtaaaaaagagccgcataaaatgtatgggcagtagagaggggctgaaggagctggagctggcgaagggtggtggtggaccagaggagcaggaagcagcgactgtgattgcaagtggggtgacttcgttataagaggcagtgcgggggaccaggaatccatccccaccaatgtatggaaggagacatgatggccaaggacaggcccaggtgactcagggaagggtgagctgagctggtgggcagccccagtggtgggtgaactgagcaggttgcaggggagcggggttcaggcttggggccctgtggagccctctgctattttgctgcagtgcagtcaactgacctgggggattgtgggttccctccacgccagctcgggctggttgtggtgctggtgcatgggggattgatgaagctggcaatcgccttgtgactagacccagctggctgccagaaagggagccaaaacctcaccagggaggcagagcaactgcttctgcccttttccacaacccccaggaggtcattgatcttaattaattatcccccctgaggattgtggaggaaccctcctgtctacagagaattactggtggatattctaaagaaccgaataagatccccaccaccaacttctgtcttgagagaaagaaggtgcttctgtgcaattgatcagaatgaaatcatagaactttggatctgaaagacacttttttttttttttttttttttttttgagatggaatcttgctctgtcagtggcacaatctcagctcactgcaagctccgcctcccgggtccacgccattctcctgtctcagcctccccagcagctgggacaacaggggcacgccgccatgcccggctaatttttttgtatttttagtagagacggggtttcaccgtgttagccaggatggtctcgatctgctgacctcgtgatccgcctgcctctgcctcccaaagtgctgggattacaggcgtgagccaccgtgcctggcaaggatctgaaagacactttaatgataatcttgtctaacacaccctaacttttaagaagaaactatggctcaggtattgtttgaatttagtgttaggaaaaatagtcggtgaaagtctttctgggaaaaaaacaaaaaccaaacaaatgcacttttcctgtcttagtaaacagaataaatcgattgcttggtcaaagagaggccaggaacaacatggagcggggcctctggtgctgggtactcctggggttggctcccacatcaggtactacttactagctatgttttcttgggcaaattgctttaagtctctaatttctcagtttcctgtttgtaaaatataaataataatgatatccacctcatggggttttttaatgtgaactgaaaaaataatatatacaaagtgctcatcacatcctgaaggatcattattcaatgaatgattgctgctgttgccgtttgaggcgcaggtgcagaagacacagatgagtggtgttgtggagcatgtggaaatgctgggggtggggggtaaggtggtctacaaatggcactgccgttatcttgagctcagccctccatagcatccttcaaagctgatttttttctttttgtaaatttccaaatacataggtgttatcctgtccatttgactctattttctgagagaggcaaatggataggataacacctatgtatttgaaaaagaaaaatactcccagttaagtgagagttccagcagatgaattagggtttaaaacagaactgtatcctcatttcatttcaagggtggcccagcatatctgctagtgtgagctttggcattgctcctctgagaggcaggctggagaatgagaccctctgtctaacccagccattctaggaccctgtcctttaccccattctcaggcccactcccaacccaactccagggcaatccagtaggtttataagatgacaattgatcttatcatcctaccagcatcatattatggtttagctgaaataatactggacagtgattctgttattagttatttccctcctggcttcaggggagaatgcaggcatgttgcaggaaaacagaagaaccatgcacaccaaccatcgactcacaagctctgagaagagaccatttgctggtgacgaagcactgacttgcccctttgctgggcttttcaggggcttggctgggtcttactatgccaggcttctttcccctctgtagaatggagtccctatcttcatgttatgcaaacggcaccttttcaaaataaactttagaggagtaagagagaagaatctagtgccctttctgagaaggaatttagctaggagaaccaaatgttgtcccatacactgggttaaaaagaaccagttatgaactacaaatgcagttgactttggccctgagctctatagggaaaagtagggagaaaaaatagtaacgaatcagcagcacaagcaatatttgcttgtgagttcttccagtcatgggcgtgaatgagtaattctgtcctgggatcctattgcctttgctttgtgccccaaggtatagagtttggaaaaataccagtgctggtggttcttctgtttcggggaataaagaaaaggaataccccattgggagtgctgttctttgaaaactgcagcttacctgagccctttgttgagatggaggccagaatgagtctgaaacagctggtggggaatccaaccacagggatcactcagaccaggacaacactgaagtcaagtttgctatggatgtccagaatgccaaaagagagggcagtctggaggccttttttcttgggggagttattcactcatttatcttctttttattaagtacctaccatgtaccaggcactgttctaagcagtgtggtgcaagaatggcaaaatttctattctatggaatttacattcttatggagagatgtagacaaaacacgagtaaacaaatacaaaaataagtttatttcagtgagcgacaagtactatgaagaaagtaaagttgaatgatatgctcaggagtgacaggggcaactttggatgaggggctcaaggaagaccactctgaggcagcagcatgaaaactgaacaatccaccaggtaaagaccagagagcatgatccaggcagcacaatagccaacacaaaggctccaggtgaggacatctgtggcttttcaatcaacacaacaatggccagtgtcactgcagcctcatgagttcgtggctgtttcagctttacacccagctactgtaaccccaactgcgatgtccactgacgtagccatttcctaggggagagggaggaagggatgtctagaactgctctaaggactaccagaaattactgattagaggactaatcctaccctcatcctcatctccacatttaacctaccattgagttctgttggttcatgctcccggttttctcctaggtaagtccatttcttttcatgttcattaccttcaccctggtccaaaccatctgcatccttcccctggtctactgaaccttgcccattcttcacactgtagtcagaatcttgtaaaacctcaaatctggctgggtgcagtggctcacgcctgtaatcccaacactttgggaggccaaggggggcggatcacctgaggtcaggagttcaagactagcctggctaacatggtgaaacctcgtctctactaaaa

SEQ ID NO: 1884548 - DNA, 4001 bp, Homo sapiens
cagggccaaagtggctggaggaaatagtacgtgaaaagaagggaatgggagataaggtcaaaaaggctctgtcttgggctgcgtgggaggcagggaggctggcaccagcacgaggtggaaagaaggctgggatgtgagatgggagaccagggccctcatcccaacccagccactaatgtttgtgtgacttatctttgggaggtacacagtagccatctaatcctatatattgagtagtcagtagtgaagtggcttgtcccaagtctctcagctgccgctgacagcacagttctagaaggcctggtcctccttctggggtgacttctctggagggttctcagacatccctgacacaggtggtcaggtggccagaggaacctacctctgagcaggtacagcgcaggcagtacatcaggccttgtggctccaagtaggggtgccagctctcgccgggggagtatctcttcccatggaaaaggcagaacatgtctgggcctggcaaaccgaccagtgccatgttagtcccaggaggctccagcccaaagaccctgtctcatttctccttctttctagctctaaaagagatgtcatctgggccactcaggcaaaagagaatctgctagacaactgggcatgctctcctaggcaaggggccagaaggtctgagtttgaatctcggctttaccacacacttactgtgcaacactgggcatgccactgtctctgagccttaacgcttatctcacagggcagttagggaatcaagcagtgaaatgctgtacagatttatatcatggtatcagcgttaattattatgattagacaaatgaggcccagagagggtaagttacacctgagggccacacagcaagtcagtcaccaggcagcgatgacagcaccagtctcctgactcagtcccacgctcctctgccctcacaatcatgcttgtttcctttttatttgtcccatttggcttatttagtacatcacctcacccttccctcccttcccacccctctctcctctcccatccccctcccctgtacacacacacacacacacacacacacacacacacacacacacgtgtacacattctctgggtcctgtagcccaccttttgaacaaagtcctcctggtgtgaagatcaccaggcacctgtgtagaggaggattggcagggatggggcctgaggccatggctctgggagctttcttgctttcacactgtactatgtccttatattttggtgagccgtgatgagaaggttgttaggaaactgactttcaagtatccttaaaaatggtcgttgctactactgtgatttgtgattggcacaccaatggacttttttgcaatcgcacatcagttgtcaatatctggatgaatgcttctaagaattactaaaatcgtttgttccatgggttggctatctctcctacaatcctgcattcctgaaacctctgcctttctcacctcccataacccactgatccactcctgctcccacctcctacccactcacctccagccctgggtcagacctcccagcccagcactgcagccttgtgccctgcccctctgcctcccgccctatcctcaccaaccctcctctacgcaggtacctagcgatcttcacgccagcagggaaaaacactccattgcctgagctcttttcaggaggaactgggaggctcagcacaagctaagtgccagtaaaggtttgttgaattaaatgagattgaaatatggagaagggaaccaacattattgactatcttctctttgccgaaccccttatagaagttaattatctcattaacattattgttttgaccattaaattagataacgcttgtaaagtgtttacccagtccagtttctgacccttagttgaatgctattattatgataattgtggtaacaatcacaaagccactgcaaaatggacattgtcatcttctggaatagatgacagtatccgtcttgcagtggctttggactgttaccacaattatgagaaggctcacagagactatgccacttgcctaaagtcctccgctaggatttcagcccaggactcccgcctccaaagcagagctcctttctcttcacctcatctctcatctcctgtggctttttacacaattccagggcctaaaggccttcttctctctctgccccaccagccaccatccccgactccctagcttattctcttagtcccctgttggtctaaaatggagaagctgcctctcatgcctccttctcattttccagagtcaagcgtcttagaaacatgggttcttacacttcctaaatcacattctcttagactttgaaacagaatcgcagagcattgaaagcagtaatgagttgggtggggtgagcggggagctcacattcagtgcaggaattccctctcagcactgggggctgggctggcgtgcagcccctgcctgacacacgcctccaggaaacaggagctcatgggccattcctaaccatcagaaggttttctttgtaaggagctggagttggcctctctcgggttcctcatattgctcctgctctgccctcttgggcctcctagaacaaagatttgagactgctgtcacgatgccttcagtctgtgcttcgagggtcgctgagagtaggaacacatggcttagttccctcgccattcccttcccaactccgcaaagtggaggagcgattaaagttcgcctctcacattcccagcaagccagcaaggcccggctggcccgtatcaaatgagctgtgtttatctctcagcctctactggcagagagggtgggacacgggcccagctggggtgctggtcagagccagcccaactctccaaggagtgaataatgtctttcttcctcagtcccctcctcccaccagggagggggtgattgcaacactgccaccaccttaggtctcagcctgttgctgaagaagccctgtcctcccttccttggggcagccctgtagcccaggtctctgtgccagttggcacccccttcacctcaccgcctgctcagagcatgaagacagaaagagtgtctcagccaatgcccaggcaggaggccccttccccccaccaacagacctggcagaggctgagaatgtggggggcctggcaggaggcctccagtggccacaatccccaccccaccataccctagaaggtgacaggcacaaggaagggtggcatggcctggagctctctcttcctcaagtgagatgagtgcccaaggccatgccagaaccaagcaggaggaagaactgccagacggcgacaggccgcctcagttcctgcagtgctggcactagccccaacccttgaacatggctggtgaaaacagttttagttctttaagccacaagttcactgtgtgacattcagagactcatcctcctttctctgagcctcagtttcccatctgcaaaataaggggagggggtaagctatgatcttcaaagattttctgcatagatactttatgaatccatgatttcaacatttgaagactccaaaattctaggattctaaggttcaggattttgagaattccatgtttctaagaacctgtctttccttagaacacaaagcttctagaattgtccaatgttgtggttctaagattcgatcattccaagattctatgattcttggatgtgttgatggtctcatacatcttaggctctcagaggctccaaagtgggttaggatgaagttcagggagccagtaggaccagtcctgagtgacacaggtgtgtcacctgagtgtgaaggaggtagagtttgtctcatacctcactcccttcccatacactccctttggtcctctgtggcgttcccacctctgccctggccttggacctgccctgattcctctcccaccccaccaccaagtctcatcccacctgtgcccatgcatccctccccatctcagagaccaagcatgacttttctcagggaccctttggag

SEQ ID NO: 1884549 - DNA, 4001 bp, Homo sapiens
catcatttgatgtgtgccttcttttttctcatttgcttatgcacgtgtttgctcattttgatttgtaattcaggatatgaacatgcagtgttactggggatgagttggttagtacttagcaagcctggaaataccagcgagtggagcctggcgtggtagcctgagctgaggcaggctgcaggttctcttcctgactgagtctggggtgtcactccatttttgactgccaagtcaaaggacaaagggatcaccatcatcagcagccagggcaggcgtctattgcttagggccgtagagcaggcgtggctttggggtcatctccagcggggtcttctcagtgtttgggaagaaggggcagggcagtctataggcccaggcccagcagcaggatgcccagggtccctgcaggaagaaccctcttccccaggaaagcaaggaagggttcgggaggagacagttcctcctactcttggaagtctgtgatttggtggctgggggtgcctgcccattggaagggccccttataaatgctttgagtttggagattttgagggaaaaaaagcacctgattgagagtgtagctgtttccaatacacctcccttccctgacggagaagggaaggaggcagaaaacaggggagagagcatccccccttcattcccacaccgccccactcccagagccaacctgggcctcccttcaagctcgtacttagtacattcaccatgacactgtgcacctgtgagctctctcccgctctcactctcttgcgtgcacacacgcacacgcacacacacgcacaggtatgcacacatatatatgcaggtgcgcgcacacacacacatctggtttccttgcagtctgctcaggcagcagaagggtgtcccatcctcaccgtcatcttttacttcccagggtgcccttggcccacaggtccccaagacccagccccaggcttggcacgcgctggcattcccaggcttttgagaagagggtgatagagcagggagctcctcacagacaggttatacagagtgtagaatatgttcatataaggctttggtacagcaccgatttcatgttcttatagtttgatttctaagtcatcttttagaagaaaaaaaagcttactgaaaaaatagtggttttatttacttttgagttacatacctgaagttcaaaaagtaagcctctagttgccattcaagttcacactcaaaggtgttctgtgtgcagctgtacaatttgttggtttgtctttaatgttgaacaaaagtcagccaacccataccataaagtcagctgcccaaactcactttaaccagtccatacatacatacagaaaagaaagagagagagagggagaacacaaaagccgcccctaagtcacccaccccaaacccctagggaaaaatcagaaagaagacaaaatacagcaagatatcaggagccagtgggaggaaggagattcagcccaactggcctcttcgagaacagcaccatgaagcaccctagcgcagtgatgttgtaatactcaacattcaagaaatggaaacgaggttggaacggtcttcacaggaagacctggcatggatcgggggtcgcccccaaagaaagtggaagaaagaaagagttcgaaatgagagcaagaaatctcatgacgaaactgacagtcatatccagaaaagaagaactacagcaagaggctgccgcgcaccgagaggtacagagtttgtaaggggtctgggggaggtagcccctccccacccacactgcctgctcacccccaccctctgtgtgtcctcagaccaccaggtgaaatggaggaaagaagctcatctaaaacttgcccccaggtgtgcgatgggagaattctatcctgcatgatcaaagtccctcctggggaagagaaaaacactgaagaccaaggggcaggagtcactgacatgaagcgggatgtggtcccttcacgtcagtgactgcgcccccttctgggccctctatccccagccccacacctggcagttaggaaattaaatctgaatgggaggtcaagaccttctgacactgatacagacgacttagcaagtggagcgttaaactgctcttctcccctagccaacaattcccctttctaacacctcagtctaaagttccagaatcaagaccatcccatcaagtaccttcctcccagtccctggactctgagactccaccctccaatgccacaggcaaccccctgtggacaggaagtgtgtgtgcaggcttgcctcttcccccacctcctactttcagaccgcccaaagtggatcaccatgaacatctaccgccaagaagagtggaagcgggaagcaggcagcaaaaatccacgacagagccttttccccaagctgctggttggtgacagtggggaagagggacagggcccacactgatccatgggagagtgattctcacacatctccctattcccgactcttgctctatatagtagacagaggtagcaagacagaaacaactcctcagatacctccaccttctaccaaagggaaaagcaccaaaattcaatgtccattctgctgtggggaccaaggaacgtgtcccaagcatggggaagagctcaggctcctggcagtggctgtgggccgtaaaagctccatcagagcacactcatccacctgtcgccccaactgatgccacaagcggttcccaggcctcctccttactccacataaagctgatctcaatgacctttgctccaagtgccttaagggctggctcttcagagaagctggaggtcccctctgacacccaaccttacctcatcttgctgagcagtggagcagaaaggtcacaggtaggcactaacatcccctccacactgtacaatttcaaggtaggggctatggccccatcttccctttccctccccaaaatgaagagtcctgttggaggctgaggaatagaatggtgacatgtgggccagtggctctcccagaccttgatgctgctgaggacctaatcttgggctggccctggtgggagggcaagccctaggacatgcccgaggtgttggagcagtttactctgctggttgcatgtggccagaagtcgggcagagtccacagaaagagaggggatggtgggtctagaagccaacagaacagtaatgggagcctcccttgtgcagagaccgtggtggtctgggaaggcttcaaggtaggaagggaacagaatttgcacctcttcttcttgcccaatccccctgaaaaatcttacaagaaacactcagctgcaggagcctgcaagaaagatcattcaaggcaaggatggtgccactgacagtggcaccagcactggatccttccagctgcatggacagagcccatttcccatcagcgtcctcggaaagtggggagtgttctcagcagttaatttgaggacccaaggacagtgcctgactgaatggcagggcctcataggtccatgtaaggatcaagagttagactcaagctttaccccaacctactcttcccataataccccaaaactgtcaaccaagcccttctcacgctgaaggtatctgctttcctctaaggaccaaactctatagacaagagctcttagggagtgccatgtcttggttaggaaaggggttagtactgcccttttctgagtgatgagcaggaataaggagccgaaaggttgcagtcctgagtctctcctcactgcctgcaccatctggcccagcaccagcttcaaatacatcactccgagctccgggcaagtcaggaaggagctagcaccaggagacgcttgctgaggctgcaaggcagagcccttgcatatgtgtgaggtctggaatttgctcagagaggtattcttcagggcacactgcttcctgctcagatacaagtgaactcctgctccccagaatctcccattgtgggtccagttctgccaatacattgttcagttttgtaagtccccggctggaggc

SEQ ID NO: 1884550 - DNA, 4001 bp, Homo sapiens
acagaacagtaatgggagcctcccttgtgcagagaccgtggtggtctgggaaggcttcaaggtaggaagggaacagaatttgcacctcttcttcttgcccaatccccctgaaaaatcttacaagaaacactcagctgcaggagcctgcaagaaagatcattcaaggcaaggatggtgccactgacagtggcaccagcactggatccttccagctgcatggacagagcccatttcccatcagcgtcctcggaaagtggggagtgttctcagcagttaatttgaggacccaaggacagtgcctgactgaatggcagggcctcataggtccatgtaaggatcaagagttagactcaagctttaccccaacctactcttcccataataccccaaaactgtcaaccaagcccttctcacgctgaaggtatctgctttcctctaaggaccaaactctatagacaagagctcttagggagtgccatgtcttggttaggaaaggggttagtactgcccttttctgagtgatgagcaggaataaggagccgaaaggttgcagtcctgagtctctcctcactgcctgcaccatctggcccagcaccagcttcaaatacatcactccgagctccgggcaagtcaggaaggagctagcaccaggagacgcttgctgaggctgcaaggcagagcccttgcatatgtgtgaggtctggaatttgctcagagaggtattcttcagggcacactgcttcctgctcagatacaagtgaactcctgctccccagaatctcccattgtgggtccagttctgccaatacattgttcagttttgtaagtccccggctggaggccagaaggaaggttccactaagaccccctctcccaggccggcccacagttcatctctccctcctcatcctccactcagtgtcccaggattggagcatcctatttgcaatggcactttatttccaattaaaaataactgaaaaaaacatagatgacatatttatactacataccacattcacactggctctaagaatctgcagcaacactaaacaggccatgtgttctccaagaccaagcccaggcagccagcctcacaaactctcccattgccatgccctctatgagcggtctgagctgtctgagctacagtgctacaaaccaagacaggtgtcaccgtaggtccctaggtagtctcaaccaccccctttctaatgctgtgaagccaggttttctctgaggaactggttacctttccacagccacgtggggatggagtcacagttttcatctcctcagccttgccctgttaagcccctctgcaaagaagttcaagtcaacatccctcccaagtggcaagagacacattggtcctggttctttagggctatcagatcctgcagctccacacaaccttcagctcacttgtccttcctgcaggtgggttatttgttttgttattttacaaacttttcatatatacacatttccatcagaaagacccaagcaactctgaacagagagaataccaaaggaagagcagggaaggaggtggcgtcaaggcatgagctagtatcccagactgcctgggaaggtagcactgctcaaaacatctctaagcacaggtacaaaaataaagcaaactatgacttcatatagatatagagatatatagactttatctaggtgttctttatatttatatatgtgtgcagagggcacgggcccctgcccatcttgcccggcactcatctcttgccctcccgctccccacacccgagtgccactcgcccgaagctcccagtctccacgattgcatctgatccttgcctcccacatacattcccctctctccttaaaatagaaccaattctgtagatttatataattttatgtacagtctccataaaaaatacattaaagatggtgcattactaatttgaccctcctacccaaacagaagttgtctagcaaaagagccaaacaaaggagggtctcctgggcctgacactacgcaggcaaatcagcatgtctgtacaaatctctctcacacacaccacacacaacagacacaccacaccacacacacaaacacacacacaccacacacgcaccacacacgcaccacacacgcaccacacacacacacaacacacacacaacacaccacacacaacacacaccaaaccacacaacacacacacacatcacacacatgcacaccgcatcacacacatgcacaccagacacatcacacacacacacacaccagacatacacacaccataccacacaccacacccacacacaatacacacataccacacacaataacacaccacatacaatacacaaaacacatagcacacacacacaccacacacagtccatgtaccacaccaaacacaccagacacaccacacacaccaaacacacacacaccaaacacaccagacacaccacaagcatacaccacacgcaacatacacacaccaaaccacactcaacacaccacacacactgcatcacacacacacacaccagacacatcacacatacacgcacaccacagatacacacacaccataccacacacaccccacacacatacacaaccacacaatagacacaccacacacaacacaccacacaatacgcacaacacataccacacacaatacacacaccacaccacacacaccacccagacacaccacacacagatacacacaccacacacaacacacacacacaccagacatgcacaccacacacagacatgcacaccacacacatataccacacacaccacatacacacacacaccccacacacacacacacacaccccacttacttcctgaatccagaaaagaaacactggactagacagctggctgggggttagagaccagggggacaacctggtgcctgcagaaggacacatgagacaatcccttctccagccctgccaggacaccgtcggccatggcacacctctcgttgttcatgggaggccatataaaacctcattgatagagtggctgacaactaccctttcaagaactgcaagatgaccgtgaggaggctcatccctccaccagaaatacagcttcatagaccactatgccaaaaggaggccaaagccctgggttctaccaccagcgtgaggagggctgggcactcgcccctcccatggcttatatgaaaaccccacacgtgcatgcccgcagcatttctaaggccgaaaatgcaagtcacctccccagcccaaccccctgccctccgagattccctgcccctcccaccacctccccatcgtaaaccacgcacatgttcacgatccctggagccatacagaagtggggaaaggaaaagggaagggaagctaactggtgtgtatacggggtggcgagggagaacctgccctagttcgcaaaataaatccaggaaatccagtgccacagagaggtaggattggtggagcacacttcttcaagacccgaaagaaaggcaggcccaggcagccattcacgtccccatctagtgtgatgggaatggtgacaaccaaggaccagtgacaggagctgagcatttgagccacggggttaaaactgtccaatctagctctcccagccagggctccaaagccggtagcttttcaccagctctcgtccgaaaccctaactactactactgtcttctacaccgcagaagacaacacccatgtgattttaatgactggccactgttccaccagagtatatggcaaccaagatacccagactcttccttctctaagatgtgagcagccattaatgacccctgtatggatgcttcatttatccttatcctacatgggatccctcaggggatggtggtgtctttggaccaaattcaatctactgagtgtttttctaacagcttaaaatgaggttgaaaaaaacttccaccttctcggcaacccaacacacagaacatctggtggggttattatacttg

SEQ ID NO: 1884551 - DNA, 4001 bp, Homo sapiens
ggttttcatgctctgtcctcccctcctttggtcttactgggtccctctgactgctctgtgatttttagtgatggaaaagggagtgaggagccagtctgggttgttgctattttcggatggccagtttaccctgaaaattcccgtgagaagggagatggcggtagcagcgacgtgcccacctgtgatttctggggtccttcttttctctttgctggttcagggactcaagtccaggccaatttgactcaaagtccaagggagaagagaaagaggggggtggggagtgccaaattcctttattttgccaattgtttctcagccaattcgtttttaatactttttttttttagccaattgattttttttggtggttgttttttttaaagccaatttctgagcttttgtggggtgtttctaaaaagccaattagttttaagagggttgttgtgggggggggggaagggggttagtttaatgttttgattttttatgtgtggggataattggggataatttggggggagggtatgtgaagggtgtttaaagccaatcgattttgtacatgtttgaagatgctgctgtgcttcctcagcccgatggagggggccgaggagagtagcctgtttcggggaggcggggcacggggactgggtcaggagaagccccagggggacgtggaaccgagagattttcgggatggaacctgatggaaacgtccgtggtcaggaggaggctgcaggatggtggcgccgggctgcagacttgcggcagttttgctcacttccgattgctggccatctctgggggggcgcccccgtgggcggggtcttgggtgggtagagcaatcaggggacggtgacgtttggcctccctgaacgcctcgagctccttggcgagcacgtgaccccggcgggcacgcaggagggcaggcaggcccctgcgcaggcgctgggtggactgcttccaggtgtcatattggaagaacttgcccacggggtatctggggaagttgtcctgggaggggaaggggctggtcagcaggtgcctgctctccacgctcttccgcctgagccgcccgcctgacctgacaggccacccctgtgactgatcagtgacttgagctaatgtccacgggcagagggacagaaggagccagcgtctgagctgctcccgggccacacagcaagcaaggaagtcacgggtccttgtccctggccaagaggtcccagaggccacaggaaacgctgggcgcccgaagccctatttctctgtctctagagagtgggaaaggggcccaggaccctcaccggaagcacggtcggaggggtcgacacgtccctctcggacttggcgggggtagcacagtacgtctccaggagggccaggtcacagctgcggaaacagcactcctcaacgatgccacggctgcgacggctcacacggcttgcgggcctgcctggaagtcccacagcacagagagagccgtgttagcaccgcactgaccccagcccccggaggctgaagggggagcaaaccacccctgccctcaggccaggccctggaaggacgcagccaccctgcgggtcaggggagggaagtgagagctggcaggcagaggcgtcccaggaagaagagaggtgagaggggaggtgagtgggacccagaccagcccgtggcctctgctgcctccttcctcagatgaaaaatgggcacaagctcttggtcccacaaccagagggacaccaccaggaccaaaggctcacaatgggagtggtttggaaaatgtgtgggatgtgagcccagttcaggggcccccacaggagggactgctgtccctgagcttggactctggcctggcaccacctaggaggctggaggggcccacaccacccctggagctgctgagacagggagacaagggcaggagaggagaagacgggaggagaggagtgaggaggcgtgatggaaccactcccttctttcctcccgtcttccccctctcccccacagcaatgctcagctggaaggggaaggtcgctgggggctccaccttggggtgccaaagggcaggtgccatcagccggaggagggagcaggagccccatcacgggggtcccccaagtgggggcttggccctcccctcctctcaggaaagcctggtgcagggaagcttctccctgggcaaggactggctggcaccaggccctgcagtgccacttcctacccccaaatggggcaggcaagagagagggcacaggagaggccagggcgggcaggggcttccagagtcaagcagcaggaacttttcagagagaagctttgaagtgcatttgcatcctgtgagcccatttcacagcgtgagtaagcagtggtggtaaagatgtcacgtggtgagtgtcaggtggaataagccgtgcggcctctgccagtaaggagcggcccctcccctgccccatcaggcatgcccaggcaccatgcctgcctctgcatccacccagcccccctatctgggggtggggtctcaaggacaatgggccatgcacccacctgccagcccccaggctggagaaccaagagagaaacatgaggaaaggctgaagcgtccttgaggtcagcaggtgggcaccccccacggcagccttggggcccaaggaggcgcatgcaccgctcacccctgccacccaccaactgcacttgtcttattgattttaattatataaatcactttattgattttaattctgatcattcaccgaacgcacgtcccttgtcagaatgtccaaaaggtgcaggaagaaaggcaggctcttcctccagagcctgaagccctgcactaggcgtgcggtgcctcaggagcaggagcctcacggcccccaacagaaattctgatgcccagggagacccctgtgagtgcccctgacgtctagggggcacctctggcccacccttcgaaggaggcgtgtgatgggaaaggcagctggtgtggatgccctgggacaccgcacgtgctcagaaacgcggcgggaaggtcaaagtctcagagcaagcggctgggctgctgacctaggagtgtgctcccctggcttgaggttgggcgtcctcaccggtcactctaggggcctgaccaggtctgaggaagcccctcccagctacttactgaagtagaagccgcggtccccacagacgaactggagggtgtccaccagctccccgccgcacagggtctcactggggcggtaagcagcaatgcagcacgaggcgaaggccaagaaggtgagaagcaccagcatcgacttccccattgggattcccattggtgtctgggggcgggagagaagtggcgtgagcggggcagccaggccaagccccaggccagaggtgcccctcccaaaccaaatttgccaacctacaaattcagttgaaaattgaaagcacggctttcctataaacattatttttattacaaaagtaacacacaggtcataatgccgaggtgagggcgcagggccatgtgcagaatgaagcgtccagaagcacacagaaaaggcccagttccttccatttgcaagaagcactagtaattttacacgaggggtgaccatctccacggtcattattgcaggagctcagcggcatccacagctgcaggggcccaggctggacacccgacctggcctccgtcctatgacaccatgggggcagggccagcccagcgtcacatcgccacttctcaggcctccagcgccagccaagatggcagacagccccacccctacagagcatgtgcatccaggaggaccagtcccttcctccccacaacccccagctgagcagggggggtccaggaggaccatcgccctcaaagcagcaggccagtcctgctgggccagccccgcccctccccctggcttttccacctttccagtctgcagctgagccaggcctgggtcaaggactccaatggttaacacaaccacgccacccatgctctagaaaccttg

SEQ ID NO: 1884552 - DNA, 4001 bp, Homo sapiens
tatgtttagatatccaaatgcttacaattgtgttacagtcccctacagtattcagtacagcaacatactgtacaggtttgtagcctaggagcaataagctgtaccatatagcctaggtgggtagtgggctataccacctaggtttgtatactctatgatgttaagatgacagaatcacctaatgatgcatttctcagaacacatccctgttattaagcaatgtatgactgtatacggggaccaagaaggatattctttttcataaccacagttaatgttgccaggcttagcaaataaaaatgcaggatgccatgggcaaattccaacagaaatgaaagctctgagctttcccagactaggggaactactacacttcctctgctgaacacacttagacactgctgttggatttgatgggttctgggtctccttggttaccctccaacatccaaacaataaatctaatccgctgggcaagatttctggtaagcagtaaatgtctgctatgatcttgctgataaaagtgaaggttagttgactctttttttccatgtcttgaaagctctgttgatttggtagtgtttctcagaaatgaactgaataagaattgtcttataaaaaacactgtttaacaaatttaaatataactcatcattagatcttgttaaaatgtaggttctgatgcagcagaactggactggggtatgaaattttgtatttcttaataagcttccagaggacatcagcacagttgtcctcctaatcacactttgaattgtgacagtcaatagatatttcaaatatgcaggtacctaggccctatgccaatgtattgattcagaatctctggaggcagtgtccaggaatattaatttaaacaaactcctagggagatatgagaaccactgatctatgggtttgaaatatcctctatcttattctcaacttgtttattttgtttctgaaagcccagtgcaggtccctcctgcttgatgcttttttcattgaccacctcagatgtaaattcattaacagttgttggcagcacttgctatttatcatgggctttcttttcttacatatatcctgtctcctcagatgttacttctcgaagtgaacaattatatagattcttgtagcctcagctcctaccataatgcttagcagagagtaaatgtttaatatgtatcatggataataatggtgatggtagtggaagatgaatttctctccaggacacgtgactgttgcccaggccttgtgtgattaaaagaacaagagtcctgctgactccacaaaagaaacaatcgttagcaaaaactgcaactcccaactatggcacgtttttcagaaactggtaccacaatccttttgtaccttggtagtttgaattttattatggtaaatggcactttaaaggaaataaagtaatactttgaacttaatatgtcttttatctgtgaacctcaaagcagcctaatgccatttattaagttactgtacagccatgatgtaaatattatcataccttccttacaaaaaagctgactagggaaagagttgtaatgtacttgcccaaaatcatagccattctaagaaggccaaaccaagaaacggaggagtagctaggtggctgacaggtcagcacttctcagcatttcccagacctcaacttaggtgagctttccataggagagacggctaagaagtaacggaagactatttcaatttgggtgaaccaatttccttttcctccgtattcccattaccattgctcttggtatcttgtgatgcttatacattcttatatttaggttaaatgccgaccatcttccctcaacaacttccttatctattttccagtaatcttgttctccctacctcctagtttactatagcagcagagatattagattggtacaaaagtcattgccgtttttgccattacttttaatgccattatttttaatggcaaaaacagcaattacttttgcaccgacctaataaaataactgccagctgaggggatctgaaatgagattggaaccctagtttgaccgctcacgaactcggcctcttaggagaggtgtctcagggagtcagtttcttctttgtgtgtgaaacggaaaaggactacgcccctgtaccttactgagggattgaggcgatagaacgcgattcgtaaactgcacagcactaaacggataccactttgtccccttactatgtcattccttgtttaatttaatgccagggccacacagcgcagcataactaatagggatagggcgtgtctgtagggaactacctcgaggtagatctttttcttttgaggaaagggggaacgcggagctgctgggagtcgtagtctcggcggcggtctccgctgagctcagacaaaggaaagaactacaactcccgtgaggcagtgcgcggacagctcgcactgcccctcctcccccaaccggcgcgtgcccccaagagaaactgggggcctgcgcgcgcgctggggacctgcagggcaagcgcaaaggcagcttgctagtggtagccgtgagagcagatcgaggaaaggagacccttggcaaattaaaaaataaaaagaaccgtgcactattgcctcaccacccggacgggctgtaaacccccactacttcggaggcgtggggagcgcgctcccgggctccagtctagaacttcggggacttaaatcagcaagggcgggaaggggcggggcctaaggcgcggggcggggccgtaggcggggcgggcggcggcggcggcggcggagccaggacccagacatctgggactgttgttctctcgcggcgcgaccgcctcagtcacttcgcccagagacccggacctggtccgctggggagcaggcggccataaaccccctctctcccggttccctgacgccgcggcaggagctgttacgaacaccctgcggttggtctccgatgcccttcagtgaggtggggacgcctggaccctggtgagcgaaccccaagccaccccccaccccaactcagtgtcttcgccggcccccggcccgtacgcctgtctggtcgccatggctgaaaacacagagggggatctgaactccaacctgctccacgccccctaccacaccggggaccctcagctggacacggccatcgggcagtggctccgctgggataaggtgggtacctggtcagcccggcaaacgccgtcgcctcccccacacagtctgctctttcctgtgcccacccagcgccccgcgggctgcagaggagatggctcgggacaccgagcggggggcagcggagcagggcgttgccacccacctatgcgtggggttgctccttcggactgccagagccgggcggcaacatctgcatcgcttccttctgcagtgctctcaattgtaacctcccttcctcttctttaccctctttcctttcaagtgctgtcttccctctttcttcaaaaaaaaaaaaaaaaaaatcatcatcattgtaagttataccctaaacaacgatttcctttccctttttctcccttgacttccttctccacatacctgaaagtggtttctggcacccttactgggcgtttctaaccgctatccgctttagttctggtctggtgtgtttcctccttctgtcgctaggtagttgctggccttttatcactccctggtattgtctagtatcaccttttgctgttgggaaaggcaaggcgcttacctcttctttctcctgctggcagctattttctggaattaatctgttcaaggaatcgtgttttccaggtttcatgtggtactcttaatacaggattgtttttgccttaaccattacttctctaccaacacctccccacccaccctccgcccccacctccaagttgtggtggtaattaaacctcgtgcgggcatttgggatgaatttgtgacaatcagaattaaaatgcagctatcttacttgtaaaagaggtccctggtagctccaaca

SEQ ID NO: 1884553 - DNA, 4001 bp, Homo sapiens
actatgtaagtttggttttttccatttctcttcatacaacgaaaaaaatgtgggctaaataaccctttttacctatggaatattcagcacctagaacggtgcatgccacatacagacactcaaaatacctgaatacattcatgtatacactatatacataaacattatgtatactgcatgaaaacagtatgcatttatgtatatgataattaaaaagtacacattgttctgtgccttatgtgatgggtgatgttaagaggttttttttttttttttgagacagagtctcactctgtcccccaggctggagtgcagtggtgcgatcacagctcattgcaacctccacctcccaggttcaagcgattctcctgcctcagactcccgagtagctgggattacagctgcgcaccaccacgcccagctaatttttgtatttttagtagagacagggtttcaccatgttggccaggctggtctcgaactcctgacctcgtgatctgcccatctcggcctcccattacaggcatgagccaccgcacccggcaagagtttttaatttttgctcacagcactaactttatagcccaaacccatgcacttgaagtggctctactctaaccagtggtttccaccctaggtccattcttccctccatccccagctcattatccacatagcatgatcttttaaaaacttgggaggccaaggagggaggatcacctgaggtcaggagttcaagaccagcctgggcaacgtggtgaaactcccgtctctactaaagattagccgggcacggtggcgggcgcctgtaatcccagctacttgggaggctgaggcaggagaatcgcttgaacctgtgaggcagaggttgcagtgagccgagatcatgccagtgcactacagcttgggcaacagtgtaagactccatcttaaataaagaaatacataaataaataaaaataaataaataacaacgcagctaaatcacatcattccctcccctgaggccacgatgcacgcaaagtactgaagccctaaggtacttaaaacaaaaacaagcaagtcttcacctctgtctgatcccatcccaacctacctagccaaccttaccatgttcactcttcccttccctccaggccaagtaaccatggccacagaccccagctttgactcagctaaatgctaagctctcccttgctctggcctttgctcaagtagccccaccgccaagaaagctctcatacctggttcctcttagccttcatccctcagctctaagccaatcccctcgaaagcctcacctttctggaccacagtgtgcctggcagcccaccccactcagtcgagatcatggatttcttctgaaccacttcattctatctggatgtgtctcgcaacctgcacctgctttgagcatgggtatattgtgaaagtcttctgcaggcagagaccctgtctctaccactgactgcaggagcctagaacggtaatattcacacagggctcaacaaaataggaggaaggactctgtctccttgctgacaattaaaggtgtaggaacaggaagacaagatggcaaattcagtgtgtgcaaaagagagatgtaaatggccaaatattattctgaaaggatatattcaactatttcatacaccaaagacgatgaaaacaagtatggtattttaagaggtgttttgccaactactactaagaaacagtcagtaaagcagatgagggggcaccatctgaaggggcagtcattagtatttattctcagggaagagtcatttagctagttttaccttattccaattcttcctaatttgttcactaaagttaagcttagcaagtaccttgtttgcagcactcaacaaattacagttgtagccaattttgcatcatattaggttgaagcaaaaataattgcggtttttgccattaaaagtaaagcaaaatccgcaagtacttttgcaccaacctaacagcaatacttgagaaaagcttctgattctttatacctaaacctggacacttccaacatttggggccagataattctttgttgagggggctccactgcagaatgtttaggagcatccctgccctagctgtgacaaccacaaatacctctcaacaccaccaaacaccagcgtctcctctttactctcccccacccccgtcccccttctccccgcaagcttgaccctggtatctgccactcggctgtcatcctctagtcctacacaattccgccaggttgttcttttctactgccctctgccctcggattctagcatcctagtttgggctgtaacacttcatgcccacattgcaggaactgcctcctaaatgggctgtcttgcaccctctcgcctcctcaatccatccagcacaccttccactgcaaccagctgaagctcacccatcactttgacagggaacacccctgacacaggtagacttctttttcactaagtttggatttgatttgaagacctcattccttagaatcttctgagttttgtaccccctgcttcagggattggcagattgggagagagactggcaaaatttgggacctcacctgcaatgaaaggtgaacagtctctcttctaggtttcacacaaaagagttcttcaagcaagaggtcttctaaaaatctcatttgttgctttcaaaaagactgtaaaaatcactgcactccagtttaaaataaaatctccatttgaaaatgcaactgaaactttaaaatgaaattagagagaagcccaaaggcaatatttgctttaaaaaaaaaaaaaagcactcggtcagtcggtcaggcatgatggctcatgcctgtaatcccagcactgtgggaggctgaggcgggcagatcacctgaggtcagaagttcaagactagcctgaccaacatggtgaaaccccgtctctactaaaaatacaaaaatcagccgggcatggtgatgcacgcctatggtcccagctactcaggaggctgaggcaagagaatcgcttgaacctgggacatggaggttgcagtgagctgagatcgcaccattgcactccagcctgggcgacaagagcaaaattccttcttaaaaaaaaaaaaaaaaaaaaaaagccaggcacggtggctcacgcctgtaatcccagcactttgggaggccaaggcatgcagtggatcatgaggtcaggagatcgcgaccattctggctaacatggtgaaaccctgtctctactaaaaatacaaaacaaaaactagctggatgtagtggcgggcacctgtagtcccagctactggggaggctgaggcagaagaatggtgtgaacccagggggtggagcttgcagtgagccgagatcacgccactgcactccagcctgggtgacagagcaagactccatctcaaaaaaaaaaaaaaaaaaaaaaaaaaaatcagcactcaaaaaggaaacatacatgggatcaagtcatagaataaacattaggtagctgggcacactggttcatgcctgtagtggtagctactcaggaagccaaggcagaaggatggcttgagccctggagttggagatcagcctaggcaacacagcaagaccccatctccaaagtaagactaaacaccacgcacacaacctctcctacctccctagcctccttctttgccactgccagatatgtcatcacaaaccctccctcggtctgacacagggcatggggaagagtagagactacagcagggtggaacagcccacacagtggccaagacgggaattggaggccaagggctgtgtctcccgctgggcaggccacttgctctactgtctttaagtggttaagtgactgggcaggggcaaatgggggattctgattagaaactggacaatgtcatgagaagcagactggaaaaaaaaaaaagaaactggacaaggtagcctaagcgaggtgagtgggttctgtatgctccctatcaagtaatgataaccaatgtctccagac

SEQ ID NO: 1884554 - DNA, 4001 bp, Homo sapiens
acaaacaaacaaacacacaccaaaataaaatactagccttaaatgcattagtaaattggtctatcatcttagagatgtgcctcaagagaaagatgaatgctaggaacatccaggtaataaagaatcaaatctgtgagccttgagaaatgattacctccaaaacatggtatctcactgaaactgagaacttctctcaaggtagactctttctacagaagtctgtagtggtaaacagacctttacaaagacaaataccacctttctttctcagagatatgttcttctcaactagctgttcccaaagtacgctatggggaccagcactgcaccacctcacagcttatccagaatgctccctaactaaagtgctcccactttcactcatcatcactatctgctaaggttttttgttcatttatttgatatttgtgtatcatgtctctctttgcacctccacctcctgtaagctcgacgaattcaaaacctcatctgttttatcatccctatatcctgcagcatccataatagcaggtactcagtaagatttagtcaatgaattaatgaatgtcttttagtcagtacaatgtagttttgtaatattacttatatgacaatatgtgctgttttatgaatgaattcgtaatttactgtgcttaggaaaagaaatgccaattttctattaaagtctggttagttttaatgctgtgaggcagacacagatgagaaaattgggatcttttgccataatgaagagaactatgtgattcccttaaagtaattatttttgtattacccagaccatctctctctctctcttttttttttttttttttttgagatggcgtctcactgtcacccaggctggaatgcagaggcacaatctcagctcactgcaacctctgcctcccgggttcaagcgattctcacgcttcagcctcccaagtagttgggattacaggcatgcaccaccatacctggctaatttttttatttttagtagagacagggttttgccatgttgcccaggctggtctcgaactcctgacgtcagatgattcagccacttcggcctcccaaagtgctgggattacaggcgtgagccaccatgcccagccttacccagatcatctctacagctaccatgttataaaagacaaaatactaaatgctaaagctattaggtctctccttcaaacttctcatttataaatgtttggtcataacaaattttattggatgtcctcaatgttctaagtatgctgttcagggccagggatacaaccataaataaatacaatcttggctgtcaagaaattcacaaactgactgggaagaaaaacatgtaaacagatcactggaagcagactgtgagtggtgctataagaggtatgtacaaagttggatgaggacacaaaggaagaagcatgttctctgtgggcaggtcaagaaaggcttctttgaagacagaggctttaggtgggtgctgaagaaggtatagagaaaggaggagagaagtatgtcccacgcaacaggatcaacatggacaaaggttccagtgaaataaactccactgcacccaggggacggcagcttttttggtttagaccacatcatgtagacccctgaatgctaacctaaaaaagtttagactttttcctgttagtgctggggaataattaagttatttttagcagaaaagacatgcaaaactgtgttttacaaagatcattttggcattagtgtggagagagaaggaaactggaggcagagtcctggtaggaggctgcagcaataggccaggaagtattaataagggcttcactatgccagcgacagtgggataaagaaacgggaacagattacctactgtgcaacagacactatttaatccatttagatctcataaatctacgaagcatttggttggtgcacaagtaactgcagtttttgccattactttctacgacaaaacccgcaaatacttttgcaccaacctaatacaaaccaagggataagggatgcggttgctcaaggtcatacaactagtggttgggccagaatgaagctcaggaagtctggctctacactgtactctttacctccacagtctacatcccagtacttctcaaattttcatgaacatatacatttcttggagatttttgttaaaatacagtgggttctgatgcagggtctgaggctctgcatttttaacaatttcccaggcaacaacaacactgctggtttaaagactacactcctcagtaccaggcctcaggggactcctggagatacagaacaagaaggaggtctacgtaaagattttgaagtcatcactctattggtggtcattaaagctgtatgcctacactgaaaagagggctaactatgagacgggacggatacaaataactcagagaatgcccaagagtaattcagcaagatgagacacgatctattggattgaacaattaaaggtcatcttttccactggttatggtgaagtcagagccttggttatagtgaactgaagaagagaaagttaagagagatataggttatatacttttaggggcttttaaagagagtaagcaacatggggtaggagtttggaaaagggaaaagcatagtggtaaagaagaagtctgttgttgtttctttgtttataacacgatagaaaggataagcagatttataggcacaggaaacaatcctaataataaccaaaacaaataaaccgtacatagattagaaggatgtgttacggggaaaaaaataagaagaaaagaggaagcagaagaaggtaagtgaaatcagggcactggagagaaggtaggggctgcaatcttgatgatagggctgcagtgaggtgacacgggagcagactaaagggagataagagcacatcccacatgcccaagaaactgcgagaaggccaagatgcctggaatgaagtgagtagaggaggtagttaaagatgaagccagagagctcagccaatctattaaatataacaacaaattatttagaaaatgagaaaaataagttaccaaacctatcacttaaactgtgattaactcaaatccttatatctttgtttttgcctccgatggtgattgctcttcttattactatgagcactctcctcactacttttcaaagaaaccatgtaaactgtacattactatgctttgaaaattaataatattcaatctatataaataggacttactcgcagtcgtacaagaggcttctctggctggtgagaattacccagacgttcccgttcagcattttcaagcatttcttcaatctcaaaatttttaaaaagattaaaaaacaacgtagtaaactgagtttaacttggctgaatagcagcttattaccacaggaattttcctgaactacataatcatctttatttcctaggtcatttatgacaccttttcaaatataccttcttgtaatgctcctttaatactattccttaatgttttcctttcatgaaagttcttcataatttttcaatctctaaaataattcttttagaataaaacttaaaatattactactcatgtttcaataaggctttcctcagcttaccaacttaaaaccaagtaagtctagtttttgcagtcatatgatccatgggagactcaccagaagatttagggatcaataagcaaggactttagattatttatcttggaagagttcaaggtaaaagaaaataagactgatgttttcaaatatgtggagttgtctcatactctgagaggataagattataacatcttagacttgaaagagttctgaagacaaaagcacttgttctatattgttcttaagggtaaaaccaagttacaaggagacagcactagattattttcataaatggctgtgtgcacagtgattagatatctccagatggccaacttcatagctgaacaattctagttcttagaaagttcttgtattggaacaaaaactgccttcctata

SEQ ID NO: 1884555 - DNA, 4001 bp, Homo sapiens
actttgatgttttccataaaataggttgggaagggttagaacaaaaacgcatttcatttatctgaactactaagatgtcagaaagagaggcagcttgcagcctcccaagagggaaacactcagcccctgcaggactctccaagcttcctgcttggaccatatcactaagacaggaaccataatcagaaccctacagattcagaaatccacaaagttagcacttcccaaagagcttctgaagaaaccctactcttgtgagagtgctaaaaatggttttgctttagaaaaaagaaaactcatattagaagtttgggaactcttatgtgctatttatgcctctcttggagattcgcataagcatagtgaagactctgagactttctgcagcatgaaaatacattaacctctctaatttggcatttatcaaacttatttggacacaaaccagtttttttttggggggtgggggatggttatttgctcctatggtgaaaaggaaaaaagaaaaaactattacccctccacatgctcacacatccacacaatacggaaaaaatatttgaaacctagtccctggagctgggatgggacagaggtaggagcagtcactccagagtcagataaacccaggttcaatgctaattccaccagcagtgtagcctcagggatgatacttcaacttccagaagtttccaaagctttccaaaccttccaaagctttcacttagctttgctgtaagtgaaaaccaggcttctagagtgcttgtgtgtgcattagatgagtcgaggagtgcacaaaggtatctggtagggagtattttttaaatgtgtaaactattttttaaacgtgactctccctactctccctttgcttttctctttgcaaaatcacaagtagaggcattcgaaagcacactggtcaatttttgcaatgcttataaagctttaaatcaaattatttcacataagaggctatcttggaatatcattccattaccttgtctatatgttttcataaataaagtcaccccccctcaaaaaaaaggtagggccactttcatccatatgtatgtgaaggagaacctagtatttcatacagctatctgaaatttaatatcaaggaatttacctgtgtcaaatattactttatttaacagaatgtgatatcgcttgatatagtcataaagtgcattcctatcaaaatacagctgttattaacattactaacaactgctttaccccagtgatttttattgaaactataacgatgggcacttttgaaataagtgttcctagctaatttgcagagggctatctcccagagagagttcatattataattctaacggggttttcacacaaggtagaatgaggagtttaaaatgcttgaaagagagtcatctcgaggtcaccaataattaaataggagctaaaggaacggaacaaggaaaatgtgtaatcttccctggctctgaaattaaaaaaaaaaaaaaacagttatcagcaagacagtgcttctgcagggaggctgatctcgatctacagtaggattcctttcaaaccaggatgtctatttcaaaatgcccattaaaagtctatgatggactttaattatgagaggcagcagataagagtccagttcattccctcctgttgtcggggtggtttagagctgccaatcatcacccccttcaatgaggcccaaggtgcagatacccctttcaagaggctggctagactgtgagggaagggctcttaacgcacaccccacacgtggcgcctgtgaagtgcaatgaagggacctcctgctagggctgcaacaatcttcccattcccccaggatgcaataaccaagggaaccacatccctgcttctcagtgctcaaccttctgaggctcatcttctcaactctgttcacctccacagtgtttgtgggtgatttgatctggtactccttaagctaatggtgacaggggcctgttagcttaaggagtaccatattaaatcacccacatggttcttacacacacacacacacacacacacacacacacacagagtaaaggacagagcagcagcagtccagctcagtagaagcagcaccagctctacagtaagaaagaccagagtttgaatcctgattccttcacttcctgctgtgtggtcttgggcaatttacttaccatctctttttgtaacatggagactagatacctgtcatctataatacctgtcacctatgtttaatatggggcccctaattcataataggatacctaagaatgtcattccccaaaaaaagcagaggccctgcagtcaatgtttgtctgcctccatgagtgcctaaaaaacaactccctccaccccaagagagaaactcgctggagaggccagctgagaaagaaaaatgttaaataattcagaagcactaacatcaagtctgaggtaggtataaaaatagttacaaaacaccacactcctcttgttttccttacagcaaccttggctccctggtagaacagagggagggagggtctgacccaaggctggttctgggcctggggcagggactgtggcccaggagcctctctgggcttctattttggctcttctaatcactcctctttgtacaaaggtaaggcaggcatttgcttgtcacctctacattttaaaacagccttctgataggccgacttatttttaaactgaaagtatgctcagctgggccatttgaatcagagggaattctttgcatcctgtcttctaaagtagaccaactggtgagccttccaaggatgccggacccaatcccaaagcttaagttaaaaggagaaggctgggaggctgtcctaaacccaatcccccaaggagtcccatgccattggcctgtgtcatccagaaagactatgctgtccctaaaagcacagatactgggaagagaacaggaagattccaactggagaggtaacattgactaagcacctaccatgtgccaggcaccctgccagatcctttacctatattatctcctgaagccctcacaatatatcccaaatcagttgcaacccccacccccgccattgtacagatgaagaaaccgaggcccagggaagtgaagacacttcctacggcaaagttccactaaagagtcagggctaaaactgagttggtctgactcgtagcctgtgctttctcccccataccatccacaagagcagagcatgtggtttgaaagggtcttcatgaaatattcaactgcatttgtagctcctgtctcgttcaagccagctctgaatgcttacaagtgcatttttttttttttttttttttttgcaaggaaactgcatgggtacaaatttccaattcatacttaacaaggtggggaaacgggtcattcttggcctgctccagaacaaggggcgagtctatgcactcctggagcagcaggcgcagggagggttaaatgtgaggccagaaccaaatctcctgtttccaggagctgaggatttagaagagtctctttggttgatttttacaggagagaagaaggagtgaccagcaagtgagaggaggcctgcaagggtagaggaaggaggatgaataataataatcacaatacttctagtccttttggaaaatatgttctcatccttcaagtcgacgtcaaatgcttcccactttttgaagcttccctgcctcccccactaacctgggtgtgaaggttctttctcagatgtgtctgtctactttgtgccaggctccctggtagaagcttgattaatgctatttcatttcattcttacagcaggtattgttgtcatacattaaaaaagatggaactaataccaagagtttagtttgtctgccaaaagtcatacaagctagtccagtggcttccaaccagggacggacaatcttggcaattctttgctcagtgaacttttggcaatgtctgtcaacatttttggttgtcacaattggcggggaaggcactggaatct

SEQ ID NO: 1884556 - DNA, 4001 bp, Homo sapiens
gcagagatgggcctccagctcagactcgtttttgttgtcgatcatcgttaggtggtccaggatctgagggagacacatgcatgactgatagcactgccatttccatgattttctctcaagctccctcagagaccagttgcgattcttactcaccttgggcccttttaatttgcataaggtgtgtagcagggtctttagggtccttatgggaaattcacttttgcattgcttcagtttctctttggggaagaccttcatgaaaatgtggatatccagaagaattctgtctaggttaatgctattgatggtatcaggcaacagtcgaaccattctccagagacactattgaaaaaagaataaaagagttaggagtgactgaagaatgaggataatttgtcaccattcatcttccctaagctttgagctcacttctaaaagatggccagggctataaatgtggcacatcatatctttcaagttcagctgctaaaacatgaaaatttttaatcacttctaccatgacaccagctgaagtgtgtccagtcattcatctaatcatccatctctactccttcccactccccagagctaggggccatcatttaacctggtagaaattctctcttgggtttccttcgttcctgagagtaaagtagttcatgttgcttaaccaaatctaatgcaaggggacaaaatatctgatactaattcagtgtaataacagtattacaatgttataaatatgttcatttggtctctttcacaaaagagaccaaatatcatagggctgtagatatctttttccccaaaataaatgaaatctgtttcaaacttctttccttttgatcctcagagaattagtaaaatatttacaaaatatttcctccctttcactgtttgaggccacgaactgtttaggcctgaacttagaatataaattgtaggaagggaaaaactgaagaccaattcatatatatatatatatatatatatatatatatacacacacacacacacacacacacacacacacacacacacgtgtattatatacatatataacatattaagatatacatatataatacatatatacatatatataatacacatatatataaaaaaccatatatatattttttaagagatggggtctcactgttgccaaggctggagtgtagtggtatgatcaagctcacttctgggttcaagtaatctcctcaactcagcctcctgagtagctgctactataggtgcatgccactgcacctggctaaatttttaaaaatttattaatatttttattacgaaaaatatattttcaggtgtgacttggttgatttgagcctatgtctttcttagctccaattcctctttccccatacttttaacaaagtgattgcatctttgaaagaaaagagatcaaatcatttcaacttcaccttcataacaagctctgagaatttgggagaactggctgttgctagcaggctgtcttggagcaaaacaagtagggcactggaagaaaaacccaacacaacagcattaagtttcaaacctgcattccaattagaatcagcagttgaaagggcaagtgagattactctattcatctaataaactgagaggtcatggatcaggaattgtcctggactacctgacattcagttaagaaaataaacattgtttaagccttttaagtcaccacttggtaagtgtaaggtttgtgactctatttttcattgtcattggtagctgagaaagaataaaatgtacctgaaatgtacaagaaaaatgtaactgacaaactttacagtcctattatagaaaatgcatgatattggctggctaactaagtatttactagttttagctatggtctcaggctaaaatacctttggtccatgatgaagaagagtaataaatcaacttcctaggcacacttaaagttttaactgatatagttataactgatgtagctataactttaagtgtgcctaggaagttgattatgattgttaggttgcctaggaagttgacttacggacattatggtttctaagtgtaaacaaaagcgaggatgccccaggctctattggctgagagtacagatatacctcaggatgttggtctggtctgacttctccagaaccttcaccaccaagaggttcacagagcggatgacctgttgtccttcctcaagatcttcaatccgagaatccagcattaaggtgatgaggccatgcattaggtcttttagtactccagtggaggcctcccgggcaaggctctctatctgaaacagctatccagacatacttgtgtcagggaggtgtaaaactcaatatagagagtaaagaaatgtgggtggcatattctgataaatattcaattatgttgtattttttttttgagacggagtctcctctgtcgcccaggctggagtgccagtggcgtgatcttggcttactgcaagctctgcctccccggttcatgccattctcctgcctcagtctcccgagtagctgggactacaggcacccaccaccacgctgggctaatttttgtattttttttttttagtagagatggggtttcaccgtgttagccaggatggtctcgatctcctgacttcgtgatccacctgccttggcctcctgaagtgctgggattacaggcgtgagccaccgcgcccggctatgttatatttgtaaaaattcagagtattaaagaaaaaacaaaatcaccacactcccccaagcctctagtaataggcaaaattaatcggtgtgcttctaattgtgaaattttttgttttttttttgagacagagtcttgctctgttgcccagactggagtgcagtggcacgatctcggctcactgaaagctccgcctcctgggttcaagcaattctctgcctcagcctcccgagtagctgggattacaggcgcccgccaccaggcctggctaattttttgtatttttagtagagatggggtttcaccatcttggccaggctgatcttgaactcctgacattgtgatccacccgccttggcctcccaacgtgctgagattataggtgtgagccactgtgcctggccaaagtatttgtttttacatgtgaaattatttactgttatgccaaatttgtaatttctggctagttggtgtcattaagtccacccttttagccccagtttaagaaagaatattgaaatctgagtgagaatgtctttattatccttataatctgctctacaggtaaaacattaacaaattttttcccttttatttttagttgacatgtaataattgtacaaatttatggaatacagagtggtatttcaacacatgtatacaatgtatactgatcaaaccaggctaattagcatttttaatagaaccatacttatctgtggaaaggcagctatggcctaccatgcctgatgaagaaactggccggaagaagctaggtagtctgtaagcatgttactttatatcctaacagtaaggtgggatggagtgtagccaaacatccaatggaagccatcagtagcttgctatatacaatgcatgtaaaattctaccaagtgacacaggactcactgcaacatctgcatggactctggcttttgaacctctgtaggctgagagattgatgggaagctgaaattctgcagaggtgcccttaccgaaatcatgttgccaatgatacagctatacaacttgatgatctcgtccttctccaatttctcatctgccatgtgtgtgttgtagatgagtcttagctgcataaaagtggctatcagaaactgatcaatatggccggacatggcttcagctttgtcttcctgtctcaggacctcatcgatctgataacaaaaatttcaagatatattttccaagcttcatacttctaaaatagcggaagacactatatgaaacttctccataagaatatttattagcaaagtacttctaaagtcttaccttaaaaa

SEQ ID NO: 1884557 - DNA, 4001 bp, Homo sapiens
tgggaggctgaggcaggagaattgcttggtctcacactcctggccggggatgaggaggcttcagtgagctgagatcgcgccattgcactccagcctgggtaacaagagcaaagctctgtctcaaaaaagttttcctcctcatctaaagaagttaatatgtttttcgaagtggaaagagacttggaaggactttcttactcattgtgtagctttagatcctgcaagtattcagaagatcaattcccatgggagttaagcccaagttctaaagagtttaaaacctctcgaagaggaaggggccaccaacatacttgtcaaggttgggtccaggagcaaggagggatactcagagatgagttcagtgctcctcatctaatttcttcctgcaagggatgactatagacagtgggatttctcactcatccaaagaaggacagcagcaggctgagtaaatatgagaaacgtggggttggggacagagctaggggtggagacctgactttctttcacttgcaggcaacttgtgtgatcatggccacaactcctctggccctcagtgtccccatctgtgaaatgagtaatagcattggcccagagctacctgaatagcccagtcagctccaatgtgtcatgatttccatctccaggaacagcctcgagtgtccagtctctggccagctatgaacttcacagttcatgactctagtccagattataaaatggcagagtccaaaccacaggttctcagacctgcagctctatgggctaaaatgcccctctgcacacatctctccagagtgaacctgtaactccaaacgaggaaggtccttggtgtactctgaagcttggcacgtcacaatgccaaacattgtggccaaagccataaacaggatggagcctcctgagctggtaggggagggcaggactctctagcactcagacttcagggcaaaggtacaaaccgccccagggaggtgcaggatcagccctgctctggcaggcatggctctcctgatcagcatggatgtttactttctgccccaaaactgagtgggacccaaagatactaacacatctcttttcttttccagaagctagacaaaaggacatttcagagccagataaaactgtgtgagcagctctggggaagacctaatgtttccagtccaagatctgaaatatatttcagagagcaggtgatgtgattcaggggctgggggaaagggagaggaggggcagtacttttaccaacataagtggccactgcaagagctaaggaggtaggagcttccctacagtccccccacatggtccccaaggcacttaccctcacactgcctgccttccccttggtagccaggcttgcaggagcacttgtaggaggtgggtgtgttctgacacagggcgtcggcatggcagtcatctagcccttgggcacactcatctacatctgcaaaagagcacagctgacacctggtacaggctcccaggccatgtgtgatctggcctcggccctgtctggcatcatcctcaccagcccaccccgcttcactcctcacaagctacagctgcttgggatccctgggataaaccaaactgtttctgggtccctgtttccaggaacagcccggacactctacgtgaaattacccccaccatcacctactggccttcaggacttagctcaaatccacctcctccaggaagcctgccatgacccccattgtagctgccctcaccaagtgctcgcatatgtatggctttgcatgcacacatcaggcagggttgtcactgttttccttcctctctctccactagacaatgtcttgacaacagactgcgtctgtgtcccttatgccaagccagcgcagtacctggcatgtgagtaggcaatagtacctacatgcccgctaaaggaggaaaggaccaaacggacagacaagctctgaacaccaagcagctgtctgtcagctttctcggagctcagagcaagcttgtccaacacagcccgtgggctacgtgcagcccaggacagttttgaatgcggcccaatgcaaattcataaactttcttaaaacattatgagattttttttttatttatttatttattttttttttttgctcatcagctgtcgtttgtgttggtatattttatgtgtggcccaattcttcttcttccactgtggcccaggtaagccaaaagattgcaccccgctggtttagagtatttatgggaagtctgccccgggatcggagcagatgtcatccagggctctcagatgctgcgaagcggggatggtgtccccatggccggccccctgcactcccacccctgcccatcctctcaacctggaaacccgccttggcagaagtatttcctgggttgacactactccaggatattaattaaaaacaaaagcattttgaaagtattgcaagtccagtaagcacagcacgtccagagtcctctctggaaaccaaagttctctgctgaaaacctaggcttgttgctgcttcagggtaattcccagatcggaacaggcgctgttccgctgacagaaaagtctctggagcccaccccgaagccatcagcagaacttgccggcccccaaagaaagaaacggcaaagctgccaccgcctcgcggatgtgcccggcccggccctcagtttccccgcctacgctgaggcgcgggaccccaaggccagggtccgcaccctcctgcctgctcgccggcgacggtctgactagcaggcgctctggaggcatccggaccggggcgggaaccgtcagcagctccgggtccgaggccgggccgaaggactcagggccccagcggtcgtggcgccttggcccggccggcgggtgaggtcccggggggagcagaggcccccgcggagctgcagccgccagccccgagccccgcgcgcccggctctggactccgccggggacctaaacactcttcctggccctgcctgctgtgccaggtgcgcccccgcggccggacactcaccctcctgcggccccgcggcacggccccgacccggcgggacggcccccgccagcagcagcagtggcggcagcagcagcagcagcagcagcaccgcccaggccgccccgggacggttgcggcccgcgacccccatggatggctcagcggttgcgggcagaggcggcggagtgcgggcggtggcggcggcggcgcggggaggtgtgcgcggacgccctgcccgctgccgctgccacccccggcccggccccgcccgccccccgagccccggcctcattttcacacggtccctcccgggccggggcgggaagcgcaggcgggagcagtgccgccccgcccggcctcctcccgtcccctccccggcctcgggtggagggggcgcggccgcggtggcccgagcgcggctgtcagcctggcggggcggcagcaccgtgcctcgcgccccgcgcagccctggcacccagcccgctgccccccgcatccccgctccgctccaacgctcggagccctcggtgccgcgcctgttccagtgtgttacaactcgacccaggccctcatgtgaggacaaacagcccttctagattgaaatattcggggtcagggcgcccagaaagtgttccgtatagtccccaaaccccaaagccatcttggggctttccacgtgggaggtgggaggtgggagtggaaggaattgggggtgacttccaattcgggaaaacagctgtttgaatggagaaggtgaccctggcttctctgcccaccccagcacaccctctgcacccttctccacactgcccaccccaggccctctgggatcctccatcccacagccctgagggcactggtccacttgtcccactgtggggcacactgggcctagaatccctgcaagctacttatgtatatctcagggcagcctaaggggaagggggctagaggtcaaaggtgagccaccagagacaacagacagcagccccgactttgccgg

SEQ ID NO: 1884558 - DNA, 4001 bp, Homo sapiens
ttcaaaaaagcaaaaacacatatgacaaaggaagacaaagggagaatgcacatgagcagacctgcaatgtgcagcatacaaaacagttaaatatttgcacattccccatactccaagagcaccagcactgaggcctcactttatgcttgtggttcttcaggaataagaaactactgagcaagatatgtcactgagttttcttcaagcgttcatattgccatggacactgattagaagagttatctgcattaagcattacctttctgcccccaccccgcccacccttacctctgccccaaaggtaccagcattccaaatatttgttcatgagcttttggaaagcaatctgtccccaaagggaaagatagaatggggatgaaaaggaaatgtgtttgcatatcaatattttcaatgatattagtacaggggcacgctcaataggatatggcatcagaaacagaacatcattggcaggaataacagacagaagttgtttattagggaagaaaacatgtcagggagcagatgacttaaggaaatgatgcaagtgcttttgtgaaaggacaaatgaggtcatacaatattattatactttgagaagtgagcttaagtgccaactcaattcttagacaaacgtgtacaaaatcaggcagggctacagcaaccatttttgtcattttctcattaaaaaggaagacccagtagtaatttcaatacattcctctagctgcatttctttgcagttgttggcacttggtacaggacttctcatatgatttaaaattactaagtgattctttttcctctccctaatgagttggtagaggtcaattctttgcaaaatgagtaaattgagagaagcagcctcagctgtgctgttcaagtgaccaggctgccttcctactgagggtaaatgggctttcctgaaacaatccctgctttctgctagtgcttgtgctcctggctcaggagggtgtactccgaagaagcagcctggcttcagaaggaaaagaaagcagcctttaatttcagccctagagtgatcacgcccttttcaaacaccctcaggctcccgtggggctaatgttcaggggaggccagaattcgacaagctcaatagcactgtgagcccacacctgaatttagaacttggcctgggctttggtgtcaggaccctggcaaatcaaatcaggcctgaggacaaggctggagagtatcaaatacctaatgaagcaaaccgaggtgcttctaaaaggctgagctgggtacacatgaaaacaacaaagcttccgtaccttactggaaaagacactgcttcatatctgccaatgaaatagaaaagttgtcagcctagcggctcgtatccgcaaagcgaccttttttttctctctcccttcctacttttttcctttcttccttcttttctccttttccttccattccatatggctatttttttttttttttttttttgggagaggattgcctggcagtgtcccaattctaagtgacaaggagaaccctgaccctgtaagttctttaacaaaatggagataatttttatttttgatttgaagatactatgaaatagggagcaccgcaaaaacaaagttgcttaacattcttgaatctaaactgacatgacgggacgtttattaacggccgatctcagaggtggatttttgcctttgtagtggcattcatgcttcttgctattaaatggtcacagaactatcttagaagatttatgtagactcccaaagcaaactgactgtctcctaactgtagtggaaatttagtatgtccaatcatcaactttctgtaagaaaaaagggaaatgtctggatctgtggacagtgggttctgaactgcatgagaaccctggtgaaacgttttgctgtcccagctgcaggccaaacactgctctctcactgtagctgataactcactaccccgagaggcacagtgactcatcaactttcagtttggaccaacatctatggatagagaacaaaaaggaaatacataacttatatctcactaagtattcatgaaccaaaaataaattctatttctatgttatatttacacaattagaaaaatctaaaatgagatggtaaagtcatataaactttgtttaagccccactgaaaataaaatgaattgatccctatgattgtcattcttaatttccatggatatttagagccaaacttggctaataaataaactgcttatacacaaaatttagattcaaatacagcattactgtttgatccaatgaaaaagacgtttacaatcagatcattcctgaatagcctttcatttttaagaacatggctaaaagtaaatgaaccccagtactgaggcagagctggagctaaaacaaagtgttcatacacacatgtattttgcataaataaatgaaataacaagacataaaaatgactcaaatccggcaactgtgaggcaagcccacacgagtcgaaacagatgacttttgttcatgtagttttcgtacaacagtttcacattagtcagaagtgataaaaaataccatttatatccagtgcttataacacttacgaaacaacatctgtgagtgtgtgtgttttttgtttttttttacttactatgagcaaaatcaagtttcagtcctaaagaacagtcctttgttctccaccagcccagaatattattttggcatggtcataaaaacaaacaaaattaacctactatgctaaatgtttgcttttgtgcaaaattaattacatacaatacaatgctagccatacaacactctaccaatgcaacaaaataagaaagaagtgagagagagcaaaagcaaaagccaaagagaaagaaaaaaaacaagagtgaactgaggaggagaggtatataatcaaagaaatcagtaagacaataataaatactcattttttgagagaaaaaatgacctcctcctcatttgaaataaatgtacaaaaacaaatttctaatccccaaccaacatgaataacaaagagttcctatcagtaccttaatcagcttatagagagcactcccagctaacagaatagcttgtaatttcttggctagacctgtttattgctattaggccttgagcactcttaaataaatacaaaggtacactattttcttccaagtgacaaaatggctcaagaaatctgatggggccattcctatgtcctggtgatcagattctgggttgtcccatgaggtgaactatcccattcactgacattctcccactaaacctctctgggggaagccccccgatagacaacctgtcctagtttcaggaaggccaaaatgacatggcagagctccctgtagttaggagatggggaataaaacctcactgcttcccaccccagtagcatgtcttcaaagaaatccttgtgtgataagtgcagttcattttgttcacacgtaggcaggtccccatgtggctacagatagagtcagccagaggaactcatctgctgcccccggagctatctgttccccagagttaacagtaggaacatcccatatagggaatgtattcccctccttctcctcccttacagttttctttcattctctagatgtatcatgactatttgccaccatctttgctctgaggctgtcatgtggctttttgcatcctggggattttgcaatgaactccctagatgtgccagctgggacaaggcaactcagtgtaaaggtgccagcccatgacagcttcactgagattcctgcatggcccacgagccttgggcttcaggtttggccgcaggactctcctgcctggcagtcaccactgttgaaccttgctgctgaatggaattcagggggaaatgccactgatgcagaccctaccacttgtgaactgaattaggggaaaattctggcaaaagacttgaggtcacagtgaacctcaggggcatacctgtttaagtgtaagactatatacctatatcccaatacacagc

SEQ ID NO: 1884559 - DNA, 4001 bp, Homo sapiens
tatctctccaaactgctgctttacgcaaccctattccttgatttggacattcactcattttgtttctgtgcttcaggactggattaggaaacggatgattgactatctgagttgtcactatggaagaattagaaagaataattttcctcattgctagagtggaaagtgtttacagtttaatcatggtgggcttttttagtatctaatttgggtggatgttagcagcagtgtttaggctagtctggggaagaaagttgaggagcaaactggggaagagagaaaggagttgctctgaggaatctgcatttgaaaatagagaagtactcacacttggattaaaaaatgccaacattttctcaatacaacatcaacaaaacaaaattccccaaagcaactctagatttgttcacttcttctcctgatgaattcatagtgagtaaggcagaattgattcaagaacctttttttttttgtggttcatttggacgtgtaaatgtacaattcattcatcagctgtttctctaggcttttcccaggaccagaagggtctgttcttgtcatctggaggccagcattgttttctcataccttgtggaaacacagctggattgcaacagtctttgttctttcaaaaattaggactatcacatacaaatattttcctctggtcactaaggagggatttaatctggagtttagaccaggagccacagatttttctgttcctggcttcctccccgatttgctgtgggaaatctgcaaattactaaggcttcaagggcacaaaactgggattagatgaaggtaagcctgtgtgtcaaaacttaccagaggcagaggttacagttacagtcaaatgctgggagttcaaatgtgcttagaaatcaggaaacattaaaaatagctttctctgagattgctcaggaagatttatgtttaatctttctgttaatcaaagatggagctcagtgcctggttctagctatgtatttagatatatacatgtactggttgatttgttaattaggacaaactatctctattacaaccaatgtattagtggcaaaccatgaattattcgggttcattttgttttatctctagtgttgggggttcccaaatggaacagaaactgtgcattgtgattctgtcatggctgccaatgatgtactccagaaattcaaaaccacagagcctctgcatcacttttttggtggcggtcgtgggagggttgttagttttatctaaaagaggagagtctgtgaaaggaaagacaaagctttggccaatggtgacataattagaggaacagaataattagaaataaatcataacttccccttcaacccaaccactgctggaggtaaattggaagcttacggaagctcatggctgggttctagtttggggtcccgttctggactcccctgccaacgcaggagcattacatgggtgggctctgaaaaactgaagcctccttcagaaacacacgccctgactcaagatccggctggagtccaatactcctaaagccctttgaggacacgggctcacgaatcccctgcgcctgcctgcacgctcgccttcatccacatgcctcacgtcctgtgtgtcagtctttgtgaatgaatgatgtacacgcacttggaaaactatgctgctactgggagggggcgagagcgggtgaccaagccctcaagaatgcgtggagaatcagacggactttcccgaaacggtggaggcggcctgtgcacccagcctgcacacccgctcccggcccttcccgcccctgcctgggctccgaggcccggggctccacgcactgctcctccgcggtcgcggcccggccccgcgctcgccagcccttcctttcgctttgggccgcgggcggagattggccgcggtgctcggccccgcccccggctccccgccctgccccgacgccccgcccctcgctcccccaagcggacatcgcccggcccagggcgcgcggacccagcggccgagacgcggcgccgcgagaaacgccctaaagaggaggggagagcgcgggagggcgagagggagggagagcggccgggagatcgagagcgaacgaggcagccgccggcggagaggagggagcgggcgagggccgggcaggaggagcgggcgcggcgcgggcgaggctgggacccgagcgcgctcacttcgccgcaaagtgccaacttcccctggagtgccgggcgcgcaccgtccgggcgcgggggaaagaaaggcagcgggaatttgagatttttgggaagaaagtcggatttcccccgtccccttccccctgttactaatcctcattaaaaagaaaaacaacagtaactgcaaacttgctaccatcccgtacgtcccccactcctggcaccatgaaggcggccgtcgatctcaagccgactctcaccatcatcaagacggaaaaagtcgatctggagcttttcccctccccgggtgagtggcgacggccgaggcccccacccaagctctcggccagaggccgggggtcccctggacttcttccccctttcgccgttcccttctgggcggtgcatttcttcaggagcgggggatgctgttggcagctggatctggaggacgaggaggagaaggaggaggaggaggaggaggaggactgttggtggccctagacccttggtttggggggtggtatttattttcacagctgtgtttttgtgagtggtggggaaaagcttatagaatttccagcgccccattcctgctttttttattttcccaaatgagcgagaaccctctggccttattccttaatgttaaggggagatggacgctgcctcagaggacatcatcgcctgactccacgtcccccatagaactgaggctgggtggagggccccgggcagtctaacgggttggccttcaggcagattttcaaataaggtcttgcctccccaagcgtccctgtcacatgccttgcccctcttttctgggttgagggtaaggagatcggaggagaattgaaattatcctcttaactttgagaaacgtccgaccctattcatgtaggttacttactttacccatgtttctaatctgccataaatttttcttctggtaccaaaggtccgttggaaggaaagcatcaaacacccaaatgtgactttgtgtctttggtacatggtgttgtccaactctttcatttatatgcatttgaagaagagaaggataggaagtaattttttttttttttgtctttgacacaaatattggtgctaagcaacttaagagagtctggccttacagaatttctgaaacaaatgtagtttgagagggaaagatgctttcttttaggataaggcactgccagctatccttagagatgagtgattttggaggtgaaagtatatagaaagatctagggagaaggcagtgcaccctggaaaataattaatttcaagaacaggctcctctgttgtatctgattatcaataagtttagttgctgccccctgtggttaacacttctttgcctctgccataatttattgcttactttaaccctttcttacgctgcttaaactttcagcacaaccatactgatgttttgtcattctgaggtccttcagaaatattaataaagacatgtaggtcacgtcccctccctctgggtcccctgacattcagctccagggctgctgtgcacagaaggctgagattttgtctcctcgcaaggatgatggtggtgggagcaatgctgagagcgcagctggaaccatggagacatttaaggcacttaggcctacaattcagaaatgctgtttctatgatggttgtgtttgggggttcgaggaagctagaatgagttctgtttgtcagttgattgaaaccatatatagaagtgaaaagatagttcacatcaaagatataaactcaactaataggtcctttccttaagaacagcttgtttatatgtgttgttatgggtgtttatggggg

SEQ ID NO: 1884560 - DNA, 4001 bp, Homo sapiens
ttaatgggaaaattagctttatagtcatttcaattaaccagtatcttccaaagatctagaacaagtatgcattgatgttctatataactctagcagtaaaattcattttacaactcttttcttttttttttttttttttttttttttttttttggtgacagggtctcaccctgttgcccagcctggagtccagtggtgcaatcaaagcttgctgcagcctccacctcctgggctctagcaatccttccacttcagccccacaagtagctaggaattacaggcatgcaccaccactcctggctttttttttttttttttttttttttcctgtagaaacaaagtatcactgttacccaggctgacctcaaactcctgggctcaagcagttgtctcccctggcctcccaaattgctgagattataggcatgagctgctgtgcctaacccattttatctatttttgatggaacaattttgcttcccatccttctttaaaatgtaacctctattaagggcaggaaattataattaatcatatcatattttatgataataatctgttcttaagatcaactaacagtgtagagtttactatttttctattgacaaatcacttgatatttctctttctctcataaaagtatgtgtgagacattttaattgcaaagctaacatataatcttagttaagaaaaaaattcagacaatgtagaagaaaagaagtagactgccaccttcaactcttctcagaacctcaattttatgccctatctcagagattaaatgctgttaaatatttatctttgcagtatgtgtgtaatacacatgtattacataaagctttttgttaggtttcacgtgaatgctagcacattacacatagtgacctgcaacttttttgtttagtttattatgtttattggttttatttgtttattatgaacatttttagggtgcatacatgaagaatctacctcatttttttattgtttttgagaatccagagaatagatgtaccataatttaattaaccttttttctattagtgaacagtacatcagagaacacatctgtgtattcacatttgtgcgtgcatagcagaatcctagaagctgatttgccaggttaaaggacatatcattttttttttaatgcatcatgttaaactgcttttcataatttttttctgtacttagtacccatgagagtaactgtttcatctttacctaaaccaaaaatagtaacaacagcaataataatgcatagtcttttttgttttgttttttttgttttgttttgttttgagaccgagtctcgctctgtcacccaggctggagtgcagtggcgcgatctctgctcactgcaagctccgtctcctgggttcacaccattctcctgcctcagcctccaaagaagctgggactacaggtgcccgccatcatgcctggctaattttttgcatttttagtagagacagagtttcaccatgttagccaggatggtctcaatctcctgacctcgtgatccatccacctcggcctcccaaagtgctgggattacaggcgtgagccaccgcgcccagctgcatagtcttttaaaatgtgtaactctcagattatcgatgaggccaattcatcccctgtcaggtatcctttgctcattcacactagtggaaatttttgtttatttgttatgggtttgaggggctttttgtttgcttggttttttacttggcacttcgtatctaataactctttgttcatttggtgctgcttttttttatatatatgttgagcaataattgatcaatttattggacttttaacttttatatagtcaaatctgcctatattttccattatggggaattttcttgggatctggtgtttattagcccctcactcccaactagagtccatttttcttatgtgagctaaatgtgtgctgggacatttggctcaaatgtgtcccagcacacatttagctcacctaagacaaatagacaaatagttgggagtgaagggctaatatgtaagaccttattcacagagaataatagtctgttgaagtcagattttatgttaagtgttgcccctctgaatacaatctgtcttctggcttattgaaatatttcctcagtctttggcttgtaatagttttattatgttatgcctagttgactttatttttacttctcttaagtgggttcctgactttctgaatttgtttctgcattatcttttgtttgttttggaaaattcttaaccattatctcctcacctattgcttttgtcacttttgctctctcctctacttctgggactccaattatattgcatggcactttcccattgtattgtctatgccctttactcttttgcttttaatgtttttttctcttcctggataattttgtttctcacattcttcagtttactttcttttttcagctttatcaaatgatccttaaatccataaaatttttaatttcagtcgctatatttccaattctggaatttccattttattcttttttatagtttcatatctttgcaaaaattgttattaagcacaaagggtataattatagtcagccatccatattccatgggttctgcatccatggattcaaccaactaatcaaaaaaaaaaaaaacatggatggtttcatctgtactgaacatatagactttttttggtcattattccctgaacaatgcatcataactatttacatagtatatatatatagtattaggtattgtaagtaatctagagattattaaagcatatgggaggattgtataggttgtgtgcaaatgctgtattattttatatataaaggatatgagcatccatgaattttagtatggtcatgcaacctatccctcacagatactgagagacaactataatttaaagtctgtgtctgagaattccaaagtctgtaaccactggatctgtttagactgattttcttgcatgtggtcttaattcctcatatgcatgcaaattttttgtgtgccagtcaggtatttgcaaaattatttgcagaatattttgatgcatctgatcatgatattaaatatctcagagaatatttacagttccttctttcatattctaggtagcattagcaattcagaatcacctcagtcctatttcagagactgaggtaatttgatactaaactgtagtttcctgaggtcctgcctatttctgatttgccctctacagtatagctgttcagagtcccaactcaaagcaaggaagatttacaaagatcctaaattccagttccagcaccctattcccccaaagctcttagcactgttgctatgcttttctgccagctcttccagcataagcaaacaacctcaaggggaaattagctgaaattgcagaaattactttcctgagcctccagcttcctcctgatactcacctgtaatttttcaccatcttattaataatccagtgccttcaaacagatgttttttatattttgtccagacttttagttgccttcagaagaaaggttggtctgagttatctccatctttattattagcagaagttccctatattatacctttacattaagaaaatacggaagttggatagattatcttaaaacatatatattgtatatacacatatgtattctttttcttttaataaagcattagacctgacctagttgtgatctctggaaagcaaaacttaagtttttttcagattctctcatacctttcgggcatgattcattttttataatgtactcaagatgttagaaaggaaataggattttaacaccaagattgagaaatactgaccacctgctatatgatgctcattattccttatttaaaaatctatatttcacatacagtataattgcacagactatacttgtcaacaataaaacaaaagaatttacttgactcttaattccttctcatgatatttttgaaggaaagacttgaagccatgttacatttta

SEQ ID NO: 1884561 - DNA, 4001 bp, Homo sapiens
gggttcactgggctggtatatctgctcatggcctcgagctcctagaggagggaaagagatcagagctatcaaagaatcccacgatttcagcctggagagaacatgcggttatcaaggagcctggtgctgccgtgaaacagaggctgattttagcccggaaatgtagctgcagatcaatggcccttattagcattttctgaggccaataatctgaccactatgaaaacgtgactaaaggtacgaactctctgcctgagaaaaaccacatacaagaaaaagtttgcctacaatttccggagctttgtggaccagtgtctatagacaccaagctgagaacccccgctataagtcactgactggtggtacccagatctcaatatcttttttttttgacggagtctcattttttggacggcgtctcactctgtcgcccgggctggagggcagtggcacgatctcggctcactgcaacctctgcctcccgggttctagagattctcatacctcagcctctcgagtagctgggactataggattacaggtgcgcaccaccacatctaatttttgtatttttagtagagatggggttttgccatgctggccaggatggtcttgaattcctgacctcaggtgatctgcctgcctcggcctcccaaagtactgagattacaggtgtgagttgccgcgcccaggctcaatttttttttttttccagacagtcttgctctatcgcccaggctggagtgcctggagtgcagtggtgccaactcggctcactgcaagctccgccttctgggttcaagtgattatcctgcctcagcctcccgagcagctgggattacaggcgtgaaccaccatgcccggctaattttttgtatttttaggagagacagggtttcaccttgctggccaggctggtcttgaacttctgacctcctgatccgctcgcctcagcctcccaaagtgctgggattacaggagtgaaccaccgcgcctggccctcaatttctaattcagtattttcctcactacctatgctattatggaatcttgtgagctatggtcaagacattcaagttctggttctgagtaatctgagtctgagtaaagcgactgtaatatctatttcacagaactgaaaaataagaaagatgatgaatcaaagcatctagtgcctagcagggagtattttgctcaacaggtatttgcttccttcctaaggctgtagggaagatgatgagataatgtcttttatgaaagagggctgtaaacgtaaagatctgtacaaatgttaacttcattgtcaccggtcagccaatgcttctaaaatccagaacataacaactctagagaagtaaactgcccccattgttctgagacactggaattcaattcagtaaacaatcacggcccccttcccccaaaatgataaagacaatcactgccatttattgagcttccaattacgggccctctgtttggcactgagaatacaaagatgaatagacatcatcccagagctagatgcgcgtcagacggtggtcactaggaggcgtggccgaaaacaaagaagtccatggaacgtggccagagatctgtacagaggctgtgggcgctcctaggaaagtctggccaagtgcctgagagttggaagtgcttcaccaataaacatttgcccagggcattgtaggatgggcacgggttcggcagaagaactttccaaataaagataacacaccaccgataacagagatatacaaactggaaggtattcaaaattcgccccacgcctctcgcccttagaaatcgcgagctgagaaacctaaggagttcatggcaaggggcttcccccttccccacccttcagcccaagccggaggttccaggagcgtctagccctctggatctccggcgtctgaggagataagcgcggtgtgggtcagaccccgaggggtcctcgcatctccgtctggaactcccctcaacgctctcaccattttgccccgcgaaggctaatccgccgctccgccaccggaagaacacgtcggcaggagcaggcgcctagcacaaccggaaaaggaagtgcctccggcgcaagtggcattgagggacttgtagtcctgcgatttcgggtgtagagggagcaggggcctgcggggacctggtgtgggtggagtggggacaagcggtggagaagggtacgccagggtcgctgagagactctgttctccctggagggactggttgccatgagagcagccgtctgaggggacgcagcctgcactacgcgccccaagaggctgtgcgtggcgagcaggtcacgtgacgggagcgcgggctttggaaggcggctgaacgtcaggccacccgccgctaagctgagaagggagagcgagcttaggaccgcctgcccggggcaaccccgaaccaagctttagccgccgaggccgcgtgtcccaaaggccaggtgagaccccatgggaagcgcctccgggagcgacggggtccgcttggcgctgggggccgtggggagccggggtctggagtgcgcgggattcgcagtcaagaggtcccgccacttttccccctgtgagccttgggccagtcgcgtaagctccgagcctctctttcctccattgtagaaaagcggtaataagttccaccttatggggtcgtgttgtatttttcctaagaccttggacgagaaacatttctgacacttgagttgtttaggcccctttcctgcctacctgtctgtgggacgccgtgaggggatcaagggctacatggtctggtcctcagtccacactccagcagcgcggccggcttgaggcaagagccgaagggttgaacaggcctggagaggggacattagaggtttctgtctgttgtctcagttaaccctggcagcagccctgagagacaggcatggtaatcgttcttcttctgtagacgagaaaataaacctcagtggcttggtaatgtcacacggatggtaaatgccgcgcctagattcaaggccagagcttttgccgctgcagttcacaggggaattattcatattaatcaaatgaataattcattgtcaattaattattaattgattaataatccagggatggacctggaaggacgcgtgagaggatggcgagaggagggcacagctaaggaaaagtgggaaaaggcgggccttattccagctttctgttgagatcccagaatgtagggttaggttgggaaccagaacatgaaagatcgtgatgccatgctgaagtgtttggactgaattagaaggaagaattgaacagtcattgatgctctagaaagaaccctgtgaagaaagagtgggaacaatgaaaaggcctgatggagtctttcgtttcttctttctcttttcttttgtcttcttttcttttcttgacagggtcttgctctgttgcccaggctggagtgtggtggcacaatcatagctcactgtagcctggaactcctgggctcatgtgatcctcccaccacggcctcccaaagtgctgggattactgcccagagcctctgtgcctggccccagtagaatatttcttggagtattggacacataccaacagtgggcacaagatgagttttttatttttttgagacggagtctcactctcttgctaggctggagtgcagcggcacaatctcggctcactgcattctctgcctcctgggttcaagcgattctcctgcctcagcctcccgagtagctgggattacaggtgcacaccaccacacccagctaattttttttttttttgtatttttagtagagacagggtttcaccgtgttggccaggatggcaagatgattttaaattgcaccccctaaaaatcctttttaatagttatacatttaatacatattaaaatataactaatagaacacaaatattattgcttatgagttttccagtttagttttttaaaaaaaattctaagtgaatgaaagtacgggttttagt

SEQ ID NO: 1884562 - DNA, 4001 bp, Homo sapiens
atggcaagcctccataggccagctctgcatacctctctcctgcttctggctgttccttatggggcctgactcgttaaaggagattattatagtgattggcaggggctccctggagagccttgtggtcaggcaagctgccccaactgcagacagcatcagtatcatggcccatgaaatggactgtgagcccctggcctccctcttggggatgggagggggcagagactgagggaggaggacactgcctgcccaggatcacagcagctgcctctgctggtgctgagccggggggatctcctgggtcccaggtgcctggagagcacaggctgacttccctgtcccacccggcaccttgtggtcccagctgttggccttcctgcacaagggccggttcgttgggccctgtccgcccacccatctccagcccaggcctcaggatttctggcctctccccttggacctcatctccccaagccctccctggaagagccacgctggtcctcagatgtggagaggagggtagcggtgagttgatcctgggaagaagagggcagtggggagtatgccctgaggggtggggacactccaggtaggccccacagctttgggtgcagagccgccaagctgtccccctcccgctcccacaggagtggctgagggggctaagttatcagctgcctgtggccccacgtcccctgctgtattcccagggccccagaggatgagggaggggatagcagggcaggagggcttctgggagaggcctggggtgccccacccaatgctacccctctaggagacaagatatccctggtggggtgggaggagaggcctggaggagggagctggaaggaagcagcaacactgcggggactcgaaccccggcccagccgtgctggacgtgccaccaccagcgccttttgctttttcctgctcactctttcacagatgggaaggtgaaaagcaaaacctgagtgcggccatgggctgcactcagtaaaagaaacacctgcggcggctccgcgcctccctccctccctcccaggctcacctcctaccttccttacttcccttgtaaaggcatagccaggggacattgtcccccagcttcacatccacatgtctcctagcatggcacatgcatatcctgcccaaggagcatgaagtcagaccagcaaactgaacacgaggcacagtcctgcatgctctgggaccgagcactgagggggcccacaggtgagaaggtgctggcccttcagctctccctccctctgccttcacgagcagaggcacaagcttctgtgtgtatacagaaatttccagagtgagtctaggaaactcgagaggacatctctgtgtagtagggtgggataggtgagggcagggattttacttgcattttatacccatggcttgaatttttgactctatgcagatcacttttatcattaaaggcacaaatcttttcatctgaacagggaatctaagacctgtggacacttccggcaccctggcctagtggaaatggttctctgggtctgctgggccccaagcacctgaggtcacgcagacgcccgcctgcctcgccttccattctctgatctgtcagccaccgtcagctgtggattccttcctgggaactgccatcactcgaaatgaagtcggaagcacagggccccaccagcctttctcctgtcacttgactctaacctggagtccaagtcaccagggccccaggacccaaaggtacacaaagcccacctggaccctcagccggtacttgccccaggccaccctcaggatccacggtccacagcaccactgctgttggctcaggctctgcctcccctgggcccacggcgggtccgtgggagccccccacgagctctgctgtcctcatttgagagtcctgtcctggctgccatggagggagggcccctggagcccctcctgctagtgctaaggagctcagaagccctgcccagcagggtccagatgggaagcagaggctcagagaggactgtaacctgctcagggacacacatgtcaggccagggtgagagctgggtgccttctactcatcctgatgaatctgagcagaatcagccccccatttctccacaacttctctcttttacacacacacacacacacacacacacacacacacacacacacacacacacacacacacagtctgaggactaccaggtgggctccgagccaggtctgcaggcctcagacctctcaaaggggtggggaatgtgttgggccaactgcctttgccccctcccccactttgctcaagccccatcatccctcctcacacgtccatctcccctcacagcctcgcttcaacttcagcctccaaacacactatggtgcgggcacttacttactgcagcagcagagaggaaacattcacggccatctaagtcccaacctgccgatgaagcaacaaagctctggccttacaaggcctcagaaatgggggcagtcaaaacacactctgtaagatgagcaaagaattaattcagcgtgttagcaacagaacccttgggtgtgtgctgtgggataagcgagctacgcggggaaacgtgccactggcttccaggaaccactgcactcagccaatgagcagaagtaaaaacagtggtgttggcagggccaagggaaaacagcagccctagaaccatctggggcgcagggcagtgagagagccaagtgactggcccttccctctggccagtggggttgcaaaccaaaagctgccttgaggtatagaaggggatttgcccaaagatatttgtgactgtagaattcgtaaccacaaaatgctggtgccggcccacatggcccaggtggcagtgacaacctctcaccctggaatgccccagaggaccccaaccacaacaggtggattatttcagcccaagtaattgtgtccccacatagtaactaccaatcacaacagtgtaaaataaacacatgtacatgggcagaaagcagaaaagatataaaaatcattccaaattcagcagttgaaaataaccctcatagatatttaagtccagtgcaaacaagaagacagcggagtgtgtgtgcacatgtgtgcacacctttaggtctgcactgtcaacaccagacacagtgaagcccaagcagcaagcagtccacagacgggggcgttagtgtcgggaataccaatgggtcaccctgcatcaaaacacatggagcagactgctgagccagctcaggggaagcggagagaccccaggagtgacggtgagaatgcaactcacttgtcattacacaggatatggcagatcggatttgaccaacaaaatggggaggaactgatccagatgtggaatgtgacagagaatcccttcccactgccatggaacatttataaaaataatcatacgttaatcaatgaagaaagggagccacacatttaaaaaagcagaaatcgtacaggccacttcctcagataaccattctaactagggtcaaattatacatcaggactgaaaccacaaacatataggaaataagataaagtcttttggtttttttgagacggagtctcactctgtcacccaggctggagtgtagtggcgcgatcttggctcactgtaacctccacctcccgggttcaagtgattcttctgcctcagcctcccgagtagctgggactacaggcgtgcgccaccatgcctggctaatttttgtagttttagtagagatggggttttaccatattggccaggctggtattgaactcctgacctcgtgatccacctgcctcagcctcccaaagtgctaagattcaggcgtgagccaccatactcgtctgataaagtcttttcttaaatacagatggaaggccttcatgtgccctgggggtcacgtcctgaatcctcatggtggcccccaggcctggaagttggccctgtccctgccagccccagcttgcatgacttcaggctccagccatt

SEQ ID NO: 1884563 - DNA, 4001 bp, Homo sapiens
ggtgctcagcatatggcagcggctgataaatgcttgtgaaatgctaaagcccagacccactccaggtggtgctgagatgcatccactttagcacaaaggtcggggttctggctgaattacatttattcttgctctgcctatggctaaccaggagcttggctttatgcctggtacctgacaaacctgtgtcatctggcttagcattaatgatcagccacatgtatgcaaatgcccagcatttcttccttgactaatgctcagcataaaccatgacaccaaaggatgcctgaacatggtatgtgagcaagacagtgtctgttcatgttggaagaggtgaggacccctgttctgtgttttgactcacaacaaggagtacaagcaccggcctcatggagctggccattaaccacccacacatgaatgtgatatgccaggggcctgtatcatggccagaatacaaatcaacactcactgtagatgacacccattttttgtgtgatttttttatttctttctttctttcttttctttttttttttttttttgagatggagtctcgctctgtcacccaggctggagtgcagcggtgtgatctcagctcactgcaacctatgcctcctgggttcaagtgattctcctgcctcagcctcctgagtagctgggactacaggcacttgccaccacacctggctaattttttttgtattttttagtagagatggggtttcaccatgttggccaggctgatctcgaactcctgacctcaagtgatccacctgccttggcttcccaaagtgctgggattacaggcgtgagccgcgacgcccagccaaggacacctgttgattatctgtctcacactcccacatccttggggatttgctcctccctcacatcaatcatgtgatgcttgaaagggctgccaatcacagtagccagttcctctggctttggccataataaatccagaagtgggccaattagaatccttctctgaggtttttttcaatattgacctggaagagacagattccagccttttggaatggagctataaagatgtgaatgagaggcttcgaacatggagaaaaatgtgtttgcaggagggaagcatggagccaatagagagcaaagcatcaaagcacccaagttaaggtcaggacttaaagtgtctggaccttcctgttaatatgagtcaatgattttcctgttctttgtggttattttgagctgggtttctgaaaagcacagctcaagtagcctaacacagtcacagttcatacttacaatgcattctcaaatgtatcttccagtcctcagcattcaggcggtttttacgagatgggttatctcacatgtgaaatgtctttgttcttcctcacaagacaggcataaaaattcctgggcaagaggcaccttacccagcatccctaacaaaaggagctttctttccctttgcatcacagaagccagtggtgacctgccaaccacaagatgtgatgactgttctatttcaagctaccaaagcttgtaaaatagaggctggccacaccagctaggcaactggctagtatgttttggaagaagggtctcttcttggtggtcagccctccgttccatccctctgctggctgactccctgtgacaatctgtcttcagatcaccaagagggtccctcagcagccacaacatgttgggtgtatggggcaatagcattccctaataaaaaccagagctctgaaaaccctctgtgagagaacacagtgcaactgggccacctgacttttatgggacctttaaaaaaaagaagccaccatatacaattactaagagggatgacactttggaagctaaaagcttcccctcctttaactctgaagagccaccccgtgaactctgaaccatgaagtcacaacaacgaggaagggaggcactgggcaggagtggcacccaggacattggtctcaccttctcctcccccttccttttccctacctcccccatctcctctgcctagctggagcatggtaggttataaacaggcactgcctggatagctagtctgctctgggctgaggcgactggtctgtttcaacctgatggaatgcttttcctacgtcccgcagtgtcagtgtgccccaggctcacaggagcttggcagctgtctccccaggggcagtggaaagcagcatatcccatggtggactcgacagcttctcaccaccaaaacaaaaacacaacagtcccgactgccatggagagttcaatcctcttgtcccgggattggcaccggctggaattcctagggttctagctgagctacctcctgtgaggtctaaatacagcacattcgattttaacctaaacacacagcctgcaccagtgctcagggctggtagtccccaacggccaccagggaagtcagctgagacgcctggactcccacctgcccatctggtgctgggcatttcagaaatgtcagagaaaggttgcgatagtgagcctatgttcgccgatgctgtctatggccaaatgatgggggatgcaaccagttcgtgtaggcttaactatgagtgtggtcctaggtagagaaatgcatcctgaggaagggagtgggcaggtggagaatgcaggggtatcaggaggaagagaaagagacagggaggaagaggcagtaaggacctagacctatttcttagccaattaatccaaaaccaggggatctttctaaaatgtccacacccaggcgaacacaactctgtaactatgcctctccctgagatttaggtcttaggccctagaatcagatggactaaggttgccctctagttgtgtgaccttgggcacaactgacttctcaatttccccatctctaaaatggcctgaaggactgctgtagctgttcattgaaatcatggacataaagtaccttgtacctagaagctgctcaacaaatagcagctactagaagtagtagtagtggcagcagggataatagaagtgggggtaatatcaagcatgggcttctctccctcaactttgcctctggcttccctcccttggagagggcacgagtggagggaacctcccagccaggaaaagctgatgcttagagacaaaggaaacctttaccggaggaaaacaatgcaacattcacacccacacctaagaaccgtagagtgccaaaatggcaacagcttcctaacctcccaaatgtcaacccacacgccctgcaaaggtaagactaggagggtttccccttaccttggtgttcgtgcacgacttccctcgcttatactctttgtgggaaccacgcttatccaatttgtaccacagggctttggctttccaggtggtcaccttggacttgagcttggaataaaagtttctgtggtccagagggtctaggtccaggtgtcgtgtgagaatgttgaaggcctggagggtacctttgcacgtggatgcctggacaaagttctcaaaaacctgccccgcctgggcctgcttctcatcctcgttttcccccatggttcaggagtcgtgtgcggcagtggtgcggcgaggacacaggtgaacagcatgaagtatctggagaaacgtcacacctgtgaaagtagggggaggcagaggtcagctttggacgatgaggttagggtgggggatgggtgctgagaagtaaaaatgcaatttctttaagacattcaaatattaaccacactatttagtgttcaatactaaacataaatatttataacagatacagaattgtgccttttggcctgtcgatgtggcattgcaggtaatctcttcccctatgctctgctcctcttgctggctgaaaagtaccacagattgcacagggctatgccctggctaatgccaacagtacctagtcaatcttgctctaagccaagtggttctgcaaatagtgactaggaaaagggaaaacaacccagaaaagtacactatatatagcaccattgaaagtctatcattctcgg

SEQ ID NO: 1884564 - DNA, 4001 bp, Homo sapiens
tgtatgtaaggactgttaatctgctctgccacactgtattgcaacaagtgaggctatctattgtttcatgaaagtttttccttctttttttttttttgttttgagacagcgtatctctctgtcacccttgctggagtgcaatggtgcaatctcagctcactgcaacctctgcctcctgggttcaagcgattctcctgcctcagcctcccaagtagctgggattacagccgtgtaccaccacgcctggctgatttttagtagagacaggattttgctatgttggtcaggctggttctgaactcctggccttgagtgatcctcctgcctcagcctcctaaagtgctgggattacaggtgtgagccaccgcacctggcacgtaacaatttctataagagattttagcaaattggaatcatggaagtttggtgctgagaataggatcaaccaaaattttcagatgggtgaattgtgttcctgagatgaggtattactttcctaaatcatacagtgattagtgtcagggatatgtaccaaatattggaccccacaatcctaaaccctataactcctttgccaagttacatggaaatagttgacaaaaatattaaattctaggattttagcaagatactggacgataccactattctggctgaaattgcttatttgtataaacttagtctatttatttatgttttgcaagctcagaatttataattaagttagataattatcctcccattcagaataatgatagttaaaattttgtagattgatgttctgtccagaaaatgggctgttttcttaacatggatgttttctcgcccttttggaggtaaatacacgtaggtggggaattgttaagatacttttccaagattatggaactaccaagtaagaaggtctgggtttgaactcagatgccatatcacttgggcaattctgcctatgccagacctgtcttttctcacctgggcgtgctcatgtctgtgggtagctcttagcgccactgtaggctggatcatatagaagggccccacctgcatgtttgggggacaacttgcagtcagctggggtgacagagtgagcgcagccagatgtcttatccagcaaactaacccaggcttatttacatggtggtggtaggattttaaaagtgagaagagaaacataaaaagcttcttgaaatccaggctttgaatccacatggagctgcctatctttcaatctattggccaaagcaaaccaccaagccatccaagactcaaggggttaggtataagacttagaatagtaactggtacatggtcataatgtatttatatttgtaatataaatagcaactttaataatctaatacttaacaatacaaatacttgacacgtaagaagttttcaataacttatagaaagatagtgaaattttttgagtgcccactaatgtacccaatattgggctgtgttatttttatgtatgttttatttattcaatcagacagtctgtcaagaagttactagtcggccaggtgcgatggctcacgcctgtaatcccagcactttgggaggctgaggcgggtggatcacctaaggtcaggagtttgagacgagcatggccaacatggtaaaacaccatttttagtagagttggtgtggtggtaggtgcccgtaatcccagctactcaggaggctgaggcaggagaattgcttgaacctaggaggcagaagttgcagtgaatggagatcacgccactgtattccagcatgggtgacagagtgagattccatctcaaaaaaaaaagaagaagtaattagttatccttgtgagtttcatttttttttcatgtttgatgagaatatgggtcttgtcctgcattaaatagttaataaataaaattcctaattttcaaattatttttgactccaattccagtaatttttccaaatcatggactgaagtcctataattctagatagtaagggagaaaaatctacaagcttcttagtaattgttgatttaattgatacccttgtcaacttgtgtgaatagaaaaaacactaagtgatgattttcccttctcatgatagtcaggctttcacctccgtggacatggaagtgggaaattgcaccatcctgactgaattcatcttgttgggtttctcagcagattcccagtggcagccgattctatttggagtgtttctgatgctctatttgataaccttgtcaggaaacatgaccttggttatcttaatccgaactgattcccacttgcatacacctatgtactttttcattggcaatctgtcttttttggatttctggtatacctctgtgtatacccccaaaatcctggccagttgtgtctcagaagataagcgcatttccttggctggatgtggggctcagctgtttttttcctgtgttgtagcctacactgaatgctatctcctggcagccatggcatatgaccgccatgcagcaatttgtaacccattgctttattcaggtaccatgtccaccgccctctgtactgggcttgttgctggctcctacataggaggatttttgaatgccatagcccatactgccaatacattccgcctgcatttttgtggtaaaaatatcattgaccactttttctgtgatgcaccaccattggtaaaaatgtcctgtacaaacaccagggtctacgaaaaagtcctgcttggtgtggtgggcttcacagtactctccagcattcttgctatcctgatttcctatgtcaacatcctcctggctatcctgagaatccactcagcttcaggaagacacaaggcattctccacctgtgcttcccacctcatctcagtcatgctcttctatggatcattgttgtttatgtattcaaggcctagttccacctactccctagagagggacaaagtagctgctctgttctacaccgtgatcaacccactgctcaaccctctcatctatagcctgagaaacaaagatatcaaagaggccttcaggaaagcaacacagactatacaaccacaaacatgaaggttattctctttgcaaatgctgttattgaattttccagattattggcttataaatgtgttcatttgcatttctgtagttcaattaagttcaataagtcatatttaaaacattaaaatattgaccacatgactccttgttattcgtttgttatgatgtaaacaaaacaaagtaatatttaaaacttataatattgggttgtttggcattctgcaatatggtattttgccttggcagcattaaatctttcatagatttcattgtgtttgctccctttgggagatcttggggaacaaaataaattacgtgggttaatgaatatagtttgactttgaagtttggtaagcaatctttactaggtgacaagaatatctgaaagggtgaggcttctggaaatatgctcaagattttacaaatatttattttaagaaaatcatttcctcaaaatttcttcagaaagctctaattgagcatatagggagtatctttgtaaaactcatgccttctacataaagagaatattaggaagatgtttaagagttgttcagattacaaacaacaatgacaacaaaaaactatctcaaaattaatgaataaatatgtgtctttagaattgcatatcatcctaacagtcttctctcttacaaggagtgagtactccgcagtactctctctcaggtcacacagcgatgtgacaacatcaaacgaaataaaacaaatgaacaacaatagtaaccactgttccctagttacctttctctttcctttgtcctgaccaaaagacataagctgcatgtttgtccctggcctgaacctagcctgggccttgaacattcctaagaactggtaaacttgtttagatcgatgcctgaaaccctgaaaaatcaaacatgttgctaaccacatggaaactagccttggcctcgagcccaattccctaaaccctgatataaac

SEQ ID NO: 1884565 - DNA, 4001 bp, Homo sapiens
atcatcacaaaactaagaaaagttctggttattcttccacaaactcagtgcaacattcgattggtagggcacggtgggggaccaggaagagatagagatttagccaagatatgccccaaagccactgcttttctggactcaaaccaggggattagggaaacaacattccccagcttctatgcaaagagccaaagggaacacagacttaaatatcatgacatgaaagttacttcacttgatgaaattacaaaatcattggtaattgctgagaatctctcacctctagggttttacaatgcaaaaccccaccactagagttaatgcgctatagtcaatctctcttctatgagggagggttgtcggggagtgggatatggtattgcctgggaatccctaaagaagacagagaggcacaaaatgatggagaagggcaccagagaaacaatctcctcaaactacaattactttattctttggctgacggttttgtctgcctttcagactttgggtaatgaagctaatgagtagctgttggggttttactatccatttcctcattctggaaccctcaattctaggaggatatcccaccccattattcttagagcctctttcttgatttcttctctccttccattcctcactttcctctctctgtgtaactttcttttggcttaactgccaggagcatctgctgcaggtctcagggtaagagagtgggcaggtgggcacagactgatagagaagtctgagatcatgacattccttccgtattccaggaaaagttgttgtaataggataatagaataaaaccaagtacttttggggacctcttcattgtgaaatattttcttatctggattcagaggttatgccctttgagaaaggaaggggaaaaagagcttttatttagctcttgtgctaggcagagttctaaggtgacactcactgaccccttgtgattcccttctctcaagtgtggatgaaacctgtgtataagatgggatacaagtcccgtatgtaggactgatttgttgactttcagtttataaaaaaactcattattctggatggacctcacctcttcatgtgaatgctttatgagaggattaaagcactagagactctggctctcctgctggtctcaaagaaaaagtacattgtcatgagtcctcaacttaaaggaaattaattccgccacattcacatgaaagagaatcagaagctttagacaaggccacagccccggccaactccctgatgacagagtcataagatcctgaaccaaggacccacatccactgggcccagactcttgatccatggaaactgaaatataatgaatgtgtactgtgttaagactataagtttgtttaactgattatacagcaatacaaaagtaatacagataccttcaaatgaaggccaatactgacctcactggggctacaacaaagcactttacatccaaaggcagagagggccacagcaatgcagaattccagcacacttaagaggagcaccatgccatccgtaccctaggagaaaactcataacaagggaatgtgagaaatggagatgacaagtgaaaacatttcccagcaaccacagtgtcataagagaaaaagcactggctgggagtcaggaaacctgcctcccaatggcagccatacccttgaccaattcttgatctgctgaagtagcttctcacttttttcactaataaaataatcacagacatttattccctagttcagcacctcccagtgctattgtgggcatggaagatgaaagtgctttaaaatgttaggaaggtagtataaagataattgtcatcatatcctattgagtactagaaactcatatcattgaaaaaatactatgattccatatcttcgtgattgtaagcagagtaatggtcccccagggaggtctgcatcctagtcccctaatcctcagcttctggggatttgaatgcagacctccctggggggaccattgttctttttgcacaacaaaaaggattaaatttgcagctgaaatcaaggttgcttattagctggaatgagagaattttcctggattattcaggtgggttcaaagtaatgacagaatccttataagtggaagcaagaggcagaatagagttcaagagagttttgaagatgctgcattgcttgatttgaaggtagaggatgggatgacaaaccaagaaaggtaggcagcctacagaagccagaaaaggcagtaaaacttattgttgcctaagccttcagaaaggagtacggccttgcccacactgattttagcccagtgagacccactttgaacttctgacctccagaaacagaagataaccaaactgtattgtcttgagacactaaatgattttatatggttctgcctaatgatttgtagtaatttgttacagtaacaataagaagctaatacaacaatgaacatcacgtaggtcagtctttaatccatctccccagagcactggctttagggctagtcttcagccaagaaacatagtcaaaatttggagaacaattgggcagtacacttatttctattaattttaccccggactgatgcagggattatctggtttaaatattctctctttttctctccatggttagggatagtccctctgttgcggaagagccaatagaccaagagctcaggatatgagtgaggcagacttaaggagaccttgagaatatttgcattcattgcttttttattttcttgtgccttcaacagctgtagcggcctctgtgtttcaaacattgttgtaggcacagaatatagaacagcaaacaaaacagacaattcccctgtcttcaaggattttaccatctagaagtgtagactagaagatggcaagctttccgtaaaggccagataatgtacattttaggttttgcagaccgtaaggtctctggcacacacattcaaacctgttattataacacaaaagcagcaatacacaatatgtaaataaatgggttcgttacatttcaataaaactttatttacaaaaacaaatacagggctggacttccaaaaacatagcatgtatatagacctgtggactgattgtgcaggtgcccaggcaagaatagacccattgcttcaaatcccaggaagcccttatggaggtcccctgctataaaaacaggcataaaaatgtttacacaattaacaggaattcatcatggactctgggaaaggtgactgaaatgaatgcaggaccagctatgtaatttatagactctcttattaaaattacatatatatcttagcttgagctatacgaaactgctgtctttctaggttaagtatagttgatcattggcaatttcatatggttctgcctaatgattccgggtggtagactctaactacttttttctagagctcaactttttctggcctctttaataattatatgctttccagcatttctatctttttcttccaggagaaccaaagttcctttgtggtagggaactgttctctttcttatgtctaccagggtgccaaccctgtgatggggcatacactatgggctcatagacctgtggactgaatgtaaaggtgcccaggcaagaagagactcattgcttcaaattccagaaagctcttatggaagtcctctgctattagaacaggcataaaaatgttcacacagttaataggaattcatcatgacctctgggaaaggtgattgagatgaatgcagaaccagctacgtaatttacagagtgtcttgtttaaaatttttaaaaataatttcaagatagcaacagcagagcattagaccaagcacagggctcttctaactctgaggtcctgagtaactgcacaggtcccatgcccacgaaatcagccctatgaacctggccaattccagattttgtctctatcattgtgccattaaagtctatgaatgaagagagcctcataaactaaaagtaaggttcttcttcggg

SEQ ID NO: 1884566 - DNA, 4001 bp, Homo sapiens
cctgcttcaaaggaactgtgaaatgggcccccaagccaaagggggcatgagtggtgagggtcacctgctgccctccagctcgaagcaccactgagcgcacagaccggagagagaagagaagaccagcaccgagtacgagggctcctgcaggcagggcagagattggggtgaggggttttcactgggcatctaagtaccgacctttccagtgccctctgaataagaaatttgtgggatgaaagtagtatttactgagcgcttttttttttgagactgagtctcactctgccggccaggctggagtgcagtactgagctcctgttatacccagtaatcttgttattcctcccaacaaccttaatagatgtccgtttccattttaatgggaagatggagagctttaaggaccttgctcaaggtcgcagagtgaagggcagccctcagcctaggctatgacagggcacggcgctcggagacatcactgtttcccaatttttttttttgagaggggagtctcgctcggtcgcttaggctggagtgcagtggcgtcatctcggctcactgcaacctccgcctcccaggttcaattgattctcctgcctcagcctcccgagtagctgggactacaggcgcttgctaccacgcccagctaattttttgtatttttagtagacacagggtttgacggtgttagccaggatggtctggatgtcctgacctagtgatccgcccgcctccggcctcccagcatttgagccgccgcgcccggccagtgtttcacatttctgtggggtaaagcccgcccgccactctcggatagggagtccctgactctccctgcctgtatagggaaggtcgtgtcccgccaccccacgttgtcacagtgggaagccagcccacgtcttaccgatggcgccgcagccgacggccagaccgtagcgccagagcgcggagcgcaggtcgaaggggccacgatttgggacctccgcatccagaggctgcaccggaaccgggggccgggacacggctgccacagccatggaagcccagaagacgccctggcccgcgcagaacagcccgaggatggtgaagaagcggccccgatcatgctcaaagagcagcacatcccgttgcagcgtcgtgccttgcaggggccggcaggtgagcaggggccgcagcacggctagcagccccgtgggccatcgcctccaaggcgccgccatggccagccgacttccggggtggggcttcctgccgcagagccgccttccgccctccctgggcgcccccgctagagggcccgcccccctcgctcagggctgggaggagacaaccaatccagcacgcagaacacgaaatacaacatcactctttatattaaaaagtgcagaacacgaaatacaacatcactctttatattaaaaagtaaggaggtcctggggttaagtacacaaagcacctaagtccttcgggtagtttagtgtcagttctacaaagtaagctttggcttcctggcaccagtgaggctcaatcttctgaagtcttccagaaggcaggcgaggagagggatcaggcagccctccctccctcggtcacagtcacggggcggcctcgggccagacaggaggagatgacagacgacaaccagacggtaatatccaaggactatttacaggggggactgcttctgaggcatgactacgatcacttcatgaatgccacttctgggatctcgcccttggcctggagaaaaatgaaggtcagtagaggtaggcctaccctcgccactcagcaaccccactcagctaacctgacctcctggaggcccagagatcctagtctttttgccactgtatttccagaccttaccttgagatgagtgaaggcctgggcagatctggtgtagtcccagttgttgtcctgaaggcacctggagtggaagaacaggcagctctgtaagaactctgactcgtaaatgccagctgaaagtccactccataaaagcacccaagtttgccaacaaatatgtacattcttatacatccttgcactatttatacaaatgagacattagtaaaagtccagatgttctaccaatggcttctcaaagataaggaatattaaatagctgtcaagaagctcaagatagtttttacagtggtagggaaagatgttcatggtgtaagtaaagaaactaagttgcagaacagtatatgaaaaggaacttccattttacctttaaagttttttatgttaatttatacacaggcaaattttttatagactatcaggtttgtgtttttctgtttgctttttttttttttttgagaccgagtcttgctctgtcaccaggctggagtgcagtggcgtgatctcggctcactgcaacctccgccttccaggttcaagcaattctcctgcctcagcctcccgagtagttgggactacaggcgtggaacgccaagccccgctaatttttgtatttttagtagagacgagatttcaccatgttgtccaggatggtcttgatctcttgacctcgtgatctggccgcctcagcctcccaaagtgctgggattacaggtgtgagccacctctcccagccaactattaggtttttttaagcagccaaaagttttgccttttaaaatttcaggagcccaggcacagtaactcacacctataaccgcagcactttgggaggcctaggtgggcaacatggtgaaaccccatctctgcaaagaaatacaaaaaaattagccaggtgctgtggcctatgcctgtagtcccagctactcaggtggctgaggtgggagaatcacctgagccctagcagttgaggctgcagtgaactgtgatcacaccactgtactccagcctgggcatcagagtgagaccctgtctcaaaacaaacaagcaaataaaaatttggctgggtgcagtgcctcatgcctgtaatcccagcactttgggaggccgaggtaggcagatcacaaggtcaggagttcgagaccagcctggccaacatgatgaaagcccgtctctactaaaaaaaaaaaaaaaaaaaaaaaatacaaaaattagccaggcatggtggtgtgtgcctgtaatcccagctactcgggaggctgagattggagaattgcttgaacccgggaggcagaggttacaatgagccaagatcgcaccactgcactccagcctgggcaacatagcaagactccacctccaaaaaaaaaaaataataaaataaaataaggtggcacatgcctataggcccagctactctggaggctgaggtgggaggacagcttgtgcccaggaattagaggctacagtgagttatgatcaccactatactccagcctggatgacagcgcaagaacttgtctccaaaaaaaaaacaaaaaaactgtcaggagccctcattatttactactagccctacttcagtgcatccccatcctacacatgccccgcactcacttctgggaccactcgaggttcatgccagactgggtagagaatgcttgcaacatttcctgctgctctggagagagggtgggcaccgggctggaggaaggcgtgggtgcaggcatagcgaaggctctttggatctcttcagaactggcattccgcacaaatagctcatcatttacaatacatagccttgaggacaaagagcacttaaaaagctagacagagataacatcatcctcccaacatcattcctattctctgattctttcaatatccacaaggtccccctcccactcttagctattgttaccttttatcatttatcccctcccatggaatcaatgtttggaaggattatctactaaacacactagggttctcccaacgcatggactttagctcttttaattcatcctcacaacaaacttaggaaatgaatattgttatatgaattttcagatgaggcagcagcctacttgctagaagtggtggagccaggatgaaaacccagacggtacaat

SEQ ID NO: 1884567 - DNA, 4001 bp, Homo sapiens
tagaaaggaaagctatattaagcttgaaaaacacaactctcaaaaactctcaaagtccctcaaccaacgatggagggtccatagtcttcattctctaggttggatatatttttaatgctattttatttacaaactagtccacctcacatctctaagatgccctctagctttgctccctagtaggtgaggagcaaaaggcagttgatgaaggcaggaaaaatactctttttattgggtccatcaggaatgtaggcccgtcttcctctagaccctttaaacatcaagccctgcttcttccacagcaacatcaattgaattaattgctaaagtaatttctgagaacttgtcatcctgggccaggagacccctgggcagacctcagagcagttgtgagacaaacaagaagcagcactaaataattagcacaattattcatgaatcaaaccaaatatattttattactttcaggtggtgaaacctaagtacagatcagtcagggtatctcctggatgggaccaagcttgaaagtggtgggtggggattggaacccatgcttcatctgcaaggcttgggctctaagccacggcttcagtgaagagatcagcagatgaattctcccctcaaagctgtgatagcgtcaccaggaagtggtggattttcacagagtgggacttgcttagaggagaagaaagtcccaatgggtcaaaaatggaggccgttcaagtttttttttgctgcggattcaattattcgcttgacgaaggaagatgagtaatagggttctcagcctgaagtctaggttacttcttacttcctcccacctggattgacttcaggagcgtgcaacttgtgtagttgcagggcccttggctcagaagagctccatggttggtttaagattctactgttattgtcttgaaattcttaaaaattttgtctttgaacccgtgttttgtaagtgaagtctatgggataatagagaatgtgtgtgcccatccatcgttcctgtcccacaatgttggcagtagcccatgcgtacagaattccagtgggagctcagtgagactcggggcaagtagaatggaaagtaagcctatgactacacagacgggggacacagacagtgcccagaggtcatgctttctgtttgaaccagatgcttcaaatgcagaaggaaggcaatagagttctaagaaacactaatgcctaagggaccctaaagtagcatttcttacttatgttccttccctgtatttgccaaacacctatgctgaaaatgttgacacagaaggaaaggtgaagatagagcaatccatagctatttctcctcaacagcaagctgaaggtggagagtgctggtacaaagcgcttgtatcaagaagtgaaataaaaacactggagttcattttgtcagcatctccattgttctggtaagaatgaaatacctatgcatatgcgacatatgaaatgtgaattgtgtaatttcagtgattctacaaatgagttaaacgctcttgtgtttacatttacaactggcatcacacaatataaagatgaacggtaaaattcatgctaaaaatttaaaatttttatttttatttagcaccacatgaaaaacagcaaataaaaaaccaccatgacgattctagagagagattgtggaagaaagacaaaggcattatatttaggcactttcttcctgctttttgaacaaggggccctacgtgttcattttgtgccaggttccatgaattctataaccagttctgcccctgcccttaggtttcttttgagaaacagggcaagcaccagggctcatccaaggtgatgaagataaaagtcggacttcattcttgccataaatgagtagacacctgcttgctgtaatgctctccaacgtcgcgtgaaggggcaactgacactcctgaatgaatatgaggaaacccaaggcaaattcaggttcaccacatacactcagggacatcaggtccacccctaaactggatgaagaacgtctcagctggcatcttcggacttgacagagaggaagaaggtctgtttccttgtgtatgtggctcatgagctgacgtgggctctcgtgggttctcatgtggagagaaccctgggtacccacatgcatactgttgtggtttttgcacatatatgtgcatgtacactgcacatacatgtctgcatgtgacaagtgcttgggcacctggtagaacctgagagaggtggtctttccatggatctccggggaaggctgatggacatgaaatactttttaggtgctattcttctggaacttggtccctagaagaccacagctcagagtaaagagagatactgacagtcttggaggactgtggagagcagatggctataattccaggaccagatttttttttcttgtaaccacttcccccacagcatttatatcaaagggagacaaatacttgttgacttaagcaataaacagaaacaatttccttctgagaagtgcaacacaaagaaacctgatgctttccgggctgtggaagactctccatcccccttcttggagcaggaccttcagtgatatggacagtgggtgtcaggccagctgacctggttttacttcacaccggcagatccagggatgcagccaccatccactctgctttatttagtgagacagcacttcataccaacagcaggcttaatcacagtctataccaacatttcacttcccatttctatgtctgtactccttgccttttggttatttggggtggggggtggcaatagcatgctgattctatcttccaagcaccctccccaaatctcctacttccctgctgaaaacgattcccttctcatgttaatttgatgacccagccagctgcacccctccgcccccgcacccccagcgcaaaagaaaaagccactaccttactccttcagaattacatccccgctcagatggtcttctcaactaccagcccagtccaaagaaccctcgtcatatttccaggctcatctgaaccagacattcaagtagtgcccccacacggatatttaaggaccatggaggagggggtattccctcctccccctgtgttccacctcccagaagtggctgctcttcagagtggaggtgattcagctttcctagaagatgatttgcagggggaaaaaaatgtacagtactacagctgagagtgctgcctgcttccctcgatgaaaaaaaaaatcctgctctcagacacatggaattcccattgatgaggtttggccaacaccaggcgctggattttccccgttaaacataaagctctgggtgaaagacgcgggggagggagaagggataatgatatcttttcaaccttttcagacctctgggggatttgaactctggcccccaaggtcaaatggctgatgttcaaaagccccctctctccacccctccacctctcttccccaagctccttcctaacaaagaatgactctctttgctacacacaataaagccctggtggatttacccagattaaaaaaccccttgaagtccctgtcaaaactaatcttctcaggagaaacacttgttgataaccacctcgctttgtgcagcagcagggaggaactgggaggaccagaacccaacggaaaaactggcctgtgacctccctatcgtcacatggccccaagcaccatacgatctctgacctcatagaacgcccctccttccacgacacacaagtattctgcaagcccctgccccatttagcttctccacctcaggctcccccccgttacagcaccagcccctcaaagcaggaaggccaaccctgtaagtccccagactgacagaccctggctgagctccagccgttccctccttctctgccgcccccgagttttaacccttcaccctgcagggctcagtatctcttgtctttcctgctgcaaactttgtcaggagccttttcaggcggttttcctctacacaaccagcccttaag

SEQ ID NO: 1884568 - DNA, 4001 bp, Homo sapiens
gcatgagccaccgcgcccggccagaatacaaccttttaaaacattttctaccccaagggaatgtggcaaggctaatgtgggtggaagggcttggggtggagcacaggcccttgacatgcagtaggtagctctgtgccccaacaccttctgcctccccgatccaggtcagactcaccctcgactccatgagccggttcttctctgcatgagcctctttcagcatcttctccatctcctcgatcttccccatgtccagaccactcgcgctggggagagaaggggaagaggaagtgcatcaaggagctgaggcggtggctgagggaggctgcgggcccaggcgtcgggtgtacctggacatgttgtcaggggagcaggccgagttgcccccggtggagatgctggtctccatgctgtcagagctctccagactcagcgtatcataggcgtgctcaccctcctccccacgctcccgccccgcaggcaggtggtgtaggatagagtggtgcatgagaggggggaagcccgaggggcccgctgggaagggtgctgccccgtgaagggcatcccactggcactgtgcctcagctgccgctttctgcttcagctcagccagtcgccgccgctgctcttcaatcacttgttgtcctgaaggagagacagatgggagtcacagtgggctccccacgcagctaaggagcaggccactggcagcacaacacacagagggaggggcaagcagggagaggttaacacagagcagccccctctccccgcagcttccctaaggcccctgcagctccaggcctggctgctctgccaatgcttcagtcgcctgcacaaccggccacagatgcacagtctggcttcagtgctctttcgcaccctgagtccatataggacaccaaacctacccaagtagtgctggggcagcacgacagccagttggctccagctcacaaccaaggcctaagtaggtctaggcaggatacatgcacccaccctgcctgctggagaagggagaaggaagagatggcagaaaccccatgagcacccagactgccaatgcagacccccctgcaatgcagaagcaaaagcaacaaacgcaagaaagaaggcaggggagacacggtagagcacagatgagggcagaagagaggccagctggaggggtgaggccagcagacaccccaacccagctcagcctgggaccctgcctgcaggcagtggggacctgggcaggacacatcatgctgatgccagggcaggggctgcctggccaaagcaatgccctctatgaccaacgttctacctgctgggtcgtcggttgggaggggctcggcgggaagcgactcgactggcgtgggggaccccaggcagagggtacggtagagacacagagggggtaagaggagagagaggcacagacatgggctttcaaaacaaccaaattgcacacaagcaacaaggactcctgggtccccagagccaatatctcaggcaaccatttctagaagtcatcaaatccatcccctccctccagagagggcaatgtctaacccgactcaggtcaacaagcagttcccttattggctaggctctctaggaaagatgtcacagccccctaagcccttagtctcctgccctgaaggctttagataaatatccaggaagctcttctttaggtacccactctaaatcctttctggtcttgcctagatcccaattaaaggaaaaacatcctgtgaaaggtgtgagcatagaggaggcatggcaactacccagggtcccctcaggagagcaggtgggctggcggggcagtcactcacccttctgctgcagagctagttggcgcttggtctcgatgtcctgcagtgtggctgccaggttgcgaggaaggctgcccgtgccattctgggtgagtagagcgctctgcagaggaatggagagttcggacctgggctcagaaggcccttacccccattcccaaggtcttggcctctccccagggtggaagtctccatccccagccacatgtgcagccccacccactgtcctcagacctttggggaggggctacgccccagggtagccacgctgagctgggaggaggaggaggaagagccagaggaggaggggagggggccgctgcgggtccggggaagggggctggtggcctcgccatccatcttggagcggtaaacctggaaagaaaagatagtgcccagtgattcctggctcccccattggccacctcccccatgtcacctagtctgctgtgatctgacgtaccgccctggcactaggcctctgaggccttctggctctgacaacaagcctcctgagccagcccaatggccagatgctattggcagctgccaattctcctttccaggctgttcctccctgggccaatccctagcccaaccctgggtctaagaaaagacctgtaaacagacccatgcaaggatttaatgtcagtcaggcagttgtgcaggagaccaactagaagctgggttccctctggtcctagctctgccactaacaggctgtgtgaccttgggccacacacctccctactctgggccttggcttccttatctgcaaaagaagggggtaggactagactaaataatggccaagctcccctgcagcactagcatgtggtgaatatggcctttagtgtcacaaaccctgacgtggcataagctctgctacttcctagctgtgtggccttggagagattacttatcttctctaggccccagtgtttcatctataaaatgagttaacttcatctacctcaaaggcctatgatgatgatcagagaatcaaaacacgttaaaatctctaaccagctgggtacacagtagaagtcttacatgatcaaactcctccccaaggaaacatgaaattttagctgaggtcacagtcttacagatgcagtgccttcactcaaggggtgatcttaaatggtcaatcttaggcactgcagctggtcagtggaggaaacctgaggagaagactagcccagccccctttcccaccccatggtcagttgcttgctgcaggttcaggtaggcccacgccctccatggcaactctgaggaggcttaggctgtcacttcagagtctttgccctttgttttctgcttccaagtgtcactgctggagagaccaggagaacaaaatactggcagttcttcccaggacacactagttccagttgccacaggcccaagagcctgtcaggcccccagactgggtgagaagctccaggtgttgggggctgccaagcataggccagacccacagcctagctcagcacagggcaccaaacagatcccaaactgaccacagctccagaatcctcttccaccagacactcaatcagatagttttagactatggaggctggccccccggttgcccacatgccaggatggctgcccaaggagtgaccctctcagggcccagaggtgccctcattgccctgactgggctgacgcctccactcaaggtggtactgtgtggctgatggattggcaggaggtatcagagtggacaggtgcaaaggctggggaggacgggcagtgaaggaggggttacctgcagctgacgggaagctttggcgggcagaggcgggggagaagagtgaggggaggctgcagcggggccagtccccagcccggccatcagctcctggtaccactgctctaagtctacagcagggagcagcagcttctccatctggaggtgggaatggggaggggaaaaggggacaggaggggaggatggagaggaaaggccaggaaataaagggaaaggaaaaggcaggagaagggagaaagaagaaagaagaggaagaaggaaggggaaggttaaaaaggaaggccacatcagggaaatggacaggaaggtgaaggaagaaggggaggaaggaagggagaaaggagagcatcaagaaaaagaagagaaaaacagtgagacaacagttgccctga

SEQ ID NO: 1884569 - DNA, 4001 bp, Homo sapiens
ttctctaggaagatgaggagggcacgaatcacatccatattcactcccatgaactccgtggagtctccatgtggctccagggtgaggagaacatccagacacttgaggggcaagttccccaggaggttcactgcgtggctggggacagatggaggtaggggtttcaacagggctaatccctgagcacaggtgcaatctttgtgactccgctgaaccacacattacatgagctggcatctgagtcccaaaggggcagcgctagggaccaaagccaagggcagggactgatctgagaggcactgccactcagctgtacagtggggtcccctggggaagtgggggcactgagacacactgcctccccgaccctgtctgagccaaagcgccagaccatctctggaaacccagaccagcctaggggcaggtagaccaaaaacggggacaaggaaccaatgtgccctagtaagtaccatactgttgccactacccaaggcccagttggcacattcctgcccccaaattcatggctatgtccagtctcactcacccagacaacgtcagactctctagggtggggcctgggctctcaggtggttctggttcagagccggggttgaggacgaccatctagacatgtgggcacacttccctcccagaaaaagccccattctcacccgtggaactcctctgtgcggtctccagcagtagcgatcatcacacagtgccggagaagggtccccaggtgtcggtaaagggcagcgtcttcctgaccaaagaaagaagggttcctgtgaggagccccactcatcccactgctgcctgctgaggctccactgtctgttgcactccaggactgtgtggcaatgactgtgcacctcctgtactgcatacctggtcccctggggtcttcctaggtgactctgggtagtgctgggggcaaaagatgaccactgctgtcttcctaaaaactccatgagtattcttctaagagcacttccctgattaggaatgctaacacataccttagggatgaagtcacactctgtctcagccccactcacagcctcatggtggaggatctcttacagtctccccagacaccacacagccctcctgccaggcagcaagagccagaaggggcctctacttccctcagaagcctttcctgaggtcccagcccagaactggcatctccttggccttgtcccaacaggctgggaggtcctgtcctctccatgtctgacacccagaaacctgaaggtacccagtaggaagcaggtccaggaaatgttggagctgagttgagacccatccatgggttaaggtcagtgctcacctcgtccacctcccccttgatggagtccagggtgatgttgaagagcactttgaggatctccatggcccgctcagtctcttgggaaggaaggagcgtgggtggggggttcccttcaggagtcacccccagcgtcagctccagtgtgtcagttagcaggcgcactcctttcagctcctgaaacagctgctggcgcacatcggtgcggagtgccgttagcaggaagaggagccgcaagtcaaagaactggacatcgtgggggaagctcctctcacggtacagccccacacgctctgtgagcttcaccactaggcgggcctctgctgccagcatctgtgccacagggctgctgagcacgaggttgcacaggcacttgagggactccagtacaacatccatgtctgcggactctgggacggacccctcagagacagagatgtcagcatagcaggctagtgcctgcaggctctggcggctggtgaacgggtccaggcagttgcggtcccgggacaggattcggacactctgcagccagatgacacggtgggagggtggcaagccctgttccaggacggagaccagcagctccgccagtctctgtgggcagggagaagagcggctccaccaggcccttcttcctggggccacccgtccctgcccctttaccccttgggccagcacccaccttccggtcctcctgttgggcatcatcaaacgtgaagctctgggagtgctgcagagagaactagtgaattcaaatccacagaggggtaggatccgcgtccgctgatgcgggcggcctattggcctctaactcaggcagcagccactgctcagaacggatggcagggtcggcactcgcccccatccctacacgcctgccacccaacgggtgcacccccactctccccgcaacactgcatcccagacctgccccccgcaccccgccgcgtcccctacgcttgctgacacagcctctgcctcacccacgccctccctgctacccgcgcacgaccctgccccaccccctccgtgcccgccccccggcctcaggcggccgcttacctcctggttgtatgaccgcagagcttccataatcacatcctcctcacccgtctccacggcttctgcaaccgcccggggctccatggcgcgccggggaaggcgggacgggcccttcctcagccgttccgggccgcagttcgccggccccgccctggcccagaaagccccgcgccagcgcgcgggggaggccgggacggggcgcggcgtctggtggcgctttaacggggcgcagcgtctggtggcgctttaagggggcgcggcctgaggcagaactggcggctcggaggttttaagacccgagtcgaggggctgagtcgctctgaaccgaactgacccctctccttgtgacccgcgcttcttgggccagaagttccaacaggaaacgatctcagcccccaccgtgccctgccacacacacagtgacgcccctcgagctccacagaaccgatgggatgtagaggggaaagccgaagtggaaaggaattttcagtcctgggccattgggttcgttaggcgtttgctggggaatgcaggcgaacgggattcccaggtccctgcctttgtggagcttatgttccagaggggaagggggacaaggaaaaacaaaaggacacgaggcggtcacagggctgtgcttcaaaagaagcaaaaggcgactgctgggctgcaacgggctgtgaggaagtgctgtttttgctgacaccggacggtgggaagtgagccgggaaaagactggaggagccactccaggcagaaggagcagcacttgcaaaggtggaggggccgagagaaaggggagcaacccagtctggcctggactcagttccctcttgaaaagcaaagatcctgcgtgtccgtttcagtggccgtcatgaggattcagtgacgcacaggaagcgcgatccactcgctcttctaacaagtgcccgggagcaaaggcgtctacggcccccagtccccgcgccgcctcccagtctctctcccggcttcactttcctgtagtgcgttctgtacggctgtattcgacgcggcgcgcactcgcaggcacgagcgaggcgccgatctccacttgacagaggaggcacccctgcccccaccacacccagtgctcctcgcgggcttctgcccgaggggtctgctccttcctcatgacccgcctgtgaatccttcctaaccgttaggacctaacccacagaagcgtctttccaccaccatcgtctaggcactgagcaagcaaacggccccgccccgccccacgttcacaggaacaccaaacgtcacatccgcggtgctgctgtaatcccagcaccttgggagcccggcaggcgggggctgcagtgagctgagatcgcgccactgtctgcgcgacagtgctgaaaataagccacagatatgcccatcgcttccgcgcccggcagttccccaccctcggccctaagccggaagtcagcgagcccgaagcggaaggggctgggctatctaggggcgtggtcggtgcggaggcggggccatcgctagctgggggcggggccggaagctctttccccgcgactgcgccacgtctgaggcggctgtggccgcgtcggtgtccgcgtcgaggagc

SEQ ID NO: 1884570 - DNA, 4001 bp, Homo sapiens
gttgctgggagcccctgaagggacctctcagaggcagcagttgtggagctcatggctgtcgacgtaaggtgcccctgagtcccaagcatgtcccagctctgacgtgtccagggcccctgtgcggatcggccctcagggcaggaatgtcaagacaaggagtggggctcagagagccccggggcatcccacacacatgttcaggccccagggccacacccacccactgctgtgcccttaccccgtagaaggtgccattgtacgaacacagctgaggtcctggaaggaaagggagctaagccctcgacaagtggtggggagcatgtgctccagcgcccccaccatcctgcactcccccacccccagcaagaggccacccaggagcccggccccagccccgctcactgcagcggaaggtgggacagcagtcgccctcctcctgggtgcagatggactcctgccctggcgggcacacaggcaggctctgggggcaggtggttgtgttgcacactgcgggaggatggaggccactgtctgggcgctgctcactcctcctcccgaccacttgttcccagagtaagtcgcaggcgtgcttttccccgaggacctgaccgcttcacagcccctgggggctccctccaggccccttgcttggccacctccccgctgcttcccacgtccctgggccactcctgggcaggccagaggtcaccagcctcatcgttaggaggagaatgaagcacctggaggccatctctgccgagtggtcctgccgcggtcacgccaggacacagtggctctcctctgctctcctgtgcccaacccacaggcccctggtgggcaccggctctgtcccccctcaccctatgccgggcacctctgctctgcagcgtcttaccgcacaccgtctcggggcagcaggggttctcggcccggggcctggtcacggttacgaagccgggacggttgcacggcgggggctgaccctgggcgtcacagggcaggggcttgcactgcaccgacactgaaccctcgtcacacacgcaggactggcagttgctgacccaccgctccccgggctggaatggatcaagggggtccctgagggctcctggacagacacaggtcaaccctgggcatctgtccagccaccccctccctcgggctggtacccgagtggcccagagtgatggggcaggaagcgcacaccagccactggcacgtccacgtcacactcgggcgccccacagctgccctgtgggatggggatgctccttccctccctccctcagctcgcgagagggtggggtagggcaggtgggggtggagccactcacaaatttaggaaacccatcgggtcccacgcaggctggaaagaaaacagcatggcatcacggagggtgctgagtttgcaggcggaggggcctctggccatgggaggtgctctcaggcctggagcctgcttccccccgggatggaaggccctggagaacttttggggtgtcagatgtggctggagctcaggccagggcaccgtgagcccagctgtcagtgcatggaagcctcgtccatggtggtgggaggcagggctcaggggagggaccatcacaggatcactcaaggacagagcctccctgtggggcttcaggggaccgtgggggctctgcagggttcagggccactctggggccatcccatgctctggtggggcagaacaggtcacgggggtcagctggggagaggggagagcacatcatggtcctgggcggctcctcccaccctgtgtgtgcttgggtcgggcccagggtcgtatcccgccacaggtggcggagcttacggcaggcctgcacgcagatgcccatgtgtgcgttgaagaggatctggtcctcagggcagaagcagccctccgccatcccctccagctgtgggctctggttcctgcaggatgacaagagaggccctgagacctagagatccaggaggcctccactgtcatccacgtgagtccccaggatgggcagtggggagcagggaaggagatgaatgggtggagtgcggggctcagggtgggcggggctgggggcggggacgggtggggctggggtgggggtgggcggggctaagtatgggcggggatgggtggggctcggtggcggggccaggtggggatgcggggccaggcgtggccagggatgcgccccctgcctgactctgtctctaaggcatctgggagcagcaggggatgttttccaaggagtcctgggctcgggcaccccagagatctgtggcccacagtgggacaccctctggcctcctcctgctcccccagaccggtcaggcaggcctgggtggcagggaaggcaccagccatccctgtacttacctagagttgcaggtggcaggctgtatggggccgcatggcttgtacactttggtgggtgggcaggtgaggtctgtgggcacagagaggtgtcagacaagccaaggggttgggggggcccagggccgcccccaatcaccgcacaggacactcagagaggccgaggagtctggggggcccggggccgcccccactcaccgcacaggacactcagagaggccgaggggtctggggggcccggggccgcccccactcaccgcacaggacactcagagaggccgaggggtctggggggcccggggccgcccccactcaccgcacaggacactcagagaggccgaggggtctggggggcccggggccgcccccactcaccgcacaggacactcagagaggccgaggggtctggggggcccggggccgcccccactcaccgcacaggacactcagagaggccgaggggtctggggggcccggggccgcccccactcaccgcacaggacactcagagaggccgaggggtctggggggcccggggccgcccccactcaccgcacaggacactcagagaggccgaggggtctggggggcccggggccgcccccactcaccgcacaggacactcagagaggccgaggggtctggggggcccggggccgcccccactcaccgcacaggccaccggttgcacctcgccagtcactgcacactccccgggcgcggcagagctctgcgtaagcctccaggctctggcagggcacctcaaggcggcccctgcagtggtcgctgatgcaggcgttgaagaatgggcccgggggcacaaggttgtggcactcagcaaagaccctgtggggcaaagcgatcaggacggagggcccccagccccagggagctgcgtgcgtgcgtgcatgcgggcgggcgggggcgccccagggcctgcaacccccgaggggaggactcactggctcagcatcagatcacagagcggctgtggtgggcatggggtgggggtgggtgtgctagacaccggggctgcggggctggcagtggggggtgtgccagtcggggcccagcagccatcctttctgctgtcggggaccagccacgtcttggccatgtccttgcaactggcggcagtggttccgtcccgctggagacagtcgtccctctggttgttggtgcaggtgcctgggagtgggggcgtcaccgcggggctggaatctggggagcctttcacagcccccacccccctcccccactcattcccctccccaggcttcccctatgctcactgggttgtcaggcccagcagcagccctggccggggcaggacccgccgcccactcaccgcactggccctcggtgttgttgtggaagaggctgtagggcagccgggcctggaagacttggccattgaaggtgacgctcacgcccagggcaggaatgtccacacgcatggtggtggtccccagcacagacacaagcacgccgttcttgctgaaaccgctgctcaccggaatttggtcaaacaggatctgggggaatccaggggaaccctgagctgggaggcagtgccaggtgggctcggggagcagggcttctctttggggctctgcctccatgt

SEQ ID NO: 1884571 - DNA, 4001 bp, Homo sapiens
gactcgtcccttccctaccagtcccttccctagacaaaggcccctcccctccctgggtcccaggacttcctccctcaagggacagaggagcagccagagagcgacggttcagggccctgagggtccggctctccaggagaagctgggctctgaaccagggtgggtaaacgttgcagaagggctgtcaggacactcaggcgcccacacactccacgtagttggcagggtacaggccaatgcggccactctgcaactggccttggcaccagccctgctcgtcctcctcactcatcttcagcagctcctcccctgggggaaaggggattggtcactgccagtggccctggcccaggccctgttcctgcaactgggtcaaggactgagggggatggtgtggtcccagagcccagctagcaaagacatggctcaggcagaggcaggtcaaggtcagcaagctgccccaccccagaccctgaatgcagccaccaggcaccagctatctggacctggaacagctgaagggacagaggactggcccttaagaagtgggtatttggcttccctttctgacacccctgctcaggcagataaggcagaggctgaagctaggaaaggggtcccagggtacctgctcggaagctcagctcatcagcttcctggccagcgtagtcatagagtgccctcacccgaaccccggtggcagccttccggggactctcttcatctgaccactcctcatcctgccccgtgctggagaggggaggcaaagggagcagctcagagtgcaaggaacacggggctggagatctcacccaggatcagggcaaaggcctccctacccccagaggcacctgggagagtcaggtgaggtactaaagattctagctctacctcgccatgcccgactgtgagcaaagaggcaattcctgccacacgcagctgatttaaggcataaacgagagggaatgtgggaaatgcccagcaaatctaaaccactatgagaaccagtatcattacaactactaagtaggccctcaggtccctggcaccaattttcaacccatttcaggtgtgaaagaaatgaaaccaaggagaaaggaaaggagggcgggaggcagagctgtttctttgccacagccgcgctcctggctctcaccctggggaccccggggactggggtgggggtgcggtgccatctcttgtaggcacaatgctggtcagggtaacctcatcagggctccggccacccttctctttccggctgattgtcctctgtgtgtccaaggaccactcctgtggggacagtgcttatagtcaggtggggccatctgaaccaccttcacttacttcatccctagccctggccgagctgagtgggagcccatcccacctcccatccccaccccgcctggaacacatgcctcgaactgtggccagttcatggccatgcctggcccgtgggtgctgcgccaccagcgcagatcctcttcgtcactggctgcctcaatgccctggtgcaagtcacggtggagttcatggaacctatgacccaaggcacacccctcagtctaggaagtctagaccctgcatccctcagtcccagccagggcctcggggagatggaggagacccagtactaccccagatctccatgcccaccaggcagttcatacttctcactgctggaaaggtccaggtgctggtgtaaggtgagcagcatatccttgaagaaaagaagccgctggcgctcggcggcctggcaggtctcaaaggcctgttccatgtcctccatgtagcgtggagtgtagcgatgcagctctgccagcgtctgctcatactgagcttttgtctgggtgggagaggaggggcctggtgagaaccagaccttcttccacccaggactccaccagtgtttaccagacactgccataggctgctagacccagggctagccactaggggcaatcagtcccaagacccagctcctgccctcaaggaccccagcagcctaacaagggaggtgacatcaggcacagcatataaaagagtctggtgaggattgaaatgaggtcaacctacaggaaaggatgggagaaatcagaaaaggcttcctggaggaggtggaaactgcagcatctcaggatggggaggatttgcatatccagagctgcaggaaaggacacttcgggcaaagggtactgtgcaaggaaaagagctggaagttctcaactgctgaagtcatcccagtgcctgaaactccatttctttccctagtaaagcatcaccttttgtcaggttcctcctttaaatgatcatctggagagagggtggcaggtgaggaatagggtaataagggtgctggggactggacaagatgttcagggagcaagattcattcaggaagccgtgccctgggcgggggccagggctgggacctgtggcctgtaccttctcggcctccttggcacagcgttccacccgttcctgcagtttgcgcagctgctcctgggagacggcgctgtctgcctttgcgtggctctccctcgtctgggcggtcttctcatccttccgggctgcgtggtagcttttcttggaagcctcaacctggcatgcatggagaccactctggaccctggatgccacaccttggccccctcgatcccttgcaaacaaacaggaaggagcctgtctcggatacctcccccacccagcctcacctccttcagcctcttcagccagggcttctgggccttgcggaagccgtcctcggccgcccggctctcgcggaagccgcccagcacaggccggtggaaagccccccgctgccaggcgcgcacccgctcactgtcctgcccttgcagcttctcccgcacctccaggtgcagcgcgctcagccgctcagccgccgtgaaaaaggcatgccaggccttctccagtgtgccatactgggggcctgcagggagggacagggcttaggccaggcctgggtaccacccaaaatgagcctagcccctctcactgggtgtgaggcatggaggcatggggtacgcgcatggggtgcaaaggtgaatgacaaccctgtcagctgggcttattgaatgaggaccatgtgccttatctcactgactccttgtctcagccaccatcgtgaggacagcgacattgccaacattgaacaggcaaaacactgaggaccagagatgtgaactcgcccaaagcattatggctacaacaggagctgagggccgggcacagtggctcactcctgtaatcccagcactttgggaggccaaggcgggtggatcacaaggtcaggagatcgagaccatcctggctaacacggtgaaaccctgtctctactaaaactacaaaaaattagccgggcatggtggcgggcgcctgtagtcccagctacttgggaggctgagacaggaaaatcacttgaacccgagagggggagactgcagtgagctgagatcacgccgctgtactccagcctaggtgacagagcgagactctatctcaaaaaaaaagaaaaaaaagaggagctgagattcaaacccatctctgttgtgtaaacactacactccattgcctcaaaggaagagcctgtgtgtgccctcgaggaagacagcttgcagggtggaaagatccatgctcccagtcagagggcctgggctcaaccttcagcacttcctagctgtgtgcctttaggcaagtcccttagcctctctgagcttccagtttctcctctagaaaatgcataaaacaggcccaggtgcggtggctcatgcctgtaatccaggccgggcacggtggctcacgcctgtaatctcagcactttgggaggccaaggagaaaggaccgctagagcccaggggttcaaaaccagtctgagcaacatagcaaaaccctatctctacaaaaaatacaaaaattagccaagtgtggtggtccatgcctgtgatcccagctattgtggtcccagctattcaggaggc

SEQ ID NO: 1884572 - DNA, 4001 bp, Homo sapiens
gcctcatccctgctttgccatctggctcctagctgggaccccccaccccacccaggatgggccccacccctgctgcccacctgagagctgacccagtcccggtgcttctcgtggccgatctccttggggatgtggttcatctgtgtgatccacacgaaccagtggctttccaggaccctgtggggaggctcgggcactgccctaggtccagctcaccacttaggcaccctgagtggaggctggagagcagctgtccccaagtggccttgacttccttatctgtacaataggattgtggccatcgcccccttgccagtgtttaaagaatctgaatggagcagtgtccactgtgaggctgagtccagagcagctccgacacccaccgggccacttacaagccaggccacgctccctaaacccaccgaccctgggctcctgccacgcttgtgtttatgtgattccaccagcaagccagggaggcagtaccactggccccattctgcagacgggaaaagggaagctctggtggggggctgcagtgggggtcacctgtcgcctgtgtgtgacctcgccactccctgccatacctgacagcaacaaagaagagcagcaccccagggacgccgtagaaggggaggtaggataagaagaagcgggcatagaagctggcggcccagagcaaatcctgcagaggagggcagaggcgataccgagaggtctccaggtgcccggaggtctggaggcctggtgggtgggaggaggacctcaggcatccaacccttctgcctgatttgcctcagagcccaggacaggccaccaccctctctggttttctcagctgagtaaaggaacagggtccttgccctgccagctcacgaggctgattttagtgacgaaggtgtcatgcagggtgtgttggggaagaccctgccagggacacagatgcctggcagagtcagcccagcaactcctcctgggaagacaccctcaccgagagagacccacaccccccctgttcctcaacccccccccaccacacgtacagtcacgggcacactcgctctcctgctgcgcgcacacatgtgagccacactgttgcacgcatacatgtgagccacactgttgcacgcacatgtgcaccctgtttgccttcatgggcaggtactgtcccccgaggcaccacctcctgccacggcagccgtatgcccggggtcctgggcaaccccactcaccgcccactgcatgcacaccagcatgtacgccagattttccacttcaaagttcaccagggtgagcagcggcgggccgactgcaagaaggggcatgagagtgttcaggagtggggctgggctgccaaggtgagtgggcgccagagtgaggggctctgttactccaggaatgcccctgggacgttggtgctggtcacatccagctgaatgaccccatatcacccccaattctgtgtccaagcctccccaggctgcccttaccccaccacctcccaccacccttcaccgcaagtcagggccagacttgagtcctcactctgtccgccccaacaactgcccaaagactctagggctccggaccactctagtgagggcaagaagaaattctacgtggggcttggggaagctcccagcagggctgtgatggcccgtggctgcaaggtgtcccaggcacgggagacagctggggcaaaggcatgctgctgggagagtgtgtacagactgcagaggctgggaggatgccatgaccagggagacctgacagacgtgccccgccccaggaagtggctgggagtggtccaggacagcagggaggacagtgcaggcccaggcactcccccaccccagaaggacagatggacactcactcaggaagaagtacaggtgctgctggttgtagggtaggtatctgcgtttcttcttgccatactgtggagacaggcggcggctggagacagcagctctccaggccacctccttctcccgggcaaggtcacggggctggctggggccaagggtcaaaggcaactctagattctagcaagcgggctggtcgtccccagcaggttgggaggtgggaaggaaagacacgggggcagagcttggcccagccagagtggaggccagatcaggggctaggtcaggggcagagtggggacccagtgcattagctccccctcagctgcaggcccagccagaggttgtccacgtccctccccacccacctcgacggatgactcccccaggaggaagacgggcgccaccgtcacgtctgggtctttgtggaagatgttgggcttggcgtggtgctggaagtggcggaagttccaccagtgggcggagaagccctgtggaggaggagggggctctcagggcaggctgtgcccccgactgtgcccacacacttgggcagacccagcgccacccagcacctggctgaccacccaccccaccctcacctttagctgccccatcacgaacttctgggccacgtggttccaccaggacttcttgaagatggaggcatggcccaggtcatgctgcagacaccaggactgagcctggggagagaggcagggtcagaagctgttgggaaggacggagcccgccagggcctggggccccagtgaatcctttcagcttgcagggtacccccgtgctaatgctccatttcaagacccttgtgggccagtgtcctctttttacagatgagaactgagtcccagggaggtggaggggctcgtaagtgtcatgaagctgcagggcagcagcctctggctcagtggccctgtgcttgatcggaatctgttcaagaaggaacttcttggctcatctggaatgcagcttgacccacagacatgcctgatgggccttcagactgttcactcattcatctgtttattcatccattcatcctttcataggtccattcattcatttagcaaatatgttcacaatgcccagatgcatgggggcccacgtctgttgggcagttaaggtggctgcaacacagaactggggtcacctgagagatggccaggatgaaggcggccagggcactgggcacccagccaggacccaggaggtagataaggagccaggccagcacctccatggccaggatgtggcccagtaggaaagcaaagaaggtgggactggcatcaaacagcttcatgtcctcggctgcctggtgcagggctcggaagtcctcgaccagctgcgcctgccatagcagaggggccgatcagccaaggaagaaattcctccccacccccattctcctggagccccagccgctcctcccatcgccaggcccaaggggtgtgggcaaagaggaatgaagtgacaagagtacccagcccggggtgtgagctggagcactggctggtggtgaagcctcctctccctcccaaaaggtatggggtgggtaagacgctacagccaggagagaaatcagttcatcaaaatcctccttttgatggggacactgggcgacaacagggagggagcttgcctcgggatccaaacgggtgcctggctaaaccagatctggagccctggacttctcagggcatccctacagcttcactttcaactgcctgccccctgggaggggagggcaggctcagccctggctctgcatccccttgggcgaatgccgagggagctgctcctggccatgtggcaatgtctcccagccctccagccatccccctccctcaggggctgagcctctcctagggctctggctcacattcaggggtccatcctggctgggttcttccggagccagctctccaatcaacaggggctgtaggaacttgcgcacaaaattgagatcttgatggaaggcacggaaggcatcctgaaggagagcagacagtcaggcggacagacagacacagctgagtagcacagcggcaaccagcagagacaggcggaaggactacggatggatgggcagagcagacgacaggcggacaggaagtcagc

SEQ ID NO: 1884573 - DNA, 4001 bp, Homo sapiens
ccaaacaaacaaaccaaaaaaaaacaaaaaacacaaaaaggagccaggtacagtggctcacacctgtaattccagcactttgagaggccaaggatcacttgagcccaggagtttgtgaccagcctgggcaacatagtgagacctagtctctacaaataataaaaaattagctgggtgtggtggtgtgtgcctttgtcccagctactccagaggctgaggtgggaggatcgcttgagtacaggaggtcaagactgcagtgagccgtgatcacgctactgcactccagattggacaacaaagtaaaaccctgtttccaaaaaaaaaaaccttggggaaagcatttctggcagccctgtagggcatcatggtaacccaataaatagacattaataaacattcccaaaaccatgttaagaaaatgtaaagtttattaaataaagattttaagtttactactgcctcatttatttcctgcccagagtactgacctactatatgtgaaaatctctagctaataattaacaacgtctgagttacaacacaatatgtaatttgggttaattatcatgacctatttacacacaccaaaaatcctgctcactcttgacctgcacctgtgctaaattcaaggcaaatcactagttcaaaaaatacatctttaaagagtgcctgtgtctggatggagccttcctggtcttgtacaaaatacccgggagtaagaactttcagctataccccaagttgctcccatctattagtgcaatgcttgtaattcacaattctatgcacagctactgtgtccctaccagtgggtgctcctttaggctggttcacccggtatccaagccattacaagatgggagagggtgaaatgtaaaccctagcagaccaagcagtaaaaagatgaacggctttggaaatgacagggtgagtgggaggaaaaagtacagagaaagaggagttccaaagcaaagtgaccacagaatatatatttctcaaactgcttgaactcccaataaaatgacttggagcagtgatggaagaaagactccatcccagagaactgggcaagcactcagcgtcctacatttttcatgccaaaaatctcgtttttactatattatttcttccaagaagccctacctttaactgaaaaagggatacagaggacacctactttcttctacttggggactttactcggttgtggaacaatgaactagacagacactacttagctatgatcttcatcctttttcttagtgagcaatttttgtacagtctgattcagcaaaacagaaaacaaaacaattcaaaggaccctgctctggcatccactatctccgcacagccgggcgcgtggcgcaccgcaaggctctctgcactttcttcctccccacgcctctccctgtatttgttctcagagctctcaaatggtcaaatgagcttgctcaaaaccaacttaccactatatcaaaatctgttcctgtctttgttggaataggagttcaatcttccccagtactggctgtacttgaaacttgctctccacaatcaaaatttgcccaattcctgattatcagccagaaagctgctttatttgcaactaaaatatacctttaactttatatggacaacctaaaattctggctctagctgtgtgtgaggggggacatacagaggtgagaacaggccttctttggtcccacaccctccaccctccaatatccttacctcttgggcaggtgagcgaaggggtccttggccttgggctcagcagccagcgcctgctcacattcatccatctcctcctcaggagcaggggcagccgcctttttctcctccttccgctcagcctggggcttctgcttctcttcccgtgaacccttctctttccgtggtgtgtcctttttaggttgggtctctgcaaactttttagctggtgcagaggaaggcaggaaagtgaacgaatgttctgcctctttccacacccctccaaaaccacacagagcaagcaaggtaacagaggaaactgacgaatgggacaagtaaggaacttaggccccagactgctcatcagttcactgtgtgtcctccagcaacaacacactcagcaacaaatactttatatcgcaaatctatatagtaatacaaattagtcagggtatgagtgtacacgaaactgcacataatattagctaccacattgacaccctacattctgcaggtccccataacccaaaagcaagacaggaaatcaaggggttgatgcagagcaaaccagaccctgatcctggccatatgcctcccagtctcctcagactcaccatcaaactgggccatcttctcacacagtttcacttcgcccaagacagcccggaactggggctggttaatgcaggtgaggaaccagcggttggtattgggaaaggcctggcggaaagaaggctctagaacctgccaggacataagggtgtaaacaaagtcagtggaaaggccctgaagagttctgttcacagcaagagtccttgctctacctaagtcccagtgctcaccttcttttcaaaccctatagacaatagcttcatacaacatcatccttccctggattacttcccatttcttcatttttttcaattttttttttttttgagacagagtctcactctatcgctcaggctggggtgcaatggcgtgatctcagctcactgcagcctccatctcctgggttcaagtgattctcgtgcctcagcctcccatgccttagccttctgagtagctgggactacaggtgcctgccaccacacccagctaatttttgtacttttagtagagatggggtttcgccctgttggccaggctgttctcgaactctgacctcaagtgatccgcccacctcggcctcccaaactgctgggatctccgaggcgggcggatcacgaggtcaggagatcgagaccatcctggctaacacggtgaacccccatctctcctaaaaataaaaaaattagctgggcgtgatggcgggcagctgtagtcccagctactcgggacgctaaggcaggagaatggcgtgaacccgggaggcggagcttgcagtgagcggagatcgcggcactgcattccagcctgggtgacagagtgactctgtctcaaaaaaaaaaaaattagctgggcgtggtggcacgtgcctgtagtcccagctactccagaggctgaggcaggagactcacttaaacccaggaggtggaggttgcagtgaaccgagatcacgccactgcactccagcttgggtgacagagtgagactctgtctcaaaaaaaaaaaaaaaaaaaaaaaattttaatagagatggggtctcactatgttgcccaggcttatcttgaactcgcatgctcaagcaatcctcctgccctggcctcctaaagtgctgggattacccgtgagccaccacacctggcctccatttctttttctaatcttttttttcagtgtagtccagtttaatggatggatgcttgggtccatcctccatttaggagtaggagtaataattgtcttgctcctttacaaaactatttcagatctactgtttccaatcttttaaatttcaaacgtcggccaggagcggtggctcacgcctataatcccagcactttgggaggccgaggcgggcagataacctgaggtcaggagttcgagaccagcctggcaaacatggtgaaaccccgcctctcctaaaaatacaaaaatcagccaggcatggttgcacatgcccgtaatcccagctactcaggaggctgaggcaagagaatcacttgaacccgggaggcagaagttgcagtgagccgagatcgcgccatcgcactccagcctgggggacaagagcgagacttcgtctcaaaaaaaaaaaaagattgagacccacagagggctatcgaggacttttttgccaaataaaatctaaacactataggtatttactatctatattggccata

SEQ ID NO: 1884574 - DNA, 4001 bp, Homo sapiens
ttccatggctgtggcagccgtgtcccggcccccggttccggtgcagcctctggatgcggaggtcccaaatcgtggccccttcgacctgcgctccgcgctctggcgctacggtctggccgtcggctgcggcgccatcggtaagacgtgggctggcttcccactgtgacaacgtggggtggcgggacacgaccttccctatacaggcagggagagtcagggactccctatccgagagtggcgggcgggctttaccccacagaaatgtgaaacactggccgggcgcggcggctcaaatgctgggaggccggaggcgggcggatcactaggtcaggacatccagaccatcctggctaacaccgtcaaaccctgtgtctactaaaaatacaaaaaattagctgggcgtggtagcaagcgcctgtagtcccagctactcgggaggctgaggcaggagaatcaattgaacctgggaggcggaggttgcagtgagccgagatgacgccactgcactccagcctaagcgaccgagcgagactcccctctcaaaaaaaaaaattgggaaacagtgatgtctccgagcgccgtgccctgtcatagcctaggctgagggctgcccttcactctgcgaccttgagcaaggtccttaaagctctccatcttcccattaaaatggaaacggacatctattaaggttgttgggaggaataacaagattactgggtataacaggagctcagtactgcactccagcctggccggcagagtgagactcagtctcaaaaaaaaaagcgctcagtaaatactactttcatcccacaaatttcttattcagagggcactggaaaggtcggtacttagatgcccagtgaaaacccctcaccccaatctctgccctgcctgcaggagccctcgtactcggtgctggtcttctcttctctctccggtctgtgcgctcagtggtgcttcgagctggagggcagcaggtgaccctcaccactcatgccccctttggcttgggggcccatttcacagttcctttgaagcaggtatcttgcatggcccaccggggtgaagtccctgccatgctacctctgaaagtcaaaggccgacgcttctatttcctcttggacaaaactggacacttccctaacacaaaactctttgacaatactgtgggtgcctaccggagcttgtgaagaaatgacctcaagtcactcacctctccaagaggaggataaaaactgaaccttggggagccaggtgtgttggttcacacctgttgtaatcccagcactttgggagggtgaggcaggagcactgctcgagcccaggctgggcaacatagcgagaccttgtctctatttacaaaaaaaaaaacaaaaaaaaacgccaatcttagaatggagtaacaaccagggtcacacaaggaggtcaagattcattaacaacaaataaaggagcagtcatccctagggcagctgcctaacagtacctctaagtttcagtccatgtctgcttagccttcactccttcctcctatctagttgtactttaacatcaaaaactcactactaagatgaagacagtaatataatattttggtacaaaaacagctgcaggaagaggtggaggggggcctgtcattatgtttcccccccaccccccaacgaaaggaaaactaagactcccaacataaacagggccttgaggggggggattacaggcacttgggcatggagtcttcggctgcaggaagcactccgcttattcttcaggaatgggaaaggcgtgacccaacgagagcatctgtctcagagctccactcagggtcacccctctccagaggccggtatggggtggcttcagacttccactgcacgacctggagcaccaagaccacacaccacaataccaaattcacccaagaagaggtctgtaggagacagggacaggatcgtcaggagtgggaccatttcaaatccagtccttcccacccacacaccactctgaactgctgaattttaagctgacaaccccttcagctcctctcactggtaggccaagctcacaatacactggtgagcacccacacagctacagatatttatgtcagtttttcctcctatccttgggtctcacttcagcattgtgtaggttggagtaaaactgcagagcagttccagggggtgtccatggaattttctgggcttcagaacagctgtgaggtcaaagagacagttgtgagaaagcgtgatagtttatatccgaggcacacctgtgcccagtgccctgtgagttgagagcaactgatggggataaaaggaaattataggaccccgctgcagagggaaggtagtcagccccagccaggcttccctccctctcccattacctaattgtagtgttcaaggagatgatggagttgcagagagacctggtgccaaatcgaaggatacaggcagacaccaagaccaggaagacggctatagctgagatggccagtgcaatgcgcagccctatagcacctctgaaagggagagaacaagccttgtggtggaggtgaggctcatcctacctcagcccctggccctcagggttaggcagtcacctgtgggagtcctcgatgcagctgctgtagatccagaagagcaaaagcaggaggcagtagagggccaagaggccagaggccccagctacaaagtagcacagggatggtgctgagggacgggataaggccagggaggagccattcagggtggccacaccatacaggggacatctaccactgaaggagccctgtggagagaagctgctgagtcctagatttcaggttaatgtctctagatacagtctcttggtagggtgttagtgataacttaggaatggtcctgcattccaggaagttatttgtgcaccgtcaattcctatttctgggacagggatattgatggagagggcctgctggggaatcacaccggcagtggccagaaggatcagaaaataggcaatgaatatagaatgcaatgagcttcagagaagcctcacaagttatggtctctgtgcagaaaccttagagtaaacccaggccttgtatatccttcaacaaataactatctgtgaggtgctttttttttttttttttgctggagtgcagtggcgccatctcggctcactgcacgctctgccttctgggttcatgccattctcctgcctcagcctcctgagtagctgggactacaggcacccgccaccatgcctggctaattgtttgtatttttagtagagacagggtttcaccgtgttggccaggatggtcttgatctcctgacctcgtgatccgcctgccacggcctcccaaagtgctgggattacaggcgtgagccaccaggcccggccagtgtttttgtttttgtttttgcgatggagattcgctcgtcacccaggctggagtgcaatggcacgatctcgactcactgcaacctccgcctcccaggttcaagcgattctcctgcctcagcctccgaagtagctgggattacaggcatgagccaccacacccggctaatttttgtatttttagtagagacagagttttgccatgttggccaggctggtctcgaactcctgacctcaagtgatccgcctgcctcagcctcccaaagtgctgggattacaggcgtgagtcaccgcgcccggcggatctctgaggttttctcatggtgtaaaataggcacactagtgcctactttataggcattaaatgaacccatgtttattaaccagattacctggctggggtaaacgatgtaaattattggcttctacctttacgtcagcgttttctccatctctcattttgtcatttaacacactgtgctacaatcatgtggcagcttgatcatctccactacactatgctttatttctcgacaaagctcagcacaaatggcttctgatttaacggatggacgcaggttctgcactgacttctgtttcggaaccac

SEQ ID NO: 1884575 - DNA, 4001 bp, Homo sapiens
gacacacacgtgtagtaggcactcgccaccccactcaccttgctcagctggatctccatgaggacatggtgctgccgcccgctgcccccctgcgtgcgccatgagttctggggccggttggggccagagcagcgggaaggggagctcctgggacctgagaggccagttcttgccctgggaagagggacaggggccaagctgactcagaggaaccccattccctccccgtcctcagcgggccttttagcctgggacaagagacccccgctagccccagtcctggaaggcaggcgggataaggaaggatgaggaaactgaggcccacctggggtggatggggctcaaggtctccagctgctgaaagtcagacctggaccagcctgagccccaaccttcaccagctgccacctgcacccgctcctcctcacctgtggccggggtgggggccaaagtctcggcccccatagaggtgccagacgagggagacctcacgtagcaccacccgagtgctgggcactgggaaatgggcaggtgcccgcagcaagtccgtgctgccgatcggccgtgagaagtaaccgtccctcacaacgatggggccgggatgcagctgtgtcaccacaggctccccatctcggggctgcagggaggccaggtagacgtgtgacacagatgttcgatccagcccagctgcccccagccccagcaacctggcctcacttctttttcatttttttttttttatagacagggtcgggtcatgttcggtcacccaggctggagtgcagtggcacaatcacagttcactgcaacctctgcctcctaggctcaagcgatcctccattctcagcctcctgagtagcagggactgcagacatgtgccaccatatctggctaattttatttttattttttgtagagacggggtctcactatgttgctcaggctaatctctcattgctggactcaagcaattctcccaccttgacctcccaaattgctgggattacaggcgtaacctaccatgcttggcctcctccctgtttttgatgaaagatgacactcctgggttgctatcacccgagtctatgcctgagtggtctgtccaagaggagcctgagaatgccaggctcctgccagccctgcctcctaagacctgggtgagttcagacattcccactggcccttgcagccacatggttctccatccctcttgctaactgccctctcctcttcctccatcccttgaatttcccagtccctctgcccaaaacaccaggcctcctcttcctctggaaatccccctactccatcaaagcccagcatcagggctgcctccctagggtggcacagacctagcaccacccccgaggtgatggcaaccacctcctgcctgcttctctcaccacgggagctccagatggccaggcaaccacccctgagtgttccgtccccgctccaaacacacctgcctggacggcaaactggtccatccctcccaccacgcaccgggatgcccaggccgggagcatcaaggatgcagaactcatcactgtccagggtgtctccatcgccctcctcttccctttcatcttccttctcctctgagcatgaccctaagctgccagcagggcccccgacaggtggtgaagggggtggggccccactccgttcacctgggaataggtagacggagatgggcgacgcctgagggaggtggccacctataggagagaggccagtttggagaggcgcccacagtgggtgcctgactgtgtctgctgtccccacagcacccccacttcacctgaaggctgggccagctcccgtaggctgcgctcggtgtccaggagggcgtcggccaggtcacgctggttgatgagggccgtctccactggggggcacgagggcagagaggcaggactctccgagagctgggccaggcaggggaggagcaatgagtgagacaggacagagctcccccaaccccaggcccgagggccatggcaggggaggggcctggccgagctctggtagcctgtgtggccaggcctcacctgtaccttctggccggcgatctccgtggggctggggggccggggtggggggtgcagatcgcctgtgctcattacgtactggagcaggttgaccagcagggcacaggagtcggcacagctgtgcacgtgtaccacattgttggagcagcgcagctcgaatagtggctggctctgcaggggcggggtggggggagcagctatgtgaacacaggggccactgcctgctggccccacccgctcgctgggagggcaccgcagttctgatcctgccacaggcagaacagggatggtctctcctggagtggatgacctgcccagtaactccactgaacagatgaacaaactgttcacccagagggtgaaaggggcttggcccagggccatccaaggaagcaggagtgtgcccacccaccctaccccactccccgtgaagggctctgcatgcctagcgaggcagggcaggttatctccatcttacaggagatgaatccggggacctacaaaggtggctgattcccagggcctcgctggtgccctggctgccgcgtcctctggtggcagggctgaaacccattcattcattcagccagcatcaagggacacccccaccagggctgtactatggccctttgcaggaggggcgctaactgcagcccaggaagggcaggcatgaactgtgtccggagcccaggcacgtgagggagcagcagcccctgaagactcccttggcccctgcacctgctgtggctccaggagccagagtgacagcctcactcaccagtttgccctcggtgctccctttccaggttttaatcacaagttccaagaggtcaacatccaaaacacagacataatctgcagcagaggcgagagaaaggtcctgtggcccccttccacccggccccggccccagcacctgggggaaggatccggttgatccaggtgtagtccctgctgtgcgggctacgtgtgggagctaaggacccggccagcagctgcggggagacacctggctgctctgggtgtggccggggcggtggtccctcagaggggagggagcccagtcccggccctgcccacctcgccgcaggtccagggtctccacctcacacttgtcggacaggtacaaggcggagtcatcgaggatgaacctgggggggaacagggctgagaagggcccgggcaccgctgcagggggcagctccacgggagccgagcagaggggtcccaagcccacaggaggtggtatggacaggcccctccagcctcagcgttcctgcctgcacaatggggagaaggcccagacagcaggcagtgggaagcgggcagcacttgcagctctcaaagtgcctgcagttccgacacctcaatggggcctcatgacagtcctgggaaggggtgtccatttttctccctgctgcatttgtggttcttctaaaataagtccttatttttggctggcgcggtggctcacgcctgtaatcccagcacttggagaggctgaggcaggcggatcacctgatatcaggagtttgagaccagcctggccaacgtggtgaaaccccatgtctactaaaaatacaaatattagccgagcatggtggcgggtgcctgtaatcccagctacttggaaggctgaggcaggagaatctcttgaactagggaggcaggggttgcagcgagcctagatcacaccactgcactctagcctgggcgacagagtgagactccatctcaaaaagaaataataataagggctgggcatggtggctcatgcctataatcccagcacttttggaggccaaggcaggcggatcacgaggtcaggagttcgagaccagcctgaccaacaaggtgaaaccctgtctctactaaaaatacaaaacttagctgggtgtggtggtgggtgcctgttgtcccagctacttgggaggctgaggcaggaga

SEQ ID NO: 1884576 - DNA, 4001 bp, Homo sapiens
gcactcgctcggggatggtttggtggtccccgacccctgcctcagagcgcaggccccctccgcaagcccagcccccgcccagtctgtgaagcccctggtcccacagcccctccactgccatcactgcatgctgaccgcctgccctgcacccctgaggtccacacaccctgtgctcaccccacccctggtgtgtgctgcgctgcacccatcccagaatcccccaccctggaacccccatcccccttttcatgtactcctccccatgccccccagcccccctctgcccaaggctggcctcccccacatcatgcccacagcccggattccagagtcctcgagacaaattgctgtaacagtgtttattgatgatgagtccagggctcctgctgaagccctggtggggaggggcacagagcgagatggggcgtaatggaatgcttgaaggctgctccgtgatgtcggtcggagcttccagactaggcgagggcagggtgaggcctcgggcacacagccggcgcccagtcacccggcccagatggagggcggccgggccctgcacaggcacttgccaaggtggctcacactcacgcacactcgtactgagactcaaggccgtctccacaactccaaccagtgcaaatgacttagtgcaaattaaattcagaagggacgggggaaacagagtcgtggaggctttgaatctctcagaaaaaaggaaagacaggaaagctcagaaacaaagagacagaaggatgaaaaagaagaagagggaggtggtggggacggcgtcatcccgctggaggagctcagctctgggatgatgtggtggctggtggtcaaccgtccgccgcagggggtggccatgaagatggagtcgccggtgcggggtgggtgctgcgggcgctgctgttccgatggtgtctttgatgttgggctgatgaggtctggttcctctagcttcacctagagatagcgacacgtgggtgggatgggggcagggtgctcgggggcctggaggcttccggaaggagcgctggtgctcaccttccagagccgattcctgagtcaggtagtgcagtggttgtaaagtgcagcatattcatttccaagctagagggttttgtgtccggattcaaaggcccaggcttgagctgggtagcaccatttctgtggatggggaaggagtgaggtcccactcagctcctctcgcgtgccccccaccccaagtgtggcaggaagcccctcacctttcatgttgtgggttctgggagcccagagggcagccatagtgtgccgactccgtggaggaagtaaagaaacagacccgcttcttgccgcagccccaccagcctaaggtgttctgtagaagacagaggtcggggcagtgagatggtggcccggcggggcggtctgggcagggccgcgtcctgacgcagggagggcagacacgctcaccaggaaggccggacgcgcctcctctgtcctcgccgtcacaccggaccatgtcatgtcctgcttgtcacgtccaccggacctggcgtcttggccttcggcagctggtgggcacgtccaccccagctggagacctggctgtggggagaacgagagagtcgtgtggggagaacgtgttggttgtgtggggaggggcgggtgggggctgagggtggcagagggggaaaaactcaccctcgtctccagcccgaacgctgaggcaccgatcccggctccgtcgccgcccgcgaggcccgccttggccacgggctctggaggccagtgcctcccgctcgccgcccgctgcgctcctcacccctgcctgcaccatcctccctcctgagagctcattcactccgccccgcccgcctcgcctagtctggtctcgccccatgcccttgactcccctggatgctgtactgtctgccaagccagccccaggggctgagcggtgagggcatacagcgtcaccaagtccactgtgggccctctccgcaccagaccctgggccgcagtgcctcgtgggaccggcgcccgcaggccgagcccctgcagcctccttgctgcgcaatgtcccggggcccccctcccgtggccgcttcgccctcctggtgacgtcctgctgcaactccccgagcactgcctgtcttcccgctctccagccctcgaggctccggcataggcctgagaaagccgtgccggagctgcccctgtgcctgctactaaatgaattgcggtgggtgaggtggcagctggggacccctctgtcctgtgtcccctgccatgtccctgtctgacccaggcctggggtaccaccccacgtgctggaccctacgctggccacccctgtgctccctccctgccctcttgctctttctgcctggaacgggcccataaccccccagccttgcgcagtctcggctccccccgagaagatgtcacctttgctaactctcctgcccccatcctgcccctctgctgggagggtgtctgcttctccccgccagccctcgatcccctaaacctccttctttcagaaggctggggaagcgaggcctggggagggaagggactcacctgcccggcagatggggtcctcacctgcccgctgctgccagctacacctccgttgcccaggccctgggatcaaaccctgcccaccagctcccctcgtccaaccagctgccacgtcctgtaaccaaaagtgaccgggatgaatgcctggctcccccttctttccagccctagctcaggcccatcgtccccagctgatgtcgccctgtctgcacgatgcctgggcgcctactccacactcctcactggcctcaggccccaccagccctgcctcgagctagcccctccacccgtcatcactcctgccagactccagatgtccaaggtgctccttggctcccacaagctctcctccagcaccccatcttcccctggttgcccctcggttccccacttccccagtttcccccgttaccccccacccatcccaccccctccctcaccctgctcctcggtcctagcccgggctttttctaactggggtggccccgcccagaattcccgcccctgccctgccggccaatcagagcagggccctcccgagggcccccgcagggcccacctccgccctggacagttccagcacacgtctctctcacccagcacccatcctggaattctccaaagacggcctccccgcacccctcctttggcatccggagacagggctgagcattgccccatcacctccctcagggtccaggacttctccctcccagaccactgtctcccctcaggggacaccatgcctgctgctccctgcctgccagcgccctgcacatactttgcacatggctgggggccagctgcgggtccctggggactcggatggcacagagggccccttcctgccaccatcacggctcagacctcacgttcctggagagtaggggtggggtgctgaggggcagagggaagtgccgcaaaccccctggtgggcgcggtgccagccccccaggccgattcccatccagttgaccgagcttgtgctggtcaccgcggtttccgcaggacagagtccccacagccgctgggcaccccggtcccattcgcggccactttcctgtctgaagaccgcatgttgccgggctgtgcttacggctcgcgggcgcactctactgacaagcggtgggcggcctcacagactctcccaggcccgcgtggggcaccacggttgggagtggagtggagactggcgagtttcgactcccccagccaccccgctgtgggtccgtcggtcaccaccttggcctttggtgagggttgttggggccctgcagtccctggggttcacctcaagtctcgagtgtcaaagccgtgaaggggagcaccagggccaagggacccagagttcacgggtccaatcacccagcaggccctctgggatgtggaagggctggccgcgccttcggcaaaccctctgttcccatggcccc

SEQ ID NO: 1884577 - DNA, 4001 bp, Homo sapiens
cccagatacagggcacccactcacctggatagcctgtaccaaccggttgctgagttccagggcggcagaggctgtggatgagccaaaggaggcagcccctcgctgcagcccccgcatgaggcggccatccttcctgtactgctcaatgggcagccacagcaggtcccggaacccttggactagggggaaggagcgctcagagacacccgaggctgccctgcccccacctcctcctcttattcccaatggcagcttctaggttgcccaagggtaaaagcagtttcgagggcttccaaacctagacactcacagagctggacaaccgagtgcatggggcccacgcctcccagcaggccgggcagctggttcttgcggatgtcctgcagccactcgttgagggcatagcccagcaccttgtccacacccaggagcctggcagggcagggaggtgaggaggcagaaggtgaggcagagccacacatggagggattgtggggtcaggaggactcagtacccctgtggcaagtactgtgggcactctaccctccctgtggtcccacccagtcatgtgcagagggactgtgtcctttttttttttttttagatggagtcttgctccgttgcccaggctggagtgaagtggtgcgatcttggctcactgcaaccgcctcccaggttcaagcagttctcctgcctcagcctcctgagtagctgggattacatgtgtatgccaccacgcctggctaatttttgtatttttagtagagacgggggggtttcaccatgttggtcaggctggtctcgaatgcctgaatgtgtgagccatcatgcccagccaactgcgtcctttttacagaggagaaactgaggccctgagaagggtgatgacttggccaaggccacacaaccagtcaggaccagaacagaaggaagatcagggaccctggagagaggctggggtgctggggactcacccgtgcctgcaacagagccgctttagcttcagctcggagcagttgagttgggccaggccgatgaggaggccagcaaaagtgccctgggagagggagggggtccaggtttacccaatgggactcagggagctagctagcccatgggagccactggagagcgccctggctgctaacagtgcctggatgcaagacctggcccccagagggactcagccacagctgaccccacatggccaccccatccgaccgccccacttaccacctggtccatcgtgacgtgcttgccatggtaatccagccagatggggacctcagacgtgaagcggaactctctgggtaggggagcaggaagagggggttctttgctcactggcctggcccccagcaatctggcccagggccccccacccgcagtccagcagcctacctgaagtagatgggctgctggtcaggaggggaggggctgtgtccacctcctggggcctcctgcgaaccagtggtctctacgccttcggcctgcccttccagggggctgctgggctgggctcgagtctcggggcgagctaggggaggggaggtcacagactggggatggggccaggaatgactgggaacctgtgctgtcctgggaggcagaaggcccagacgctcccctccctggcccagcctctcaccctcagcggaggtctcccctgggaccacggggttgatgccggccaccagactagtgaagaagtccttgaggaagaagagggcatcctgcaagggagaggtccagatgtggatcagactcagaggcctggagacagtggggtcaccctaggctctgccctcacgtagaccactcacctggtccacattgagccgcaggggcatcagcgagacgcggagacagcactcaggcccacccaggttggtagtgggggccacatgcagcgctttgatggtgagctgggagcagagggtgagttctggacacctgctgggcctctggggcagcagctcacccagctgttccctgacagctcacccagccaccctgcctctgaacacgctgttcccttcgctaacacagcccctagctctgcccttctcccaggctcacaaacaacctgggtgtttgtgtgggaatgcgtgtatgtgtgtgaatccatgcatgcgtgaagatgtatccccaacggtctggtgccctgccccagggtggatggtgcaggtcgctcataccatgttagagtgggcacgtcgcggcatccgctcactcgtgtgtaggtacaggaacttgttgatctgggaggaggcgagccggtctcggacctccagctcctgcacgatgaacacctgacgggacagcggtcgctcctccagctcctggctgggggccgcagggcctgtggctggctccgctgggtacacctcgtgctggaagcttacctgtggggtggacagaggcctggccaggtaagcagggccccaagagggagggaagggctggccccagaccccttctctattctttttttgagacagagtctcactctgtcgcccaggttggagtgcagtggcgtgatctcggctcactgcaacctctgcctctcgggttcaagcgattctcctgcctcagcttccccagtagctgggattgcaggcatgtgccaccacacccagctaattttagtagagacagggtttcacaacgttggccaggctggtctcgaactcctggcctcaagtgatctgcctgcctcgtcctcccaaagtgctgggactacaggcatgagccaccatgcccggcccctaccccttctctattctatgcccagcagggacctgcctctccctccagacctgaccctgctcttgcttcccatgccagctgcactggtctctgcccctcaaggagtccaggcctgttttgccttcaggactttgctctcgtagcccctctccgtggagagccttccttccccctcttcctgcacacccgctggctggccatcaggtctcagagaggcccctggccccctgctctgacactcatctcccgcaggttcttgcagcacagcccaccaacccgagcagcctgaggcccctctgccctttgcctctagcggctccttgggaagcccagcactggcctggctcactctgagcaagtgggacccccctgccccaggcaatttcccaggcccaaaccttgaaccctctgtaccactctctgtatctcacacaccccatccgcagctgaacctgtggccagcccccatctaggctctcctgaacctgctcactagccctccctgattgctgcagagccccaccccacagaggcctctcctcaaaagccctgaggggttcgtctcttgtaagactcaaaagaaacattctgggtcgctggttatgcacaggctctgctgctcctggaaatgtcaggatgcttccagcttccagcatttttttttttttttgaaacagagtcttactctgttgcccaggctggaatgcaatagggcgatctcaactcactgcaacctctgcctcttgggctcaaacaactctcctgcctcagcctcctgagtagctgggactataggcacacaccactgcaaatggttaattttttttttttttttttttggtagaaatggggtttcgccatgttgcccaggctggtctcaaactcctgagctcaggtgatctgctctcttcggccttccaaagtgctgggattacaggcataagccaccatgcctggccccaatttgcggctttcacgctgtcctctctgcctgaaaactcttcctggctcacatccccacttgttcaggtctttgttcaaatggtgccttcagaagaggactttccagaccctccccagcacacctgtctcctccacccctgcagactctcccctgagcgctcttcaccatcggacacactcgatacatcttggtccctgcctggcttcctccactacaaaggcaggggttttcctctgcattagtcattgctacacgtgacatcgagaac

SEQ ID NO: 1884578 - DNA, 4001 bp, Homo sapiens
gtccacacttgggaacgggagctaatactgttcggcactgcagtgtgactccgcacatacaagtagggcttggaggggcagccccttctcctggaaaggggtgggggaagaagagggcttctcagaggctaaaccttctgccttcatggccccagcagaacacagggctgaagagttggagaggaaggctggaactgacccgagatccccatggctgcctgggactggagtcaaatgggaaccccagcctctttccacttggcctaggggatgccgcctctttctcagagctgggggtactactccctggtgcagacagagagggagctggcacttggtggcaggacatgttccagcgagggctgctcaaaagagcagaggctggggctgggctggggcagtgtcagtgggcaacaggagactccagcttctgcaggcggcgccggcggagctctgctgcatcgggctctccatcctcaggcatctcctctgtgcccactgactcaggagctggggacagagagactggaagtggaacctagagaagttccctgctcccccggctggaggccaatcacacctacctggaggcctttccatttcaggggctggtggggaggctcctggggttggggtcgtggcctctgagctagggatgctggtggaggaggcagcagcaacaactgtagtggcagtctcctcagtggagttgactgaagtggcaggccgggggggcctgggaagagaagggacgagaggcgggcctggccttggcatccaaggttgggcagattctcctgcccttggtgagccttgcagaacagagtatagaatgatgtgcccttgtggccccagtgcctggcaaacacaagtgaacatgctgaatgaactcagacagggtgactggactcaagggccaaatgattctatcccttagctgtaaggtgcttgcaggcagggactgttgacctgttcactcttaccctgcagtctccaccctggggagtcaggcaccttataggggactcactcaataagccacagtgctcgagccttggactcaagttcctctccaagcctgtgctgtcactgctagatgccaggcattatgtacatgtcacttttttaaaagacagcgtctcggctctgtcaccaaagctggaatttagtggcacaatcatagctcactgcaccctcaaattcctaggctcaaacaatcctcctgcctcagccttccaaagtgctgattataggtgtgtatctggcagtacacatcacttatgaatatgaattaagacccctttattcaaataatgagaggtcaaaaatgagtgatgggaccagcgcttgaacttgagccaggatggctccaagtgacttcctattattcgctccctcagtttgggggcagcaattgccaatctaagtgtcaccacatctcagaagaatatcatgtgatgaactaaagcactgcaaattctgaataatttgactttagaaaaatataaaggaataagatctaaagtcagctctcgaataaacatcactcctacttagatccagacatgctttctggagtgggaaataaaggcaccaggagttaccaagaactcctggagacccttggtgggcctgtagataggcagcctgaattggcaggtgtcaaaggccaagaaccactgctggggacctcttggcagctccactcctgacccaccaaacccactctgcttcccctgtacagacacaccccaaggaggccagcacggtgaggtactggttgatctgcagcatggcggcgtccagcagtgtgtggatgttacgcaggctctgcagccgggcctccaggtgctgccgctcatggccctccagagctcgtagctcctctggggtcagcccagcaaagcccgcagggggcacaggcattggggggaaggctggagagagagaggctcagtctgggctgctggggccagacaccaacctcacccccaagaagaacccagagagtggcccagcttaccaaagggtggaggcaggggcatacccatccagggaggagggaaggggaaaccaggggcagggccagcctctggggcagagccagagcctgggccagatgctgtggcagaagcagcagtagcactggtgccagcagctgtggttgtagctgctccactgggccgagaaagggctgctgaagagcaggaacgaagtcagtgagtgttccatccctgccgccccctggctgtcacagtacccaaaggctcacctgcactggtggatggaggagccacagcctctcctgagctggggggaggcgggacaggtggaaaggggcccatggggggccacagtgggaacatgcctggaggaaaaggaggcaggaggccctgggggactgcagagagaagacggaggtaaggaaagggccaaatggacacagacccaactcccaggcagggggcctggctattgagagctctgtcctattcccacaggccctcagcccagcactggtcacactgactgcaagcatctatttctcatcttttaatccctccctggcccagactgagattctggagggcagggactctccaatttcccagcatcttccacatccagcccagggcaagtatccagtggtatgccgggtggccagacaaggggatactcacagttggggggctgaggcaagagtggtggggggtggggggcagggggtggcccctgatccgcaggctccgggggtggtggtgactgcgctggcagcgatgcacgaaggacatccatacggcaggtggggcaggtctgctgccgctggaaccaggagcgcaggcagctgcgggtcaaggccaggcagaggtcagcaggtccctaggggcctgccttctggggcctgtgccctgctgtgcaggctccccagggcccctcccacctggtatggaaaatgtggttgcagggcagtctcttggcaccagtcaccatctcttctcggcagatgatgcagacattgtccattgcctggagctcctctggggtggcatctggatacctggttaggatgacaggggctgtatcaggtccagagctggaagcagagggacccaggaccgagcttgggacagcagccatgacaagcctacttacagggtgttcatgttgcggatggctcggcgagacatgatggcatctgtcacagctttcttgaactgtctgaaaggacagtcagtgaaagcaggagaagggacgggatcaggtcaggaggatcgggggacagggccgggctcacctcatggccaggtacatgggccggatggcaaagagtgggaaggtgtgcaccttgatcatgatggtcatgaaggccatgtacagcagaaccttgatgaagcctgaggggaggggatgcagaaagcagcaggtcacagggccaggaggcagagtggaggatgctggtccagatcaggagaggcccaggcccctctcacctgtaaacagctctgtgtagagcatgtacacagccttgttgtcccaggggttctcactctggaggtccacggagtgcagcacatacttgatgaagatggtgagcaccatcgtcatcaggatggcatactgaagggagagggggacgagggggatgtaaacacatagctcccccttgctgcacccacattgctccccaaggcctctgcacagcaggtgcagtggtacaatcacaggctctagacacacccagggtcctcctagcccctccacttactagctgtgacttttggcaactcagtgaacctcagtttacttatctataaaatgacataattaactgttcctttataacagtattgtcttgctgaataagagatgcaggtcaggagctcagcatagggcctggtgtgaaattcgcactcaacaaatatgagctgttgtcactgaacacattctctctctgccagggacacgcctccagttgtccatggaactaatcctctcctgtc

SEQ ID NO: 1884579 - DNA, 4001 bp, Homo sapiens
cactcgcatgcctcctcgggacccccgagagctgccttgggcaagagcagctatggtgtggctgcccccgtggacttcctgcgcaaacagagccagctgcttcgctcgaggggccccagccaggcggagcgtgagggcccgggaacaccacccaccaccctggcacggggcaaagcacggagcatcagcctgaagctggacagcgaggagtgaggcccacaccagcctggacctgggttatttattgacacacccaaggggcccgaggggctgcgtgtgggaggctggggacccagacttttggccccagcgctggcccccccagccccacaccctatatctccgtgtgctcctcggtgttacttccctttcatatgaggggacccagcgccggggggagggaggagggcgtgggcatgggcgcagaggcttttccagtgtgtataaatccatgaaaataaacgccacctgcaccccacccactcaccccatgcctggcatcacagggcagccagcccagtttccagttcaacaggggacactgatgtgcacagagaggccaacacacacccagggccatccagctcacaggcagggtcaggatgggggcctgggcctcaaaaggtcgcacgaaacccacgcccagggccatccatgtcacaggcaggtcaggatgggggcctgggcctcaaaaggtctcacgaagcgctcggccctctcctctttctggacagtcagcccaccccagcccaacccggctcacctcagccccagcgtagcttctcatggaaaccctgcccccagacaccgaggccaggagaccatgggatccgaggctggagtgggagggcagcaccaggagactacctccctcaggtgcccagctacctagcttgtacccacttcatctcccccttaagactgtgggctcctggggcgccccagccctggccagcgagagacacttccttggtgaaagagctcatcgtaatttctctaacagggacaccagagcctcagagctggtgggtggaggggctaggatttgaaccctgattctttgcctcccaacagccacccaagtaccaggaatgccaggtgatgacccggctctcccagtggagcagctcagcagactcagagagagataaataaaggcctttatatacacagaagcatgacgcagcacgggcaggggggctggcagctgcagcagtgggcttggcaggtaaggcagggccaagtgctcctgtcaatgggagaagatcccccggaaccgggctttgtcctcttcgtccttctgccggatccgtgcctccagggcccgcagctctcggctcaccacaggcgccagggctgggtccagctccagcactttggcaaagtcagcctgggcctcctgggcattccacacggccgcgtgggccttgccccgcttgaagtaggccttgacgttgtctgcaggggaggccagtgggcagtgggcatgcaagggcatgaggggggatcctggccagctgcctgccctcatgtctcctggcaccatgggcccacaggggagagagagccctccctgacctgaggatgccaccccacccccaatacaccattcatgcttcattggcacaatggggcccacagccctgccgagtagaggcatttagtcaggcccccgtgggagctcagaatgggggttgtgaaaggctaggtcttgaccccagcagtgacaggagaaaggccactctctgaccactcgcagcccccggcagcccagggcccggtgctcaccgtcgtacttgttgaggatggaagagcagtggtccagcacctcgtagtactcctcgaccaccagcttgcactggcagtagttgagcagcagcggcgtgatctgctggtccagctggatccattcaggggacccaggctgttcctgggagtatgggggcagggagcggggagaagctgtagacctgggccccctggctccacacccccctccatccatcctccccctcagcctccaggcagtaccttcatctgcaggttcttgaggcaggcaatggcatcgtagtacttggcagcagcctccttcacatgcccctcgcggtacaaccggttgccctcctggtggataagtggcactgcctttgccttctcttcgtctgtcatggcccatgggtcctgctggtacgtgccagggctctccacctgcagggcatggggcatatcacagcggggctcggggacaccacagctgcgtccgtcagcagcagacctgacccacatctgggctggctgggcccccagacatcacacaccagcagcagagctacttgtcactcaaaaagcatcaaacatcgatgtcacatctcctgtgtgcccagcactgtgccaagtgctaagaatagaacagtgaacaagacggtgaaaagccctgccctcgcagagatcatgctgcatggcaggttccctaaatggacaaggaaatccatgaattccaagggacttcaaggtgcggcagaggctataaaggaaatgagctgctgcgagacagagaatgaggagaccgggtgggcagggccggtttcctggaggaggtgacatttgagatgtgaaggaggaggaaaggagacccagggtactgccaagggtcctgcacaggttttcttgtctctgtccgctcccccagcagtccacctgcggatcccaccacccctgggtggacaggccagcgccgccctgaggctgggcagtgggggcctggtgagaccaggcgcggtggcccctcaccttcagcatctccatgtggaagatgaggggctgggggttctgctgcagggcgtccaggtcagcatggcccagggagctgtgttcacgcatctgtgcaacaccgcagcagtgccgctggccctccagggggtccttgcccaccgcgatgttgcggagactcttggccaccagcgggtacaggaccacatgctgcgggaaggcaagggcgccgggggctctgtcaccgtgggctggctggtcaccgggtccacaaggcccagcccccttccccaccaccatctgagaacaaacaccaaggcccagagagtgacaactgggaccctactccgtttaagcacaggaggcttttaattcaggactcctccagtcgctcagccctctctcctggtgaagccccagcttctgccacattctctggccaccaaacagagcacctaaccccctcctcacccccaccacagacacatgcctaccatcaacccctgtctccctggtccttacaggcccagtagaattcttacctcctctccctccagaggataaggccctttgctggactatgcaaagaactggggccccccacattctgttcccagcagctcctccttctgccccacccacaccccactgagggcctacctcagagctgggcccaggccagccacttcaaaaccctcagggaggccggatgtggtggctcacgcctgtaatcctagcacttcgggaggccaaggcgggcggatcacctgaggtcaggagttcaagaccagcctgaccaacatggtgaaaccgcgtctctgctaaaatacaaaaatgagccgggcacgatggcaggtgcctgtaatcccagctactcaggcagctaaggcagagaatcagctgaacccaggagatggtggttgcagtgagccaagatcacgccactgcactccagcctgggcaacagagtgagacttagtcaaaaaaaaaaaaaccccacagggagacaggcataggggacctagcctctaatctcttgcttggcaaagctgctaggctggtgggaaccagataaccagattcctcctacccgggtcctccccactcctcccactgccctgttgtctggacaggggctgactgccgggctgccatcagcgggcatttcctgagtcttggctctggactggctcgcgctgggcatcccaaagctagaagtaaacaggccagat

SEQ ID NO: 1884580 - DNA, 4001 bp, Homo sapiens
acaggcagccccagctggcacatggcaagttccgggaggccgagctggtcacttcagctctgaagtctcgacttcccatcagtaaaatgggaacaagtcctcatgggaggcaggaggaccccaacatacacactgtcaggggctgtgttgtgaccccaaaaaagatacactggagtcgcaacccccaggaactccagatgtgaccttctttggagacagggtccttacagaggtcactgggttaagataaggccattacagtgggccccaatccagtgtgcccgatgtccttatgaaaaggaacatttggacccacatagaaggagaacagtgtgtgaagatgaggacggccgctccaagcccaggagagaggccgggaacagatcttcctggacagcctcagaaggagccactcctgctgacaacacctcatcatcttttatttttttaagatacaagggcttgctatgttgcccaggctggtctcgaactcctggactccagagatcctcctcccaccacagcctcccaaagtgctgagatcacaggcatcagccagtgcccccggcccctgctgacaccttggtcttggacttccagcctccaggactgtgggaccgtgtctgccccttaagccagtagccggtggcactttgttacagcttccctggcaaacacgctgccccgacggctggtgctttgagctggcagcattctatctgccacgggcctccaggtgatgctctagctgcaccagcctctgcccacgtgcaggggaatcctgttggggcccagatccagccccaggacactggccctgcagaagcagcaaaccccccagtgcccccagtgacactgagtgggggcccggcccatagcatgggtgtgatgtggtggagcccatgtcgggaggggacttggtcacaggacagggaggggccctgcctcatccagtgggcaagagtcagggtgcttgggcccccaacggcctgtgtgggtggatcacgtgaggtcgggggttcaagaccagcctgaccaacatggtgaaaccccatctctactaaaaatatgaaattagccaggcgtggtggtgcgtgcctgtaatcccagctacttgggaggctgaggcaggagaatcgcttgaacctgggaggcggaggtttcagtgagccgagatcatgccattgcactccagcctgggcaactgagcaagactctatctcaaaaaaaaaaaaaaagctgtgcaaccaaagcaaccacaccaaaggctgcccctggctccagcttgcagtctccaacagtcactaagcttcccaacattcctctgaggtttgcgctattatttccattttgcaggtgaggcagctgaggctcagagaagctaagaaatgtctcaaagtaggcgagatgggcttccaacctgggccatgcccaccgcacagcctctgttctttgcacaagcccgtgccggctcccttgtaaactcaacaagggggagttggctgggggccgacataaagcctcacactggctgcagagcccaacagccccttgagagtgatgggatgtgtgcccctcatcccaggagggcaggccaggcccaggatggagatacctccccctcaggctcacacccacccagtggggcagctgagcctcccaggacacgggtaaggatgccgtggctctcaccggggttgacctcctggtagcggcccacgccgtaggcatccacgatgccctggaagctggccgtgaagcggttggtgcggatgagtgtggggggcatgtcccggcaggggatgcggtgagccacggcactcactccctcctccatctgggtgccagggcagagacagaccagaacggtggcgggggccttcagggaccctgggatctccagccaggcccagctggagatgtagagccctgtgggggctcactgggcagccccttcccctctctctgacgtgagatgatcagccctgctctgccctggtgggggcccaaagacaccacatggattggcaattgcttgggaaaggcaagcatgctgcctcctagggacggcccaggagaaggagcccagcctcacccgcaagcacctgctgtgcgcggcgggtgacccccggaggcaggggcatcacaccggttccacagaccatgagcaggcctaaggtcacaggggggcctggattggaatgaggcttctgactttaaaactatcctgtgcagcctccagggacttaggaaagtcagggtagggcttgctgggccagggccatcagggcagactccctggaagcggtgggccatggaggaggctgggaggagaaggagcccctaggcaaagcccaggtgcagggagccagaggctggaagtgaggcagaaacgccccggcctggtaggaggggcgggcggagagggggcgaggcctcaggctgctcaccgagctgtcccgcagggcctcctgcagggcgggcaggtctcgcacagagcaccaggcctcggcaatgaggcacttgtgcgtggtgctcacgctgcactggttcagggccaggtacacggccttcatcttgtggacctgcacctgccctggcggcagcagctgcagcacccggcctagcacctggctcaggaaccgctctgtctccccgaggacctgcgccagagtgggcagtcagcgggggctgggcaggcaggtggggtggctgggccgggggcacccacctcctgcacccacctcctggaggccaggccagggcacccacctcctgcacccacctcctggaggccaggccagggcacccacctcctgcacccacctccgggaggccgggggcacccacctcctacacccgcctccggaaggccgggggcacccacctcctgcagctcctggctctgctgttgcagctgctgcagggccccgaggcgggcctcctcctgctgcagaaacgggaagacgtggcagtggaagctggagggaggatgcgctgcgtgaggggccagaaggacacagctacgagactctgagtctgaagggagctcatggggaggagtcacgatagggcgggctgggaggtgacagcaggggcctggggagcagggcggtggggcgggtgttcccagtgactcaccagtccgtgatcttgcggatcttctgtccgatctgctcaccccagtaggagatgaggaaggtcatccacgtggctggctcgccctgcagagcaggctcagctgactctggggtcccgctctgcccaggaccccccagcccagcgccagctgctcaccgtcacggggtgctccagcggctgctccagctccctgaagctggcaatgaggaagccgcggcaggccctccagagcaggcgctctagggcaggggccttgtggggctccacggcacctgccacaaagctggcggccacggggctgggcagggctgctccaacctcctgccctgcctcccccaccaggccccccgggcaggaccctgcccagcacgggcaatcgggcaattgggcacactggccctgcccacaggggaaggcaggaggcctcccgggcaggaccagaagaggagaaccccctagggctagggcttgggactgtgggaagttccgggcctgaaggaggaggcggggccagcctggggagagcactggacaaggagtcggagctcagcctggcccagcccagcgactggccaggggttctgggctggccagaaagggcatgaggtcatccctcactcacttgaccctcaggtcctggtgcggccccccgggggcctggagcaggggcgtcctctctgaggccccatctgtgtgggcggctgccagctaggaacccagaagcaccatgagccctaggctggacagcccctccccagccccccagtctcctgcctgggtgggagctgacctgaggttcatggccctggcgtagcacggcggcgtggagctgcagctggtgcagctgggcccgcagggcc

SEQ ID NO: 1884581 - DNA, 4001 bp, Homo sapiens
gctcagttgctggtgaggaatgtgccaagcagggttcttagctttgttctctgtcatctccttcctcggagcacccacatatctgtgtcgcttcgggatagcaatggcgcttccgacctgtaactcacagctcccccagggccctccctcacgcagctggccgctgtgtgctcagagatccccacagaacaaagcctccctgaccagagtgtcctggggtctccacttctgcttcccaggactcaggggcagcgtggcataaggcctcagatgagtatatgtggcctcaacacccaaggaagacagacagggccttgaacggcctcaccatacatgggatccctggacctgtctcaggggccatggagcctgctaatttcaaaggagtggctttggttccctgccagccctcggaattcaaacaaaccaacgacacccacccgcaggggccaggcggcacccatcctctcatcaccacagagcccgcctcccacagcgggggccgtcccctctgttcctgagcacactcccacctggccctgcgtggcacggagccctcctcccgcactgtgggaacgcaggactcgtaagctgccctcaacctcatccgtccactactatgtgctgtgtgtcggggttcagctgtctccagacccgagggcgggaggtcccccctcaccaaccaggtaaatttgaggccatcagagcaggcgggacccctgggggcttctccacaggggccctcactaagcacccggcttacaggggagagccaggagcaggcgggacccccgggggcttctccacaggggccctcactaagcgcccggcttacaggggagagccaggagcaggcgggacccccgggggcttctccacaggggccctcactaagcacccggcttacaggggagagccaggagctcggtctctgcacagagaaccctcccccaggcatgtccaggcccgctcattaccacgtcatccagagaaaactgggatccttgagcaaagacgcttccgttcatggcaatcatggcacagccgtcgtagtacaggcggtccccgtcacaacccttctggttggccagcaagtaaatcccaccgttctgaaaaaggaggaccccatagcggagtggtcagctgtgtccaccaccctcacctgccacctgcccaagtacaggaacctccgccgagtcccgctaggtcatcctgagtggtcccaccaccgcagagataacgcatatgtgtggggaagcacagacctgtgaagctgcggcgagccccgccttgctaggtgccaggctctacacaaaacatttgtttttccttcacaacaaccctacaaggcagaccccatcacctccctcaggcatgatgaggttcagacaagccaaagaaagctctgcatgatgaagccaagactcaaacgcggctcagctagacccacatctgccccgtgaaggatgaaccagcactgcccctcgcacgtctcactgcccaacagcaggagcagcaaacgtacgggtgttccctacgcctcaccatgatgccaacgaacaaggagcacgttccggttcctggtcatggcagagagggtgacagggttgcttcatagggtggctgcgtgggtgagatgggctgtgccggcgaagccctggagggcagcagggcacacttgttgagtccaggccataattactagcctggaacatccattgtgtgtgggcccagccctgcgatgggcactgaggatgcaggagttcttgagatacagtgtctgccctgtggcgcacgctccctggcccagcccctaccttgctggtgaccatagtcacgagatccaccctggtgttggctttgcgcagcacttggtggctgcccgaggcgttggtgatgatctccacgccatccaggcccatgtcgatgtgcgggctgcaggcagaggcaggtgaagagaacaggccaccagactcctccaaaccagcctccctggcagccccttgcactctcccacggcagctcccagcccacggccacggccacggccacggccccaggacgtctgcagtcccaggtcctcccagctggcccatatgaggtgggcgatcagacagcacaggggcatggggctgacctgtggggtgtccagagctcctcacagatctcacttccaatgcaggtgtcccatgtcaccagcaccgcatctccgaagggtacggtttcctgcagtcggaagagaagagtgcatgagattcactagccatgccctgtctgggccacgcactacctagggccacggacatcctgcagccacaagagctggagttggctctgggctctcgcacattccgaagaggtgggtgccctgcggctgcgcatgggacaccgggtggtgccaggcagagacgcccttaggagcctatgtgtggaagaaggggacgcctgtactctgagcagccaaggggcagaatgtcacggacatcgatggggctgccaattggggccagcagcttctgaagcgaccctgtcctgtgatcacactgaagcagctgctgccctgtgctgatgaagctaggcccccactcccagccacaaggcagtggctgagaggggacaccagggtgccttcccttagaattcaaaattgagagtagggcattttgctgttggtctagataacacttaaatgtcagaacatagcccctggggatggagaaggctgtcttctgccacaaggaggaaatgaagaggaggaagccagtgtgagtgggggaagggaggaaaagcagccccaaggcaaggaggagccaccctggctgctgtctggccacgcagcccccctcactataggaacctgcctcctttgtctgtttcagacctgtgagcactgtggtgccttccattacctggatcccaaagcgttcccgccccacctggtccactgttggccgagaacagcgacaaccgactgaaaaacgggctccacacccagggactcacctgctttgtcaggtcctgtatcatccgaggcagaaagtactcctctgtgtgcctggagaggaaaacaccgaggagctgaggatgagcatctcaggacaaatgaggaatggcggctacatttaaacaaaactcaaactgaaccctccgaactgatgaactggcaaaggaactgccaagcgttccccccaatgcaataaacaatcgcattcaggtaaaaagaaaagagtatgaaggtggcttgaggagactatgtgacatggtggtgggctgggctctccgagcttcgggctgcctcagtttccccacacgctcatgttcatctttactgagagatgtgtcacaggggatttgctgagaactggccacgttgcctcatggagaaatccaggtggaattcctgatcgctgttactgaatcagaaaaatcgtgtggcattaacccgaaacacaatgacaaaccagtatcatccctggaataaaatgatgctctcaattcgagaaatcaggaggagggtttaataccaactttagtgcaaggtgtcccaagaagctccaccaagaggcggaatcttcaaaacagacagttcacgcatttgacttccaataggctgttacgagatgcaccactcagatctgcaaggaactccgtttcctttttgctttcttagaattcccaggagccttctgggcatggttttagtagttctctctacttaagaaatgttaaaggttgagaaactgagtcaatgatgtctttccccctcattcacgtagggaacggggacaggaagatatcctacagaactgcaggctgcctcgccatcccatattgagcactccattcaccctctgtagcctgttgacggcgatgctgctgcaccgaaatgcattttaaatgcaggaaccgtccaaacatctctcccttcatctgcacctttccctcgactcatgcaaagacaccctggacaccggaacaaagacccagcgggacaggcatgt

SEQ ID NO: 1884582 - DNA, 4001 bp, Homo sapiens
tctgcactaactttaacactcgatattctagcctggtcaacatgataaaaccccgcctctactaaaaatacaaaaattagctgggcatcgtggcacacacctgtaatccaagctacctgggagggtgaggcacgagaatcacttgagcctgggagacagaggttgcagtgagacgtctgagaccgcaccactgcactccagactgggcaacagagtgagactgtctccaaaaaaattaaaaaacaaacctcaagaatggagtagtgaataatacatttctacggaccaaaaggaaagatgatattctcacccagttaatcatgcaacaggaaggatttcattatgtggtattttgcaacaagaacctaggcaatctcattttgctaaaaggatatgacagtattccttgtcttttgtgatgctgtacgtaagaatttacttgctataaaggtttacttcttgaagttcctattaaaatttctaaaaaacaattgaagcgttcattggaccaagacagtaaaaggcagtaagttttcctgtttattcagacttaagcattatactattatcagagaagtaaactgtgcttcagagatagctcaaaaaggggcagtatcaaacactgtacaagatatcaaaactaaactttaaaaatatacatatttatagaaacaagttcatgaatctttttaaaaacctgacaaaattcagtcttttgtatttttctctggctcacctcatttcacctccaaccttagctttatgatcattcaggctttcttcactcctctgcttcaagttaacccctccacatgtgatcttggtcttcactctttagggaatttttgcccacaaataaatgcagtgtgccttatgttggagacaaaataaccaactattcccaaccttatgatctcaatctacttaatccctcttagccagtaacatccttctagaaaaggggcaacaactcactacatggacatacttgccatctctttcatgatccaacccactgcatttaaacttctatatcctctcctcctttgccctaatgatatctcctctaaggttaccaatggcctagttccaaatctaatggcagtaatattttttaaactataaagaaaggttacagttaaacattatcagaggttctaactctgtagaattttaaatattacttatgaaactattacataagaaatcattaaaaaatataaaaccataggaactataatctccaataattataaacacagaatacatttagggcttattatatgtcaaatactgttctaactgtctcacacataacgaatcatttgatcctcacaataaccccaaggcaagtattattatccctgttttatacacaaggaaccaagcattgagaagttgtttatccaaggtcacgtagtaggagagccaagatttgaattcactttagttctagagcctatacttaatctctgtattacaaaactttctctggttaagagaactacaaaaaacaaccattataaaaagataaggcataattttattacttttaactttttttcaccacaatgaaagtaactaaacacacagctttacaaaaataaatttttattaaaagcagtagagtctgagcaggaagacagtacaaagaatgtaaacaatgtaaacatcactacattcagctcagcctgattgaatgctgaaagacaactctaaatgctctacgtgcccttactagcaagatacattaattctattttacacagacaacaaacacactctaattttgattaggcaaaagtattttatcgaagtcgatcccagcgccaaatactggcatcatcacaaacagctataagaatgctgctatccctgctaaaactggtttgtcgaatagcagcaccacatttatgatgagtcagtgttgtacatctagggaaaaaacatgacaacaggttaaagaccacacataacgttgtcagtgtctaccctaaaacagcggattagaaaataagcagatgttccaagtcatacgaaaagcacttaaaaccagaatatacttcactaagagctcagtctcaaattttataaaatttagatatattttaagttcaacaagcactacataatttgtataaaaacaagaaatgacttgtcaccaaggtacttaggaaaaacaaaaattattggaataaaaaagaataactttaactctgaaaacagtaaatgttaaaaatgacttaaggatggcactgcaaatataaatgatcttctctacattggcatacaagtgtggagaaaaagcctgaaattttgaacagaaatttctaaatacttacttggctttatgaggatcttctacttctaaatcccaaacataaagtttgccaacttgattgcccaatgcaagcatctgtataaacatatttttaaaaacatcaaattaataaaattaccaggttctaaagcattggaggaatcctcagacagctttcttgtttcagaaaaagctcagttccagcctctgtgctcttggctatttctttgggtcttatactcctgattcgtaaatatgaataagagcaattaatacatcacaagtgtcttgagcaagtaagaaggcattgtgcaaatttatgaagggccttacaaatttacattgttagcatggtacttactttttcttctgccttcaagaaatacagcaaatgctgtggaaagccttccaaacttttcttacagaaataaatacccaagtaatttgttaccagaaaatcctaacaatagatttatttaaatttttaggtaactagtattttatctgtcttctatcctgatttttctctaggaaacagttacataggtagactgacaatctaattactaaaacattaagtcttagtaatgttatgataatgtttatgttatggaacataaacacctaatttccaccattgatacctaactgccaacttaatttaaagtaagcactgcagatcatatgcagagccacaaaagtagaatgaataacaccaaagtatttgatgaatgacatcaaagggcaaagtaatcaatacaaaacatcagggtagatttgtaaaggaaaaagaacatggacacaacagaaaaagctagaattacaatggtctttcataagtcagatcatttcaaaatgtaaaagtatgttgataccttttgccagaaatccatagaaaacctcatgtaccaaatgtcacactggctgtaatcaaatcgcccaagaatagtcacattagattcactgggtttaattttatctatatcatcttccatcttgccaggtttccagcacacaatggcattttcacaagactaaaacagagagagaaatgagaaaaagaaatgttaatgaggaactgaatcttacaaagtaaaaacaaggcttttctattgttttggaattcacagctcttagaacctggttaatccatctatcaagtacagtgatgtacattcatttatatttacagtcaatgaccatacttaaggacaagaaatctgattatcaacagaattcgataatacaaaagaatcacattgtctgaaatattcattttggaagtcaacatttctctttcaagttaaaccaagttcagctctagatactctgacacccagagactttaagtgttttatagcacaggtcaattacaaacacacagaattagaatacatggcttttcagaatccggcattaatctggctcttgcttacttcactagtttcatctttccccatgcagtctcccatttcgcttctaatcacaggtggtttcctttaccttattaactattattccttcatccagtatctgtgccacacagtaggtactcaacaggtatcttaggaaagttgatgaactcacataaatagccttagaattcagtttataaatagggcaatcgaaggcaagtaaagcagttgtttaacatcaagacactcatatggggataggattg

SEQ ID NO: 1884583 - DNA, 4001 bp, Homo sapiens
gacagggctctctggggagggacagggcagaaaggatgccctggcacagccctgttctcttgccaggcctggcttacctgtggaggtgctgttggctctggtatgaggactggcagtggaagtgctgaggccagtggttgtgttggagtctggtgtgagggtggttaaattgactaggaggcagagggaggggtgttaggagaagcgcaagttactgcccgtgcctgggcctgcccctgccatcccctgcagggatgcagccctcacccagctccaggaagaggatgctggtgtttttgcccaggtcgttggaggccgtgcattcaacacctgtctccaacagctccggggtcacgaggacattcagggtgctcaggactcgctgtggatcttggtcttgttcacttgcctgcgaggaaaggaaggaggcagctcaggggatggggaggatctctggtcctggccacaaagcgcaggcagggattaggagagtgtggcagatgagacacccgctcaccgtgccgttgacgttccaggagatggtgggccgggggtgccctgacgcttcacaagacagattcaacaccatattctctttcacccacaccttcctctccttgaatgccatccaaggggggccttggggaggtagggagaggtgaggtggcaagcccagctagcctgcctccccctccgcaccagagctccccagggcagcaggtggctttttgtcaaagagcttaaaaaccaccccacttggggtgacctggtctctacccagagggagggcctcaccaaaaatggccacgttgaccagctgtgtgcggttcaggccgggtatgctgggcacagacgccacgcagcgatagccgcctcctgcctcccgtttcaggtcatgcaactgaagcacaggccccctttccagcacctggcctgtctgggatgagagatgggtcagagggtctgggaaagagcacattcttgtcaccgccagccccacccaccccatcagccccttgccccagacccgcctgggtacctcttctctcagccactggaactcgaggtcctggctactctctgcctcacaggtcagggtgaggctgctgccttcctgtctctcaggggctgcgggactcactcggacgtcagacacatctgggggtacagcaatcatgtcacccagggcagggtggggccagttccctattgccccagcctggtccccctgtcctgggtccccagcccctcacagttcaccagtagttcctgtggttcactcagcagcgatatcatggtgtccaagtccaggccctgacattcatagcgcccactgtgttccttccgggcaggctccagcaccaggaccccgttgtcgttggttgtctcttcctctgcctccctggtgctggggttctagggaggattggggaggtgagcagagtgcacctcccgccactccacctgggtctctgcttgcatccccacctgcacccagcacaaagcccccacacctgcttgctgatgctgaagtgtggtggagggttgccatcagccaaacacctgatttccacgcggtccccttccttcagcattcccacgggctccacttccagccacactttttctgtcgggtctgcataggcaaagggggtagctcttggcccatgagtcaaccctgggctggataagggggagccagcaggagtttccagcagccccagccccagtaagcagagagtcaggttagtactcacagaaaacagggacggtgacttccctggactccttcatgtggttcccactgggcagccggtagttgagctcacagtaaaactgggcatctttgtcttctttaaccagctgtgccttcagaatactctgcaaggtgtacaaaccactcgactccacagtctgggacgactgaatgtggacccctgggcagggaggaaggggaggaagactcagcctcagccccacctccagccccaccctagggttgtccactggggttggcaggggaccatctaaatagccccctgtcccctgtagaaggccaggtacaaatgcaagctggaaacccttcaacccagcacttttactgctcagtgtcaaccctagaaaaacattttcatgtctgctcatatccaaggatgtgtgcaaagaatgctgcaatgataaaaacgagcagccgtctagatgtccactaaatggggaatggtgaactcgactacctgctatgcgtagtatggaaaacttggcagtaagcaaaacgatcagttgatctaaatagactgacccagaaacattgtataaaagaaattgtctaacaatgtataccatacaccaccacttagaccagggtttctcagcactactgataattttttttttttttttttcagacagagtttcactcttgttgcccaggctggagtgcagtggtacaatctcggctcaccgcaacctccacctccctcccggcttcaagtgattctcctgcctcagcctcctgagtagctgggattacagacatgcgccaccacgcccggctacttttgtattttcagtagagatggggtttctccgtgttggacaggctggtcttgaactcccgacctcaggtgatccgcccaccttggcctccaaaagtgctgggattacaggcgtgagcccagccagcactactgatgttttaggccacgttgattctttattgtgggggctgtcctgtgccctataggatgttagcaacatccttggtctctctacctactagatggcagtagcaccccctctatgtgtgacaaccaaaaatatctccagacattgccaagtatctcctaggaggagggggtacaaaatcacccctggttaagaatgactgatttagataataaaacacagaagcctatatcattctagaaatatttctatatatgagcaaatacatagaaataggcttgaaagaacacaccctgatagcagagattatttctgggagggggggtctcaggcaagaagaaacttctagattttttgtcagtttaaattctcatgaaaatattttcaagtaccatttgtataatttttttaagttaaaagcttaatgaaaatataaggcagttcctgtgtagtaccatagggacagctctttttaagagatggggtctcgctctgtcacccaggccggagtgtggtggtgcaatcctagctcactgcagccttcatttcctgggctcatatgatcctcctgcctcagcctcccaagtatctgggaccacaggcacacaccaccatgcctggctaatttttttattttctgtagagacagggtcaccctatgttgtccaaggtggtcctgaactcctcacctccagagatcctcctgccttggcctcccaaagcaccgagattacaggtgtgagctaccacacctggcccaagggtggcttttgggagaaagggctactcacggttcttctcctccttcagaggccggccattcttgtaccagatgacttgaggaatggggtacccgttcctccctacacaggtagcgacctaaagagcacagggtgtgagtctccctgcctccgagcccccttcaagccccatctcagcggctgcgcaccagctgcccagcccacctgccacacatctcacctcctcaggctccttactgttcacagggatgcccagggggttgacctggatgtttggctcctccggagcttctacaagaaaatagaaatgagggggacatctggccacgtcccaccaccctcactaccctgctggcagacacagggtcacgcactgtagacgcggagctggatgcggtactcctgggaccgagggcgcttgccctggcacaagaagatgcgctcgtcttggggggtgacttgagtcagggccagagtagcccctctgtcctggaggctgagccgctgctcgtactccccaggttcgctctggccctggccctggcgcacacggaa

SEQ ID NO: 1884584 - DNA, 4001 bp, Homo sapiens
tgaccttgggcagtgacttgggctcttgctacctcagcttctccatctgtgaaatggtgatgataatatttgttctggctgggcatggtggctcacatctgtaatcctagcactttgggaggccgaggcaggcagatcacctgaagctgggagttcgagaccagcctggccaacatggtgaaaccctgtctctaccaaaaatacaaaacttagccaggcatgatggtgcttgcctgtaatcccagctactcgggaggctgaggcaggagaatcacttgaacctgggaagtggaggttgcagtgaccaagatcactccactgcactccagcctgggtgacagagcaagactctgtctcaaaaaaaaaaaaaaaaaattgggggtgggcacagtggctcacacctgtaatcccagcactttggaaggccgaagtgggtggatcacctaaggttgggagtttaagaccagcctggccagcgtggtgaaaccccatctctactaaaaatacaaaaattagccaggtgtggtggcaggtgcctgtaatcccagctactcaggaagctgaggcagaagaatcatttgaacccaggaggcggaggttgcagtgagctgagttcacaccattgcactccagcttgggcaacagagtgagactctgtctcaaaaaaaaaaaaattggtttctatctcatagggctgtttcaggaacaaaaagagtgaactgtgtagaacggcacctgcgcacagtcagaacatgctagaggttgcgttgctattactaatatcaccacgttgcactcacaaccgaggacgggagagactgcttgagatgagagcgggagctgaaactcaaacccagcccgatctctctcctcctccacttcccccatggtcccaagaagtctcttgcttttagaggctgtggagaagtggcactatgacacccagggagaggcagaggacacatgggcagcctgctccacgagggtggcaggtgaaggctacgatacccaggatgggccagagatgctggggtgtgcccgggttaggaacactcagagtgaggcagattctgggcctttacatgctggcggggtccccgggttgggggagattaggcgggttctgtacagccctggggctatggaggcaggttttggctcaaggcacaaaggactttctcattgtcaggagtgccgaggagggctagagatagtgagggaaggtggtgcgagccccatcctccgaggcatgcaagcagggcccaagccctatcttcaagccccacccgtggtctgtgatgtccctgctgggagaggtctccctggagcatgtcaccttctgaagaccacgcgaacctggggagttcagcagaaccctgaaatggagcttgggagattcagagcaggaactctgggtgcctggctcaccccagctcctctccaaccctctgcagttccctccaccaggaatggtcctccctcagagctgggtatcccctcctgcaggaatcccccctcacctgaggacactcttagtggattagggactctcctgcctgtcccttgtgagcaccgagaaagccatgcctgtgtccccagcacccaccctagggctggccccagtggcactcaataactgctagaaagtgatggctggaggcaaaccactacccctgcaggggccctgagaagagaaggtggagagatgcggcagccccagagccctggggtgacctggccccttcccatcccccagcccccctcacctggagcacaatggctggcaccgagaagatcatggcttcgttgaacaccgggttggggtcatccctcttcacggctgtcttctttttgctcatcttcctcccatcctgcagcaggtacaccttgacgaaggggtctgtgggcaggcggacaggtgagggccagtgtcacactcactcaccacagccctgcccagtttggctccacccaccgactccaaactccccaatgcttaactgttgctgtgacctcctgcagccctgccattggtcctttattatttttcccatttcacagatgagaaaactgaggctcacacagcacgtcaggtgagggctgggctttgtgctcaggcagctgcctcacagcccacgcgctcccctcctaggatgctctggggaactcagcagccccaccgtgttccttctataaatggcccgagtgcagacgtcagccctgagtcaccgggcacccgcacagcagagcctgactcaaccgtgtgcggctctgaaataacaacttgccgtctgcccatcacctattgcccacggggtgtccttgccgcacctgcctggagctgccccccccacctacccccgccccaaggcttgcaactcccaatagatcaggctcccccagcccctggtcttcagttctctagaatacagctgcctccacggtcactgctttgagagggactggggactcctgcagacctaaggcatcgggtcctgcctggcacccaccccaaccccgtggccctggtccctttttggagtctgggatactgccctgtctctgggaatggagtctccaccatgaattccagttccagggaacagatgcccaccttggttccctgcccagtgcccccagccctgagtgcggcctcctgccctgagacccccgcatcactctgacccccttcactctgccctcacaggggcccctgccaccctccagggatctcatgtttccccggctggattaattgtccccatgccaccccctatccatctgcatgacttctgggctcagcaaagctgagggggaccttggcactgtgtcccacacctgccgatgcctccgggtgcccacagcacagcagctgggccacagcttccactgagctacgtggaggagccgggctgccggctgggccttacccgctgtggtcttgtcgttggtccagatgaggttcttggccttaaccacgaccacggtgaggcgctcggctgtggggaggtagctgagggagagcaggatctcccccacagcatcggcggcctgggggacagacaggtggctcagagggcttctccccacccgacttgaggggtccagggaaagccttggttgccagggaaaggctggggcttccttctccatagagaagtggctgcactgggggccccttaccacagggctccaggcaggcagggacagcctggagaaagggacagccacccaccccccgccactgcatggagcatgccccactcctcccttccaccgggagggtcctgcctggggcggagggtcagaggcggcctgtcaaatgtagctatcaaatgtagtttcgttccctcattgcaggccaaggaaaacactgcggtagtaatacacagcgatcagagtggaatggaattagattctttgattaaacaacaatgatgttctgtgagcattcctacaattataaaactaaagtgcagcttggtgtctgtctgaaatcatcccctctaaggctagaggaatgtttctctagcagaagctcagtaggggtagaacctctgaagctttggtggcaaagcagcagacgagctgtaaacagtggtcgggatgtttttgaaatttgcctgcagcaagcagtttcctcggatgtggctcaggtcttcttctctgctctcctaatgatgatggggctcaggctattgcagaggatgatgaggatgatggagtcccttcctggaagtgtatgtgtgtgcacgctcttccgaggtggacgagcaggcaagtcacttaccttgttctggtcctgtaaatagagccagccactgaagggctgcagcgggaggtcaagcacagaaagcttcagctccaccacccccgtgctgacgttgcgctcatcctcatcgatgccaaatacagaaaaccgcaggctcttctcctccagggctgtgggatccagggggatggagaacttctcatcaaagaagatggagtaggcatttctc

SEQ ID NO: 1884585 - DNA, 4001 bp, Homo sapiens
actcacctcgcggatggcgttagaggacagtgctccaggcaggtcctgcttattagcaaagatgaggagggttgctccggccaggcgctgggggagaaaagatagaggggtggggtggggactcagaggacagcctgacccctcctctaatggcccagagcatctggggtgaaggatcgacctggaagatcaaggtgaggccccgtggtggtgggagaggcccaggagtgagtttgtggacgtagccatcaaggctggcccacatgaatggagcagccctgggccagggttctggttccagccaaccaccacccaggggacaccgctgtccccatgctccagcttcctcttccatgaacagggaggggtgttgcataagatgatccctgagctctccgtggttctagactgctccaatctgatgaccagacatgcacagaggatgtgaactctccctcttctgggttcacacagccctttaaccgttccactcccgacaggcctcactgtccacctctgattctagttgtttccacatatgtgtctgtgattgggagagatgtgggtggacgggtctaacccttgggccttgacctgccttgaccagcatttgacggccctgatctcatctgacctgctccacccacataggagatgtgtgcggtgtgcccaggacagtccccactctgcctgcagaatcccccctttcactctcacaagtgtcctcattttcaactaaatgcaattttgtagcctgaatcaaacattggaacacaaaaagtatattagtggaaaaacgtgaaattcaaataaaatctgtaattaagataatagtaattcaccagtgttgatttattagtttggacaggccacggttaggtaagatggggaagcaaggtaaagggtatatgggggacctctgacctctgtactatctttgcaagtgtccttcttttttttttttgagacggagtctcactctgttgcccaggctggagtgcagtggcacaatctcggctcactgcaagctccgcctcccaggttcacgccattttcctgcctcagcctcctgagtagctgggactacaggcgcccgccaccatgcctggctaattttttgtatttttagtagacacggggtttcaccatgttagccaggacggtctcgatctcctgacctcgtgatccgcccgcttcagcctcccaaagtgctgggattacaggcgtgagccaccgcacctggccccttcctttttttttttttttgagacagggtcttgctctgtcgcccaggaggctggagtgcagtggcacgatcacagctcactgcagcctcaacctcctgggctcaactgatcctcctgtctgagcctccagagtagctaggactataggtgcgtgccaccacccccagctgaggtcacacagcaaagagtcagactcttgagccaggctccatggcctctcgaagcttcatactggccttgggttatcctccctaaagcccagtgatgtgggtgtcatcatcaccatttcaaggcatagaaactgatgctcagggtagtgacgtagtaacaccacagggacgttaactcaatctcagtccacagcatgtgtcctgcctctggcaccatgggcctcccatggtgggggcccagagaaggaagggatcctgcctctggtttccctctggggccacgggcccctctgggcatctgctgagaaggcagccacacgtccatacatgtacacaaagggtaggagctgcccacctcctccaccagcaggctctggagctcccgctggcagtcctgcatgcgctggcggtctgcgctgtccactacccagatgaggccatcggtgctctcaaagtagttccgccagtaggaccgcagggacttctggccacccacatcccagatgttcagcttgaatctgggcaaggagcgggtgacaggagggtcagctgggcccctctcccaccttccctgccctgctctgggctggccctcccatggggcccctgctcaccctcggtgctccagggtcttgatgttgaagcccagcgttggggagatggtgtcgatgtcctccccattgaacttcttcaggatggttgtctttccagcattgtccaggccactggggcgcagcaggttaaggagaagtccctgttctctgccaggtggtgacattgttgcagagccccttaggggactcattatttcccaccatgtatcaaactgagttgagcacatgcctgaccataatcggcccacaataaatatgaaagtatcaaattataaatatcatctctactgaccaaaggctccttaatttgttgaacacctactatgtgccagaccctcttctgggtgctagaggacaaagccctgcccttaggaagcttacactctagcgggaagacagtcaataaagtacaaacaaatgagaaaagaaggccctgccagatcccggctagcgccatcaacacaacagagaggctttccaagagggccatcggaggaggctctttcagctcaggtgccggggaaggcctctctgaggtgtctggagctgagacccaaaatacaaggagcaagctttttgaagaactaaggtaagaacaaatatctggaggcagccaccctcatttgtttctggaatattccagacctgctactgcacagtgcaaattaatgggtgtgcttacctgtggaaggaaccaccctcctctatcttcccaacactgcagctcagttgggcatggtggggtgggcgggtcctggactcgaccacctttccctgctcatcggagctggggcaaatgacctaggcccaggagaggggtgaggagggcatttcccctgaggcccagccttagcccctggaacctagccgctgatgaccccctgcccccaagccatcatccatgtttccttcccctcttgatcattcccactggctgatgagcttgccgttctttctcccaccttaaaaagagcaaataggccgggcgcggtggctcacacctgtaatcccagcactttgggaggccaaggtgggtggatcatctgaggtcaggagttcgaaaccagcctgaccaacaaggtgaaaccccatctctactaaaactacaaaaatcagccaggcgtggtggcgggcccctatagtcccagctactcgggaggctgagacaggagaattgcttgaacccggcaggcagaggttgcaatgagccgagatcacaccactgtactccagcctgggcgactcagcgagaccccgtctgattaaaaaaaaaaaaagagcaaacaaagcccttgatctctctgccccatctagttattcatttatatctttccttttacaggaaatctcaaaatagttgtttgtgctcacccccatttctgccttcttgctctttcaagaacacactcccatcaggcttttgctgctgctgtggccaaaactgtccttaccaaggtcagtccccaaagacctccctgtggccctctagtgctgggacagcgctcagtcatcttctgttccccactcagcacctgatggagtggctcaccctcctccccagcacatgcgctgcccttggcactgggacacaccctcacctggttctgctcctcacctgacttcatcctggtacaaccgggttctcttctctggccacgctcatccctgggtgacctcatccaggatcacagcttcaaataccatctctatcctgataacacccaaatgtgcacctcccacacactggacctcagtgcctacatccagctgcctgcctgacacttctgggctgtctcggaggcatctcacatggcacacacaggcacacacagggttctcatctccaccctgaacctgctcctcccccagtcctctccatctcagcaaatggttcctcacccttctaattgctcaggccagaaacttccatgacctcactacttccatcctggtccaagccaccatcctat

SEQ ID NO: 1884586 - DNA, 4001 bp, Homo sapiens
cacacacacacacacacacacacacacacacacacaccctccaggattatttctccaagtcttgtgtgagggagatgctttatcaacaagaccatatccccatatccatcctgttgggtgatattcaatggttaaatttgcagcctggagccagaatccagtcactgcaactttctgctccatggtccgcttccttaaccattttttttttttttaaccacacagactcctttgaagaccttcccagacaatgcacatacctggaacaaattgcctacaacttcaggagtgtcacagactttgtgaagggctttgtgccttcggggctaaactcctctatgctggcacatccccaaacaaggctctgaaattgcaaacactgctcctttctcctgacaggcatctctcttgccctctcctccctgtgctcttcctggaacttcagaagagggatgcagtgctggacttaagctctgcaatcagtgcaaattccagtttccccatctaatgcatctttaagcctcagtttccttgcttacaaaatggcaattgtaatagtgcctgtgtcacagagctgctgtgagggctgaggggacagtgcgtgttgatgcatagcacagtgcctgcacagaggaaacacacaattgaagtttgcaattgtcacttctattcttatgttatctgttcccttgctctcctcctcccacagacattgcagtttgccatcgttccactttaaaagaagctccagaaggtacactcagctccagagaactggagatagccctgcatgccatgacctaggtgtcaggcagggggcactctgcccaagtcagacttgggacagcaggtggcatatgccagacttggccctgagaagctctgattgggatttataaggcctatgattactaaaaaacagaaaaattcaaactaccgagtgaaaaatcagtggtacagtagattcaaaagcttaataaacaaaggatcttggggacaggaaataatacaagggatccatggaggtataacatttgagaattctggtgtccttcacctttttgttttcctgcctccttccctccctctcttcctttaaagaacaagcatgtattgagcagttatgtatgcaagccttgtgctaggcactggaaatgagagatgaataaccatgattcctgccctctcggagctcacagactaatggaagagccgatttacagaaagaacacagtgcaacaagttccccaacagggtaagcacacgtgctgaggctgtctaaccccggagcctcagactctttgagatgcaaaggaataaacaataattcccagaaaaggtgacactcaaatggagacctgtcaatcatttttattaggcatttttgctggttacaaaagtaataaatactttttgcaggagatttggaaagcacaagggtgtcagaaaaagaaaacgtcaatcattattttaccattagaggcaaccactaatacattctgaagcatttctctttccatctatgtacttaacatcaatgagttcatcatgtctatacatttgataggctccccagtttacttaacattgaaacataagcacttttccatcaagctcagtccaaatgagtgacccctggatctttgatctgggggaccaagtccaggagcctggaagccagggctggcccagaggagatatgacaagctgggttttggtgagcaggttgagttggcagtgctgtggagcattccacccggggaggaacactgaagatgctggagagctgggtgtggcactcaggagacaattcaggcctagagggtcctcaggtggtggttgacgccatggggatggatgagatccctcagggagggtgtgcagggtgagaagagagatgactagggtaaggtccctgccctctagaagctcacagtctagttgtgttcatgtgcaagtcatttacccccagctagattgtaagctccttgagggcagttaccatttcacacacagcagtccctcgccaaccatgggggttaggtttctgaaaacccctggggcaggagaagtcaggcttcaggaatttaggaccttattggggaaaaaatagggttaggggaatgaagtcaccagtgaacttgtaaaattattatatttttacataatgagaaatgacaatgacaacatattcaaaacactgaatatcagtgacacaaattatcaacatattcttcaattaacaacattttacaacttattttcatgtaccatctatccctttagtagagcttgccccttcacagctacaacaatatgcttgtaaattcacttttgcattgctggaaaaaatacacttgctaagagtccttttcttatgtgtggtttcccatccaattattcaatgcattttggtttttataactccaggctactgacacctgtctcttggtcccacccacaagtgcaagcacacacctacatcctaacaggtaggagtgtgtttctgaggtctgatccaccccctcccactctcctctcttccccaattttactacaaacacctctcctctgcagccatttcacctacttccctcttccccaacctctgggcagatttcatcagttcccccataggaatgagcaaagactcctgaccttgggattctccaaggcttctgacaaagtatgcaaacatgaagttgtcaatattagaatttggtgtctttctttggtagacactagcatatcattcactcactagctcatagtaggtactcaataaattcttgttgaactgagcaatttccaaagtaaaggatgtggacttttttttctctttccccattcactgctccaaatgaatattaaaccttcacacaacataaatattgaaatatttgtaggcacattttattttcccttctggcaggtcatgatgacaagaggcagctaatagatgcaatctatctgcattcacgaaggcagttttgagttccacatgacatgctgtcaatagagtcaaaagatatggccctttagtgaaggaattctccatattttccagctcagaccacttggataaaggaaaacacctactaaccaacgattctcccatgcacatttatgacaaaaaggttgtcgccatgactaaatgggaggactagcactgtttttcatgagatatcaacaaaaccatgtcttttaaatgaaacaataatcagttacatttatacagcactttacattttacaaatgctttcaggtacatttttatctcactttttcttcacagcaactctgcgaggtagtcagagaaggcactgatagttccattttgcagatgaagaaactgaggcttactctaaggaagggaccaaaaggggcaactcactagtcaaatttgataccctttccatctcccatcactgttctgttgccagttgggttacaatgaaaaacacaaaactaaattgcaatgctgttccactgtcatgtaattgccagtgcccaagaggtagcccacccctcgacactcacattctcccattcctcccacccccagttgtcttccctcaaccactatccactccacaagtcagtacccagactggcacatgaagaatctgagtcagtaccagaaatggcattcagcacttcatgcatagaagcaaagctatgaggccaaaaaatccggggggttgaggggggtggtgggggtggttcaccagtcttatctcatttaatcctctgcaaaatactcacaatgatcaccctttcaaagatgcagaaactgaggctcatcatgtgtattagcttggccatggtcacatgcccagagaatgacagtcagcatttgaacccagcttcagttcctggacagcagggcagtcccaagaaagcacttcactggctcagagccacatgtgttccatttcagcctcccagctcagaaggaccttgaccctccgctgaagctgctgccctcatggcaaagcttc

SEQ ID NO: 1884587 - DNA, 4001 bp, Homo sapiens
attcctgaccttgtgatccgcccaccttggcctcccaaagtgctgggattacaggcgtgagccaccgcaaccggccctaattttttttttttttttcaattttggctcactgcaacccccacctcccggttcaagtgattatcgtgcctcagcctagcaagtagctgagattacagggacctgccaacgtgcccggctaagttttgttatttttagtagagacggggtttcactatgttggccaggctggtctcgaactcttgacctcaagtgatccgcccacctcggcttctcaaagtgctggaattacaggcatgagccactgtgcccggtctaaatctaacttttaaatgcactggaaaaccaaaacagctgtgtgactcagtttaccccgatggtctggagccgaacctgcaacatcgccaagaatgcctacactgttgggtgcaatcctgtgccttaaatctacttctctccatttgatggatgagaaaaacaaggttccgagaggttgaggggctccccaaagctacacagcaagtgggggcacagcccaaactcaagggcacgtcctaactctcagttcctgggtagcccgctgggggaggggctggctgggaaaaccttcaaatgtgcttggcaaggactctcatatgcccccatcccagaaatgtagtgtccacaactcacagtgggacctgtggctggcaggctcatcctttagtgcttataaagatggagacaataacctcgacctcctcgaggggttgtggagattacaggagaggctgtgagtcacacacatggcacagcaccgggtctgtctgtggacagcactcactgtctggaagccaaggttgtgaccatcgtgactgctgtttggggacactcctatgcactctcagtccgtggctggagtagagacatcagggccgcagctcatggcctggaggacctgggagtgctccagaggacaaactaggatctggacaggagccacccgagtcacagaacactgggaggggttgctgtgcacacagaaagtagcggcggcggctgccggggctcctgccaggcacacacaggggtctgaccagagctctgaccgagtcatattgttcccgtgctggcaggcctggcccccacgggtaagcacgagacccactaagagaacggaaagccgggcctcaggggagcagccactggggaagggaagctgcaacaggcacacaagcaggactccggaaacggtggctacatccagggaggcgtggatggcctcaggtgtcaccccatggctcagaggcccaggggtcacacccttggccagaccccaagggggaacctctgtgtgtcaggcgcctgcccagggctggaagcttcactctgccaactcactgactctgtgctctggtaacaagccctcatcattcccattcacgagggaagtggctcagagggggaaagggacttcctggggacgcacatcaagcaggggctagggtttgggcctagggctgcctggcctccctctcccagtggcaggggctggcgtggtggccggttggggcaggggctcacctgggcggggcagatggcctcgcagagcttgcaggcaatgcaacgctcctccccggatgggtaccggcgcagcgcatgctccccacggaagcgagggctcagcgggcccttctcgaacgggtagttgatggtggccggttcccggaacaggtagctcagggtcatgcccaggcctgtgggcagcacgggtgtggtgggcaggggcaccctcctcccccatgcatccgtgcccacccggcaccttccctgtcccctcatgcccaggacgcacctcggaagagctcagtccacagcagggtgcgggctgcccggtcagtcactgacttcatgtccatctcgggatcctgcatgttcacatactctgcagagaggcgggcagggaggccatggcaagaggcctcacacactgtctccctggagcctcagggagagcagcctggccctcacttccaggtgcaactgctgggctacaaaggggctgtacactcaccacacctctccccagcctcagcaaggaccctggaggccgcctctggcctgagcccgtccgtgcctacctctccctgtgcttgggtggccattggagcccagacgcacttccctgcccaacagggcttgaaagaggaatcaaggggggtaggtggggggcttgagcctttgccttcaccagggactggcaataggcacaggtacccatggctcacacctggcaaccccctccccatcacacccagggagctctgagatcacacatgctaacctcggcaatgatggaccctgcccctgtgaatcagagtcagtctccatcaccataatcattttaaaagtggaaacaggctcagagaagaacgcccctgacaaagccaggactggaactcaggtctcttcccctactccagcaggaccagtcaggaacacctgaggctagaggccacccaggtactcactgtaggtggctgccactgcactgctgtggaggctccggccaccaggaggtcctgcaaaaagaagggcgtgacgtcataccaggagactggactcccctacccccagcaaaggcttctttggtcctacctgcacgtgcagcctgggccagggcccgcagcagcataggcgtggtcaggcagcgcatctggtggcataaaaagggatggagggtggggtgtgcccaagaaccatcctcttctgagactggcaccgcaaggatcccaagtctccactgacatgtgtcactttgccctctactcgcaccccattgctgtcagaggcacagatggctttcctgttcccagcgcctcccagctttccatctgattcagcttggctgagctacaattcagtttctgtggaccccaagttctgcctcacctaagaaaccttttaaatccatccttcctttctccctcccagagatcctgtttcccacctttctgctcctcccttcatcctccccaaatctaaccaaaaacaacattaccagcccccgccagcatgcactgagagcgaactttgttagctctcctcccccaggaaccgtgcccaggggtggaaagcgctgccatcctatccttacaaggactccacgagggaggcacaaataaggcgctgggactcagtttgttgagtgactcgctagggctgggtgtggtggctcacgcctgtaatcccagcactttgggaggctgaggcaggtggatcacctgaggtcaggagtttgagaccagcctggctaacatggtggaaccccgtccctaccaaaaaatacagaaattagccaggtgtggtggtgggcacttataatcccagctactcgggaggttgaggtaggagaatcgcttgaacccaggaggcagaagttgcagtgagcccagactgcaccactgccctccaacctgggcgacagagtgagaccttgtctcaaaaaaaagataaaaaagtgacttgtcggaagtcacacgataaggaggtgggccgaggatcggaacccagccctgccctgctggaaactcttcaaggcctgaacagtcctcggtaccacattcctttccccagcttcaaggccctcctggaactgtcccccagcctgccgcgtgaccttgggcagatgatgtgacctgacctccgtcttctcacctatgaagtgggttgggggcggttggtcttgggaattaggggagcccgtacatgccaagggcaccccagagcccggcacttagccggcgctcataagagctcatcccacgacctgtgaaccccctaacaggcccactcctttggatcactgactgcagttccagggacccaacccagcaccttccccaccttcccagtgatctccgaccctaactaggccggtggcgcagagcgggcggcgcatgcgccctgagagccggctccccgctgcacctgaaggacacgga

SEQ ID NO: 1884588 - DNA, 4001 bp, Homo sapiens
cttttcctttcctataacatgcattatggatacataattacagtagtcaagaaactaaaccattgggtgggccagcgcccttctccagggattctaagagttatgtttgcacatgccttataccttgtgagttatttggaatcctcactataaaaagtaaaatagaggtttctcttcaaagactttcctcctcatctaattaggaataaatagtaacttcttttagaaacaaaatttattcaaagacctggctaatgttcttaaatatctgctagccataataaaaaaatcaatataatttatgttcttagctcccacagtttagcctaaatatttgccctgacatacttatactagtccaaacaaatattagatcatagcctgtttctcttccttatttaaagatgtttttacccttctggacattctacaagttacttcctccttcttttgttctcctctgtctttgcctcttttaaaaagttctaagttactaaccaatcaaaacaaatataaaatataaagtcctgttccagccaataaaaaccagacacagcagtaaggtggacacgtcaggttataaatgaccctgtctcctttgttcagtatactctcatgacaaaactactgacaaatataccatttctacaaaaaataaaaatgtccttactaaaaaattaaatgtattttcaagtactatttctttataacaccgaaaaacaagtatttctaacatcacaaaccacacactagcctggatttgtttttgcatcccaagcactatttcaggtaccttcaattgccattggtcacctagctttcagaatttattttccaaagctaagtctgccatgacaggtgctaaggtatccctttgaaattcttggcttttctagcttggggtagttagacagccatcatgtttcaattcctagattgcttttcaggaagtttctaacagatctcagtttgcatttctaggtggtcattttacaagttcaaactcatatttttcattgctattccttatacagagctaaagtgctatgggggctttctagaaaagtgaccttttaaaatggagtctggatctcattcttagcagaagcatcaagggaacaccttcatagcattgcaaggtcagtgacttaggtcagcatcaaactccccacttcccatgcccaggcctaacttggactcactcccacctatgggacccttgctctttttcaggaactggaaaggaggtacccctcagatacagggccacaggcagatagatttaacctctagattcatcctatgcctcatgaggctgaggcaggtccctccactgggcctcagttttccctaaatgtgtaacagagtggggtttgggccacatgatctctaggtcctcttctggctctgtgcttctatgacttggattaagagaggcagatgaacacctcaatagaggaagacagcccaatttttaaaaatcagattgacttttgccattcaggtccattaccccctccctttcctatagctgccagctgttcaaaccctctaaaccctaacctctttaggcaaaccaaatcttgcctagatggctgcagggtcctctgagacacctaaaccctgcgaaccttgaccaaccctaccccaccctgccacctaattgaaagagcctcaggagctccactgccttcagaacctaatttctcaggacaaagacgtgcccttgaggatgtggcctctcctcaccttgttgggtgcacagataccagcctccaaatattcgcaattctctttttgatccctctctctctctctctctctctctctctctctctctattgtcctaacccatgttccaggtaagaaaaaattcttctctatcctaatgagggtgttgcagacactccacctgtgacccagccccatcccacaacttgtcctcctatctcctcagcttgcttccctaccaaggctccaagctagacccagttcatgaaggcagagagggtaggtatcaggccgaagttggtgggttcttgctcaaggttggtatttcagaactaaaatctgcaagtacatttttccttttctttttcttcttcagacccctgatcaggaggtgagattccttacacttggccatacaacaggatgaaatcctgccatttatggtaacatagatgatcctggaggtcattatgctaagtgatataagcaaggcacagaaagacaaataccacatgatctcattcctatgtggaatctaaaaaacttgacttcatagaaatggggagtagaatgatggttaccagagtaacccttaggggaagtgggagagaggtatacgaagagagattgatcaacaaagtataaagttacagttaggaaaaataagttctggtgttctattacacagtatggtgactatagctaacaataatgcattgtatatttcacgataactagaagagaggattttgaatattctcatcacaaataaattataaatatttacagtgatggatatgctaattacccaatttgatcattatactatgtatacatgcattgaaacatcacactgtaccctataagtatgtacaattattatatgtcaatcataaataaaactttttaaaaagaagaagttaagattcctagaggaaacttcacctcaccctttctacccctacccaagccagtagccagagcacctcacaaccaagttcccaaaacccatctccagaatgacacgtggggccttatcctcttcaggaagaacaaaatgagcccaggcttcccccttaggaccgctataatgtgttcaaatgttttccgtcgaagaaactaagctgcacagaggtcgagacttgccaaggttatactgccagttagcagccaagaccagacttcaaacccaaatcatctgactgtgagggttctttcttggcatccaacccagattagaggaagagcttatttctctggttgctgtgggggtgtaccccacactcaggctcccgccgggattgccacaactgtccctgccgagtctggctgcctccagggatctaaaaccagggactttgttaccttttgtcccttgctgtcctcataaggtactgattgactgatggaggcatgactggaagactggcagaagcagaaagcaaaactatgtcgccccctgccatgcgcctgtacctctgtctagacttcacagaggaaggaggaagtcatcaacccaggctactcaccactgcctctcacccttcctccctcacgtatattccattcaaagactgtggatttcccctaggtcgacttgagaattttctagagttcccagtaagctgctgaggatgaattgggggttggtggaaaggtcagagacagacctgaacagctctcttcctaagaggcacaggcaatcactgggcctcgcccgccccaggttgcctgttctcttcaccaccaataaactagagggaccacgatctcacagagtctgtgaataaagtcattcggcaaaggtctggtgggcagtcatcctataccaagtaccaagaagatgcagagaagtctaatgcctcctgaacccgcccatctcctgttttggctattgtctgttcaccccagtgcatgggtattgacaatcatttcttaaaggagtcttccttcatccagtactgtccatgctttacaatataaaacccaaatcacccctcacacctgatccatcttcacacaagtccaaggtccccaggcacttgagatcacgccacacgcctggagtgacttctcttgagcaggtttggagtatgctcttactgctaactagctttgtgatttggggcaagtctttgacctcatgggcccaaggtttgcttatctgaggctcctagaaaagaaagtccaaactcctcagcatggctggccaggccttccccaagccagcaccaccatccgctccagcctgttctctactcaaaggccac

SEQ ID NO: 1884589 - DNA, 4001 bp, Homo sapiens
aaggcccagagcccttttgaggccctcgaaggtcccaggctggggtcatcctctccagtttcagtttgagaaaacaaggcccagagaggtgaagggctgttcggtcattgcccatggagccaggggagctgtgggccttccgccgccaacctctgggctagccctgcagagatgctaggaggatgcagggaggtgaggtgggggctgaggtaggactcagactgcccaggcccgcctgcacccggaaggaggaagctgcacagggtgtctgtggctggccccgggatcccccactcggggacttcctcttcctctcagggcaggtgcagctgccacagtgagacgggcaccccgacccgggcatggaggggggcaaggggcccaggctcagagacttcctgagtgggagtctggctacctgggtgagggggcaggtggcagcgggttggggaggggaagtgagccccagccaggggctggtgttggcgctggccgggggagggtgaggcagaaccaggccggaggggagggctgggttcaaatgtgggggatggagatatggtgtggggggctgtggtgagggaagaggggacagaggcactcagaggacgggtgagaaggggtgcttgggctcactggggcaggtcggaggggctcagggttcactctgctggtcggctgacccctctgggctcctcacaggcgctgggactggccgggctggtcggggaggcggaggactcggagggggaagaagaggaagaggaggaagagccgcccctttggttggagaagagattcctgcgcctcagcgatggggccctgctcctccgggtgctgggcatcatgtaaggggcatcgggccggggcggtggcggggaaggatctgagaggaggggaagcgggtgggcggagcctgatgctcagtgggcggggcctgagggacggtgggcgaggcctgttgacgggaggcgggtcctcgagcccacctccggctcatagtgcccccagctcccgagggggacctcggatgctcagaggccttgacggacctgctgcctggcgagtgtggaacctgaaccacctgtggggccgactgagggacttctaccaggtaaggggtctcgagggaaaggcggagacaggaggggaagaggagccccttcgggaaggcgcctcatatagtctgcctctctgcctccaggaggagctgcagctgctgatcctgtcgccacccccagacctccagacattgggatttgaccctctctcaggtgctctccccacccacaccctcctgcctctgcccccgcactactctaccttccccgccccagttaaccccttgtggcatgtgccttgcagaagaagcggtggagcagctggaaggcgttcttcggctactgttgggagcgtcagtacaggtgagccggcggtgggaaggaaaggttagggtcgagctttggcggtagaggagggagatcctgcaccagctccccttcctgtctcccctcagtgtgagcaccgggaactcttcatccgccacatccagggcctcagtctcgaggtccagagcgagctggccgctgccatccaggaggtactgagacggttcggcagcccagactggtatggcacctgggacgcccttgccacaccgcggcttccactgaactgctcttcctgcgccccaggtgacccagccgggggccggcgtggtgctggcactgtctgggccagatcctggggagctggcacctgccgagctggagatgctgtcccggagcctgatggggacactgtcgaagctggcacgggagcgtgacctgggggcccaggtaggggcagcaggggcatcgtggactcaggttggggaactggaggaccatcagggagccggttgtgcaagggagatggaagtttggggcccaggcatggggttgtggtctgaggtcttgggccatcagtgatgtcacaaccagatggcccaagaccccagaccacaaccccatgtctggtgttgtggttgggggtcgatgtgcagaggcattggataagttagtcctgacccttgacccctgacctacagcggctggctgaactgctgctggagcgagaacccctctgcttgaggcctgaggctccctctagggctcccgccgagggcccctcgcaccatctggccctgcagctggccaacgccaaggctcagctgcggcgtctgcggcaggagctgtgagtgtgcgcagcctgggaaggggactgagtggagaggggcagattaagcctggatgggaccctagccctggtggctacgggaggggtcaggcctgggaagggctgggggttgtgggcccccagaccctccctagactccccttccctccagggaggagaaggccgagctgctgctagactcccaggccgaggtgcagggtttggaggccgaaataagaaggctccgccaggaggtgcgctcacatgctccccgccaccgcggcattccctaacctccccgcacccggtcccattgcctccctcccaacccggctccttcccgtccctaatccctctggcccgcggctggctgttcccagctccacaccgtctggcccaggcccaggcgctgtcgggacaggccaagcgggccgagctgtaccgcgaggaggcagaggcgctgcgggagcgggccggccgcctgccccgcctgcaggaggagctgaggcgctgccgcgagcggctgcaggcggctgaggcctacaagagtcagctggaggtgaggcggagacggagccgcggggcggggcgtgcgcgagggggcgggccaggaggaggggcgagattgggtcccgagggcagagaggcaggttctctggaggggacagtcacaggtggagaaatgggtgaggacaaattcagggaggtggcgtctgggaaagggcctccagaggatggggcaggtgtaggggagtgggggggctgtgtaagtgatgcagccttggaaggagggctgttcccgggggggaggggcggggcatggacagaagggcggggcctgcacaaagggcggggccaggggcgagggagaaagtacctgaagagatcttggtgggaagaagatggaagggagtggcggggcctagagactgatggggtgcagggtgggggagggaggcagggtctgtgacaggctgaggggaaggagtttgggaccctcaggcgctggagtgcatgggggctgcgtggctaccggttctccctgctctcccaccaggaggagcgggtgctctcgggggtgctggaggcgtccaaggcgctgctggaagagcagctggaggctgcccgagagcgctgcgcccggctgcacgagacccagcgcgagaacctgctgctgcgaacccggctgggcgaggcccatgcggtaaggtagccagagtgatcccacttgggttgccccgtcaccccatgaccccattgattccctagtggtccctagtgattcttgcaacctctgctcttggtgacctctagtgaccctccgacctacacactcggcctggccatggtgtggagggcttgtctgacccttccctcacccccaggagctggactctctgcggcatcaggtggaccagctggctgaggagaatgtggagctggagctggagcttcagcggagcttggagccacctccaggatcccctggggagggtgagggaccccactggaagggctggggtgggggcttcctatgctttccagcagtgtactggggagagcctctgactccctcccttctcccaagcctctggggtgtgtatgtgaggagccaggcagtaaaggaggggtcctgacctcatctctcatcctcagcacccctagcaggagcggccccctcgctgcaagatgaggtgagggaggcagaggctgggcggcttcggacccttgagagggagaaccgggagcttcgggggctgcttcaggtgcttcaggggcagcca

SEQ ID NO: 1884590 - DNA, 4001 bp, Homo sapiens
ccagtgtccttccagcgccctctattggtgaagccggacaatgaagggtgactatggagctgagaggcctgggctgttactgatgcactaagcaactgaaattccgaatgtacttatgtacttgcttgagattaaagactgagttagtgacagagcagggacaaaaactgctcccagtccgaaaaccctttgcattatatcattgtggttagataatcctggagttgattttgaagaagagaggggctgggaaacattccaggaagagtgcctcatatgttccaagctcttacaatctcaatatagccttcataataggtcttattcttttttaactctttgttgttgtatagacaatgcaattgaaactcagagaagtgaagtcacttgatggtcatataggaaatatgtgacagtcaggatttgctctctggtctgacctcaaagttcataatcttttgattatactgcattacagaaaaaagtgcactagactgtgatgggaaaaaacattgaatttatgtttttagttgtgacagattacttttgcactttagtcatccagttcaaatgagttaattagtttttcaggtctctgaatgagagaaaacaacatcgcagtccacaaaggcatggcaaagcagtgttaaaaatgtggaagcacatcaaatacaaaatccatagaattatatgaagaaataggtttttcagcaagtgaagtatcttagtttatcatgaaccaaattgtctaatttgcatctgtgacttttttaaaacattatagctcgcagtgaataattaattgattttaagtcagtttggttcagttggaggctactctaacttagcatgaatataaaaatatacacattttaaataatacatttgcaagaaataactggttccaaaaacctctacctagtattgaataattctggcaagatactttgatattgttttttattgagacagaaattatttccaacataggtaaaagaaagtttatgtgttattggtcaaaagctgccattgaacttattgctctaagtattttttcataatttaaaattgataatgtaggcattggttatttcagtaaaatgggttatcaaaggcttagtttgactagaaggttaaaaggagctaaaatctagaacttgctgttagtcgtataccaaatgctaagcactcctttgcaaatgcagggaccaggtagtaaccatagtttccattgtaaagcctggacatagactgacagcatcaaaacttatcatttgtatcatctgtgaagacagcaccatcacaaaactaaaccacatgggtttcaaattacttcagcaaggcacatggtagtagtggattgtgtatcttaaactatctctgagatttactttacacatacatgtaaaggaccttggcctattaaataagactatttcttaaaatagagtgacagtcccaattctcttcaaatttctgagtactcaaatacaagaagacaaaaatacactcatgctttaaggtactgaagatgcctagaatcccatcaagctctcagtgaggaccagctctcattgatttctctctctttctctgaattctcaaactaaaattacagtacttaaattatgcaattttatattgcttgctacaatttattttgtctcacccatgcattcaaaatcagaacataaaagataaaatactttttagtctgtatatccctacaactgtcttgaacccagagaaggctctcaataaatatcagtaatgtgtcgtttgcctcttttaggggatgagagtatatgtgtactcacagactacaattataagtcactatatgtgttcattcatttattttataactcatattaatttatggcacctgccctaatggagctgtatgctgacagattatggtaagtgtgatgaaaaagtcgaagtttcccatccaagtactaaccaggcccaaccctgcttagcttccgagatcaaacgagatcgggtgcaagcccgcatcgccaagtcaatcctaagccaaaagaacaaagctggaggcatcacactacctgacttcaaactatactacaaggctacagtaaccaaaacagcatggtactggtaccaaaacagagatatagatcaatggaacagaacagagccctcagaaataacgccgcatatctacaactatctgatctttgacaaacctgagaaaaacaagcaatgcggaaaggattccctatttaataaatggtgctgggaaaactggctagccatatgtagaaagctgaaactggatcccttccttacaccttatacaaaaatcaattcaagatggattaaagacttaaacgttagacctaaaaccataaaaaccctagaagaaaacctaggcattaccattcaggacataggcatgggcaaggacttcatgtctaaaacaccaaaagcaatggcaacaaaagccaaaattgacaaatgggatctaattcaactaaatagcttctgcacagcaaaagaaactaccatcagagtgaacaggcaacccacaaaatgggagaaaatcttcgcaacctactcatctgacaaagggctaatatccagaatctacaatgaactcaaacaaatttacaagaaaaaaacaaacaaccccatcaaaaagtgggtgaagggcatgaacatacacttctcaaaagaagacatttatgcagccaaaaaacacatgaaaaaatgctcaccatcgctggccatcagagaaatgcaaatcaaaaccacaatgagatatcatctcacaccagttagaatggcaatcattaaaaagtcaggaaacaacaggtgctggagaggatgtggagaaataggaacacttttacactattggtgaggctgtaaactagttcaaccattgtggaagtcagtgtggcgattcctcagggatctagaactagaaataccatttgacccagccatcccattactgggtatatacccaaaggactataaatcatgctgctataaagacacatgcacacgtatgtttattgtggcactattcacaatagcaaagacttggaaccaacccaaatgtccaacaatgatagactggattaagaaaatgtggcacatatacaccatggaatactatgcagccataaaaaatgatgagttcgtgtcctttgtagggacatggatgaaattggaaatcatcattttcagtaaactatcgcaagaacaaaaaaccaaacactgcatattctcactcataggtgggaattgaacaatgagaacacatggacacaggaaggggaacatcacactctggggactgttgtggggtggagggagggtggagggatagcattaggagatatacctaatgctagatgacaagttagtgggtgcagcacaccagcatggcacatgtaaacatatgtaacaaacctgcacgttatgcacatgtaccctaaaacttaaagtataataataaataaaaaaaaaaagaaaaagtcgaagttaatgagagaaggctactggggaaagccttttgggatagtgccattgggaaagccctctaagggagaagacatttgaacccaaagctaaaggaagagaatgagcaaagcaatcatgtaaaaagctaagagaagaaaactccaggaacagggaagagtgcaaaggtcagaaagtagatgagcttacctagcaaaactttttttaaaacgtaaataaaaatacataacttgaaaaatcaagggaatcttggtgaacacagataatgtaagtaatctagtcagaaataaatggttgatgttttactttttctcatattatttaagattgaagtgccaggatacccacaaaaatcttcagtaaaaataattattttgatcaaatatcatctcatgttcaatctttgctatttgcttatagttgctatgttatggatagaattcagacattcctgatttcaaggatattgtcatatatccctcatttgt

SEQ ID NO: 1884591 - DNA, 4001 bp, Homo sapiens
agtcaagatttcctccgcacttgaggccatctcttttgttattacgatgtggcgggtcttggttggttgggggctgagcttatttcagagctgcaaataaacagctgttaattcagtagcttggaggcacttttgacagacagcacaatcgagaaagggaaaacaagtccatattaaaatggactttaaaaaatttttaatttccttttacattttctctgccgaagcaaccatctttgctagggcagggcctgcagctttatttgtaggttacctattgaaggatccttgctccagaatatttaccccatccttgggtgtattttttgttacactctcctaaatcctgacattttctgagtttaggttctcctttgagaggcttattcttaggtatttgtaacttagtgtgacaatataatgagagtccttttaatacctagcaggggtcattctgctgtggaactggggccattgatgaaagattattcaggagtcttcgatatttgagggtgggagatggaggcattcctacatggaacatttaaatgagtgactttgggaatcatgaggccttaggttgggaaggggtgtgtgaaaagaatgcattggagaagagaaaagaatattaaaggcaaactttaactacacgggagtttgtctagggctgctatttctgaagtcctaactacggtatccacctgcctcagatgcttggttggcacttaccccacttagcttctttccacactgggttccaggtgaattgagagacgtctgcattctgagctcttctctttagtcagttgccagtggtctggataatttgtattcccatttctggattgccttctggcttgagaaaggttttgtatcttatgccccttcttcattctgcagtggctctgggagtgccagagcggagcagcagcagctgggccactctgttcacttaaattcctgtctgccttgctgtttggcaagagggatcacccaaagaatgttcaggggagcagccttccctaaatgccttatgtgatcatgcttccttgtctccctcagtaaatgttttatttattaaaattatttatttgatcacatgaacatgtattatcaacctgtggctgtgctgactagatccaaagtgggctcaggtttgttctgcttactgtaggagtaggtccttggtgaagagtgtctcctttcctcccatccattctgtctgaaagagcagtgcccagtttcttggaagacccttctgacctaatcattcctattttatggctctcttattagatctcctgttgcagtgaccatcgatgcaagtggcttccagcttctatgaacaccgtctccacccagtccctgaccctggcgatcgattcttgtcatggcactgtggttgctctccgctatgcttggaccacgtggccttgtgaatataagcagtgtcccctataccaccccagtagtgccctgccagcccctcccttcattgctttcattacagaccagggtcctggacatcagagcaatgttgctaaatgactgtttcagtatgatcagaacttagatataaggatgggtccttcagattttagcatttaggagtttcaataataaccattgcttttaaaggaaattaatagaaagcctcattgaatggctttcagctagcacatggctgtttctatattctgatgagcccaggcttataggtaacttgaaatgcttgctttttgttccctagttggtctaagggtctgtattggactaattctgaactacagacaaattggacctcaatgtcatttacttccctcatattaatgggagtgaaatgtctaatacttttgcccctttttatccagagttgtgggaatctcaggattggaagagattttaaaggccacataggccagctagtgttcatgtgttctttataaaatttctcccatccaagtactaaccaggcccgaccctgcttagcttccgagatcagatgagatcaggcgcgttcagggtgatatggccgtagacgtctttacaaaattcctgacaggtggttactgaatctctctatgaactttccattcaaaactttccaagtttttccttatgtggaaccgaaatctttctttctcccgtgaaactttactactatcagataattgaagacagatctctttgtattctcttcaagcccaaaccaattctgttccttcaatctaaatagtggtaatatgaatgtttaagaaatgaaataagaaacatgtgcaggcactttggaaggtgctaagtgactgccctaaggaatgaaaagcaagggccaggtgggagtagcccagcgaaggcacttgggctgccaggaacaggaggcgtgggaaactctggcttaggaaaacatgaacacaggggcaacagaggcaaactgttgttcgagttaaatataaatctcaggctctttaaaggtaaaaggtttaaggataatccatttggaagaagaaaagagtgaggctgaaagtaaagccacatgacaagcatataaaaaaaaatgcagatgatacaaatatgaaagaggccttcagtgtttgtttattaagaatcttaatgcagtttactgatggattaaaaacagctaacattgtctgaaaattatgttacctataagaagttggaaataaataaaagcataatcactagtgatgtgtatgtatttatatccacttgcaaactgtccttgaagcatgtgaaaaggagtaagaatactatctatgggtagctttcctccccttaatgtgaaaaatgagaactaaagcaaaaagcatcactcactgtacatatacaatgtattttacgtagtgtaaaaaatatggtttagatagtgaatatattaatgaaatcatatgtaaatttatttttagtggctgaataatttaaaacattatgtggaattcactatgtttcccccaatttaggaactttttactgtgtgaaaatgaaatttataatactctgtagggtgaatgatggtttttgctttagttctacccctctgtagagttccaaggggttctggtgtagctccaaacagcaggaataactttgtcagtgccaagattttatttagttaaaaaacaaaaaatctacacactttacaaggaacgttggctcccctgaggacttcctagcattcaactcgttcagttaacccctattgcccatgctttgacctctcatgcatctggccccatagaaaccatgaaccttgtaacagattgatgcctgagaaaaagtcaatctacccgtccactcctccactcccaatacacatacccccatgggctgttctaattcgggggcagccagaggtagccaagaactctaagtccagattcctttcacctccaggaacctagagtacatagtgtgaaaaatacggttcaggcaatgattatgttaatgacgccatgcacattcatttttagtggctgagtaatttaaaacatgatgtgggaattcactgcatttccccaaatgtaagaactttttagttttaaaatgaaatttatagtcactgtagaaaatttggacactaaagtataagcaagtaaaaatcacccccaaattcatcattcagagaaacactattttgctgaaccattcacttgacttgagttatataattttatacagtacatattattttgtaatctgtgtttttgacttacttactttaccaaaataattttcttatgtaaataatagaatatagatttagagtgtttcagtttgtggaagcctcattttatttaaccaatttcctattaatggacatatagatttttaacaattttctactattaaaataatactgtaatgaatatcacatgcaaacatcataccacactcgtccagttatttcttagggttcttaacatggaagaggataaatatatatttaaaatttagatatctacagcttaaccctcccaaaggat

SEQ ID NO: 1884592 - DNA, 4001 bp, Homo sapiens
aatggagatcagccagccccgagggaggaaggggcggcggcgggctctcagcctccattacggaagcggccgcagctgtgtgctgatgtggcagcacccggcctggcctcgcagctgcctggatggggcccaggggccctggggagccccagaatgaggtttcctcgcggcccctcgccggccaccatgctgtctcgccctcttcctccctcccctcctgtctccccctttcctggccatgggggcatttcaggctctgcttggaaaggggaggatggggtggctgctcaggcgcaggttgagggcctgaagggagctccgcggtgccctgctctgcccagcgcccgccctcgaggtccagagggagccctgctctgcccagcgcccgccctcgaggtccagagggagccctgctctgcccagcgcccgccctcgaggccctcactcacctgtcctcttgctccccctcaggactcctgcactgggggggctctccgctgtccaaggcgccctgcgccccctcgtgctgctgccgctgctctggcctctgggaccagtcgccaaagccctcgtcctcatccagttcaggggcctccgagggcttcaggctgaggctgagggtagcaggggggagcttaggcctgggcggctgctgcctcctctgcccagggcccacactcacctcacggcgcccgctcaggccctggactccaagtgtgggagaccctgtctgccacagagctggctctgggctgtgtctcctgtggtcagaatacctgagggcagggctatgcctcccccgtcagttctggggcagcctgagaactgtgcttcctccatcagtccaggactccttgaggctcagcagggctatgcctcctccatcagcctggggctacctgagggcagggctatgcctccctcatcagtttggggctccctgagggtaaggctgtgcctcttcgatcagtgtagggctccctgaggacagggctgtgcctcccctgtcagcctgtggctccctaagagcagggctgtgcctcccccatcactctgggactcgctagggcagggctgggcctcccccgtcagcctgtggctccctaacagcagggctgtgcttcccccatcagtctggggctccctagggcagggctgtgcctcccccatcatcctggggctccccaagggctgccctggtccccacatgaggaccctacatgaggtcctcctaagccccgacttctcaggcctcccatgtggcagggggagcccctggatagctggggcccttggtgggggtggccaagggcctgactatggtgaccgctgaaccccactctgcccaaggctgctgacttggagaaaatggaacaaaagaggccagaaggaagggaagcattattggaaaaacagcccagcccagccgcggaggcctcctgggcccaaggaggaagcaagccagcctggccgccaagttggacgtggctctgtgagtcactggcgggggagtctggtggggggctcggccaggctgcgtggctggggtcagaggcggtccgagcaagggccagggcacggacacagagcctgggtcagcgcccaggaggcagccaggtattggcagaccctcctctagggctgtggccaccctcgccccaggagcactcacccactcccacgcctgctcctgggggcccttcctcgctctcatcctgcactggaacccccaagcccaggcccttgacctccccctctgcccaggccccagggtacacggataggggctagagcccaggcacgcgttatggggctgctcacagcatctcctgcttcggccgctcggggacatggccgcctccctcctcgtcctgggcctgaagctgcctgtctctctcatgctggcattgctcgtggacggcctcctcctcgtcctccacgctccactgagcagtgggcctagtgggggacacagagggacagtcacgccacagccgacacaggtgctgttttgcacccattcctcccatctacacaggccttgctggggccacacggtgcaggcagccctgtccacgaggtcagtcccaggccggccctcaggcctcaccttgtccatctttaaatagaggctgcccacgtggtcatgaggtgccctctggcccaggcgagggtcctggggccctgtgaggatctgggcacccctgtgccctgtggggatgaaggtgggactccaaggcccattcaagcctgaagaaactcaaggacaggacaaaaggccctctgtccccctctcccagcctgcctccctccctaagtagaaccaggacctagacccaggtgaccctggagggcccaggaagaagatactggagtccagggagactggccgcagcccaccgccaggcggcacctccaccccacctgcgggtgctccctcctgcaccccaaaggcagggcgtgttggagaaaggggaggtcgaaggctgaggaaaggagggcctgagcacgtccaggcaggacacctcctgtcccaccaccagccccgctcacagaagctccgcagactcatgggtcctgcctgggcctaaccccatagctgggggcaccttacagggtcggctcacccaaccccaccccatccttatttcagagccctctgcggagtctctctgagctgtttcttttgtttgtttgtttgagacggagtttcactcttgttgcccaggctggagtgcaatggtgtgatctgggctcaccacaacctccgcctcctgggttcaagcgattctcctgcctcagcctcctgagtagctgggattacaggcatgcaccaccatacccggctaattttgtattttttagtagagacagggtttctccatgttggtcaggctggtcctgaactcccgacctcaggtgatccgcccgcctcagcctcccaaggtggtgggattacagggatgagccaccgcacccagccgattgagccatttcaaaaatggggaaactgaggtaagggagtgcttctgccctcagagcctgaaaccatggcttcttggggtcccacgcgcccccctcagggacagaggtaggcacaggctggcctggacctgggcatcagagccccggcccagcagctctcagatggtccaggtcctgcagacaccgcagcctcagctgtcatggccctgcctcccatcgccctcctagagcctgagagggggtccagggtctctacactcctacagggcttattatcccagacccagggagggagcccaggccagaacagggagcagggctggggtctccccactggggtctcagttcttcccggccagtggccgctgcctgaccctgcagcctgatccccactgggccccagtcccctggccagacagccctgccagcgcgtgatctaatctctcctaggtctcccctaagcctctcagacaaaagccaggcccttccacaggcccgagttcaaggcccactccccccaccgaagccacaggggactccagccacgcaaacccagccgcctgtgcaccccgccccccgcgcccccgaatccgcctgcctgtcctgctcctcagaagtgccttcaactcccggcccccgaggaagccacttaattccccacacctggctcccatcatccgggcagatgaggcccagcttcccgcttctgccggcctccgcatggctgggggctgctgggccttgttccacctgaggaggcagagcctggggcgcaggggccctcgtgctcactcacgccccagcccctccacacagagggcggcgcaggctggggcagagtgttgaggaggtggaggggttccatggaggggaagcctggccatattgctccccgtgttcccatgtcccagcccctccatgtgagcaagggcttagctggggtgtgtgtccctgggcctggggcatgagagggagcccatgctcctccttggacctgggcttccgatgggtccagg

SEQ ID NO: 1884593 - DNA, 4001 bp, Homo sapiens
gattggacatcacatataaaggagaagctagagtcaaaaaccacacttaagtttgtagcttggatacctgagtttttggtggtgattcctctaagatagaagacaaaatggaggaattcagcctgggtggaaagatgctgaactcaattttggacatattgagcctcacaatcttgtgagacattcacataaaggtgttgagtgtctggttggattcatgtgtgtgatgctcagaagaacatcttgggctgaatacttagatttgtgagtaatcaatacacagaaagaaattcaagccattacaataaataaaatggcctgcctgagatacagaatgaaacgttggcctaagagaagatatctaaaagattgtcatgaatcaataagaaaatgacaataaacccaataaaatgtgcaaaatacatttttaaaatatttcacacaagaagaaaaccataaaaaaaagcatgaaaagattcttcactgccctactagtcaagggtacgcaattgcatttccacaatgagatagtttttatgccactagattgacaaaaattaatatctgacaatgtcaaataaggatttgaaaaggtttatactttactggtgagattgtataattgctttggaaaacatttcagcattatcttgtgaagcataccacataattctactcctaggtatccaccctagagaaactcttgaatatgtgcaccaggagacatattcaaaagtgacttcaggacctttgttcataatagtacaatactaaaggcaacctaaagagtcaacagcagagaatggataaggggcaatgtatccatgaaaagtatcataataaagcagtagaaaaaaatgaattgcacacatgtgtgagaacattaaggaatcttagaaacatgatgttgaatggaaaaggaaagaacccagaagactttgatttattcagttggtgcgaacgtaattgcaaaaacctcattacgtttgcatcaacctaatagatattattttaataaacctaaaaataagcaaaactgggcaaaatattatttacatatgcatgcatttgggataaaacaaaacaaaaaatcaaaagaataattctaaaattcaggatagtggttctctctgtgcggaaaagaaaagcaggacacagaaggaggttaggagcagaagtgagggtggatacgagttactgggaatggacttgtcctttgcttgactgctgggttcagaaatgttcatcatactatattttgtaacttacacatattataaatagtctcaaatagcatactaaaattaatacaaaaaatgaaaaaaatcgcacttagagttacaatttttttcatcctaattaagacagacttctggatttaaggactgcatgagtttactcttttgttaaaattgcttttaccaaaattttaggactttaacttcctccctaggtggaaatatatggcccaaccacaggacacaccaaggaccatggagtgtgcattttggggtaataaattacccttggcttccttttactcactgtatttcccatcactctgactcattcaattatttatttccactcatttgtattgtgtgcatttgtataagccacctcagattctttgtagaatgaggtgcaagtattcaaaattaaaacattctaccccatgagggtagaaaaaaaacctcaaaattctgtcatactttttcccatttatggcaggaaatgcagaaaagtggccaattcctttcctccagatggcaggctgcggctaaaagtctaacagcactccctgacagcctggaggtggccagaaaagccacacacaggctgcaagagaggatgtgtggcccaccaagccctggcactctggattctcagccagagtcttaattaaatcagataccattttgagaaggcttccagaggccttgcaccatgagctggcctgagctcctgagctcatgccctctacagtcccgcagccctccagaccagggagacaagggatctcctacggctggcaccctccttcattacccacagatgcccagttgtgcctgtcccacagaataataataggccactctatccaaagttgccatatccaatgagatacaacccaattgccagggaagctgctcctgcctgcattgtacctaatttgttggccacaggaagggttttctgcatcccagagaaggtcaggatcattagtttctgactctatatcagtgtagtaaaacttaaagaagtcatagttccagtcctgatttagcttggctggatccccacccacccagtccaaggggactccagaaaataaactaggcatttatacccactgttgaggaagaatctgcttcaagccacaaggtgagggctggagaagcttccattagccattattcgccagccatggtatccctaatcacacagatggctatgacccataagtctctttaataacactgtccactgtttcccatgagatgtctaccatcagattgcctataagaatagtttcagatgaagaaggaggaggaagaagagaaagagaaagaaaaagaggaaaaggaagaggaggaggaggagggggaggaaaaggaagacgaggagggacaggaagaggaggaagaactacatatcctcacatgatgtgtatggctgtgagattgacgcattccacaagctctgcacctacaccaatatattaaaatcacactggagcggggacctccgcagatcctccttctccctgtataagccccagtgaacttcgtaattttttttaagttggagggacaaaagaagttgcctcttccaggcatattcagatctcaagatagtcatcattctttaccaccacctcttcctacaatctcttgaaccagctctgtgcaggatgagcctttatgaaattcatgctcagaggcacccacaactttgtctctagaaaaatgatgagtggaggatgggcttctaaatgtgctcaactcattttgaatgcacaagaaagccatttggcccatgtgacatctcagctatcttccagaacttactgaatggcaactttgaagagcccctgtcctgagggcttgggatctaattggatgatatccctacctgacgccataggtggaaaaaaaacctgttttgagacggacttaaccagcaaacacagtgtgtgctgtggaccaaatcaaaaatcctcctatgtaagcaatgaggtagagttcttgcatcttgtcttgtcgatttgatagcctaagcattagaggatgggctattagaatctactcaaagggctgggggaggtggctcacgcctgtaatcccagcactttgggaggccgagacgggatcacttgagctcaggagttagagaccagcctggccaacatggcaaaaccccatctctactcaaaatacaaaaattagctgggcatgttggcacgcacctataatcccagctactcaggaggctgacgcagaagaatggcttgaacccgggagacagaggctgcagtgagccgagatcacgccactgcactccagcctgggtgacggagtgagattccgtctcaaaaaaaaaaaaaaaaaaaaaatctacagggaaagaaatgctggacccctgcaaaatcccatcaaaccatagcatatggtttattgagagaacagtggccagaaacagaacagactctgctttctacttgagaagtagaaactcagagccaagcaaggccttcttttgggtaagtccagggagagcacagcctcctccactcaggaaaaggggtacaaagtgaaggaaagggcatgttcatatagggccacctttcatagttgcccctactctcgtctccataaagagctgcaaacctctgcactcattgaccaagggagctcctctaagtttttcctctcacctttgctcctactgatgtagaacaattgcaatttctaagtccaatagtagaaaggcaatagcat

SEQ ID NO: 1884594 - DNA, 4001 bp, Homo sapiens
caatgaattttgtggagacataatttagaccataacacttagtttccggatcataataagaaaccaatatctagcatctattattattcacaaacatacaataattggaaattccgaataaaagatacccataagttatatgtcaaggaggtttcaggagcacagaatagaaggtctttggaggcaaacagctctactctaaaagtagatataacttagagggaggcatttcagggacaacaaagataaaaatggaaattttctgatgaaaaaattatttcgagaaaccaatttatttcttatttctcctatactttgggaccatcctacctggacccttagagtaattcatagtattttcaaagcctttttaaagtaaagtaggacaatctttttagtcattgttcagtctcacaccaggatcaaggtattttcagctgtttgagaatacaatcagtaaaacaaactacatgctaaacttccagtcactgatgagtttaatgcaaaataagaaagtaaaatatatacccactccttcattcatgctgatatagtgtattcagtaacctctgcctgaacttgtcccgagacagagccattcagcagtttttgattttaacataatgtcacagatgtgattggctttgtaatctttgtcaaattaatagtgtgcaaacattgcagaataatacaatgtaatacagagtcaatgatgtatgtgctgtatgctgtattaggtgggaggatgcctcaaaactcctttacagtcatatcccaacaaacacttgtgagaaaacctgcaatgagaggctggaggggtggggatcgtgggattcttactttcaggatatcaagtatttatattaaaagggggtagaggaaatgccttgatctgttcactgcttctcagatttcattcctgacaattcttccttataatgaaaggaaataaaatgaggtggggacaaataagaatgggaagtaagaccaaaaaggttgaaaaaatagttgtggttttctgaaacaaaattaaggtcatgaaatatctggacccctgacagcttcatttcttgtttcttctggcattgtttatcacattagctaaatgaattaagcacttcaattaaaagtctcctgactgctgatcaatcaacatgattttcagagtgcttaaattaatctctaaggaaacatcaaattcgattaatgctgttacttggcccattcacatacacacaagcccaggacacattcacatgcacacacacacacacacacacacgtactaattacaaatatcgttactttggtatcttaaggttaattctcactctcagacattatatgaagcatctttgtgtactctttttctttaaaagtcacaactttatcacatacataggtaacattatatagttaattttataaatgaggaaactgagacttagtatgtctcttccttgactatagtccccagattaatgaatggaagttttattattttagcctatttctgtctaatttgaaaactactagtgggagaaaagagtttcattatgaagagccttgagtcagatggaatatttttgaattttgaatacagtaattagtgtaaaaatgtttgcgtgttagtttgtttcagcattgccttctgtaatatgaatataaaatattttgtacctaaaagaaatgttgtgacaaccaaatgaataaatgcaagtaatgtactcagaagtacattactcagaatgtagcaccatctagtaaatgttagtcttgaagatgatgatgaggaggaggaggatggtgatgactgaagataatagcaaagattcatattgcctctggtgagaaaacagctttatacacagtgggtgatgcttctttctatttgtgaaaacatgtttttctgaaagacaatgagatatgtacaatgggaaggcttgcttcagctaaagcaatctattgaacccatccgatctgtactttctgcattgctgttactactttgaccacccttgactacaattcttaggataattcttgcaggaaaatgcatatgatgtcacctgctgaaactggaaatacagattattgattgtactctaggaaactttatgtcttattttctaatggagtttagggactgggcatccaatagccaactgaaggaatatacccaggatcccatagcttgttagcatgactttcagaggaaaggtatgttcattctatccaaagcctccaaattcattctccctcatgcattctgtttttatactcacctttaatatggatgggaggttaaagtactccttataccacacttagtctaaattgtctgccaagttattcaaagtaattaaagaaaccctggctttaaacatagaacctagctaaaacccacaatttttcagaaatttttaaagcacctttctgtttcagtggttatcagtgccaagaaaaatatcttcttaaaaacaaagatactcaattttagaaaatttgttctgttttcagacaccctctttatattgtgtttgacttaatatcgggtagagacagggtttgtctccacaaaggatagcattaaaacacttaacattaataaatggagaaaaagtgcaattcaatagcatgttctcaaattttaccaaaactatcattactgatttactagcaaatgtttaagaggaattggtaaacagagttcctaagctatttcaggttctttttgtagattttatggaatgaattttagaagattattttttatgctggcaacatgtaatttagaaactaagcataattaagatactagatgatcagaactgaaataagctagaatagacaggaacattttcactgtatggaacaggcttactgggaggaggatgcatttgaggttagcaacttaagtatggtatgaatgaaaagcaggccattgcaaaagcagttatagaaaactatagttcctcagtcatttgtaactcacagaagttaagctaaattttaacacaagcaaatctaacccatcagaattaatcaagccctgattccaagccaagcgtgctagttaggattaacctgagtttcccttcactatctctcttttcaactctttcctttctctctctctctctctccctctctccctgtctctctctctgtttctctcatacacacacacacccccccacaaagttttgcttatttcaaaattaacctataatagtaatatatgtgctattttataacagacacttctcaaaagaagacatttatgcagccaacagacacatgaaaaaatgctcatcatcattggccatcagagaaatgcaaatcaaaatcacaatgagatatcatctcacaccagttagaatggcaatcattaaaaagtcaggaaacaacaggtgctagacaggatgtggagaaataggaacacttttacactgttggtgggactgtaaactagttcaaccattgtggaagacagtgtggcgattcttcagggatctagaactagaaataccatttgacccagacatcccattactgggtgtatacccaaaggaatataaatcatgctactataaagacacatgcacacgtatgtttattgaagcactactcacaatagcaaagacttggaaccaacccaaatgtccaacaatgatagactggattaagaaaatgtggcacatatacaccatggaacactatgcagccataaaaaatgatgagttcatgtcctttgtaggaacatggatgaagctggaaaccatcattctcagaaaactatcgcaaggaaaaaaagccaaacaccgcatgttctcactcataggtgggaattgaacaacgagaacacatggacacaggaaggggaacatcacacaccggggcctgttgtggggtggggggaggggggagggacagcattaggagatatacctaatgtaaatgacgagttaatgggtgcagcacaccaacatggcacatgt

SEQ ID NO: 1884595 - DNA, 4001 bp, Homo sapiens
acttcagtgttgccattggtggtccagatcttctacagggtgtattcactcttcaagagtaaatttcttcactgcctctagtgttatgttctgttcagagtgttatcttttaggctcccaaggttgcagttctctagttgagattttcttctacttacagcattcccctgagctagggaatctgagcggtccaaagggaattcaaccttaatcgtatgtttttccaaagccaaccttccagatcacactcagttaccctctttttacatttaataaaacttagttccacagaactgaagaatttgcctgtccactaagtggctgagcaatggcaaatttgggggcctgcctctcaatcagaccagtgactgtcctctcctcctgctaccacctaggctgcctgcagtcctctgtggcatgcacactttttgggaaacagtgatcttcagctgagcttaatgcacagcaccctgtcatgataccttcatctgacttctgtttgcttccgcagaaccaggcttgctaggggtagtagacaaagaacagaaaatgaataatttatatttgactctctcacagaggctccccactgggttgctttctaggaaaaatattcctggcttgcagtctcagcgtgagagtatgtgccaagcccagcccattgtccccctcttcacactgtctgagatattaaccagacagaaatatcaggctgctgggtttgattattgcctctttattttggtccctgggaagagggaatgctttctatcatttatggataaaacctcatttttctgagtgttgagttgttgtcgaaatgacccagatggtagataaggcaatagtggtgactctaacaagaccaccagaattcttatttggtattattgatgagtttcctttctgagcttggctgtgaggtatttgtattcatcttccttgcaagccaatttccattggtctgaattacgtactgagagttgagacagaccttagaggcttatttattccattttattccttcctactgttctaaacaggttaatcaatatgtcctcgttctttcctaagagaaactatatttcctttcagaccatgtagaagggcaagccctggaatgctatgttgttaccacaggacccaggatcctaccctggtcacatgttggtatcagatgtgaggatctgacttcaggcacaccttaagctaaccagtgatctatggtgtagcttagtgctaaaaaagttcaaccaatgactcttaggggataatcagttacctttctgtactgcacttcttagtgctgtagaacaaatcatattgtgagcagtgagataatagagaaggaccataatagacatgagtgagcaaagttgtgagtaatttaaaactatgaagcagcagaaattaccgataaattgagaatggggttgaaaaagaagtcaagtagtaataggagaagcaagagacagaaagagaaacaggaagagagggtagcatagtgcttagccacgttaatgggagtctgcctgtgactaaaatccccagacttgtgctgttgaggtctagagcttcaagaaatacagaataactttttgttccagtttctttatgtatggtcatattgcaatttattttcttttctttttttgagatggcgtctcacccaggctagagagcagtggcacgatcttggctcactgcaatctccgcctcctgtgttcatgcaattctcctgcctcagcctcccaagtagctgggactacaggtgtgcaccaccatgcctggctaatttttgtgggttttttttcagcagagatggggttttgccatgttggctaggctagtttcgaacccctgacttcaggttatccacctccttggcctcccaaagtgctgggcatattgcaatttttattcttgaatatctggcaaagtatttgttgtaaggataactgtattgccacaacgatccttacaacaaacatgagttagcctgaatggaactctgtctcacaactaacataaaatagccttcttcatttcctacctcatccaatataaggatttcccttatagcatccctggaaaaaaatctatacactgtctatttaaagacccaaagattgggtgttttatattataagaatgctcatttcattttaaataattttatggagtcaatcttgaggccgttatcaacttatccagcccttccattgtttttaatattcatcttgagccattcattatccttgaattcttcttcaatatttatttgttttttaacctaaaatttttctgtatggtattttttgagcattaagctcaagttactgctagcttttaattttcctttccattttagaatgcatcctctgataattgattctatatagatatggttcttacatgttggtggtctctgttggccacatactaccaccagatcctaagttctcttttcaaaattgttttatcctttatctatctattagcatggccaaactctcttataccccagctataaaactttattttatattttattttgttattttagacctatgtccatgatcttaaaactttagtcagataaagaaaggaccatctggaagaatctggaacctctagttattaaataaactgtaaatcctaaggagataccatatgaaggagtaaatttcctcttatcttggtaaaaatgttgaccatgctgtttttatgaattcaagctctgtttatatcctaaagctatgaatctaaagaccactcacagagatggtgattatgagtctatgcctaccatgatttcgtgcctttaaattagacaattttcaccccatcactcagatagtagacaacagaagacaaatattaggcgagtctgtggcctcaatcgtggtgattatctgacctctcttgcatggtttctgtctgtattgtttgtatctactaaatttcagtgttaccttcctccagagcctcttgtctttatctccaacttttttatgtctcaaatgtgccagcagatttggtatccccgcttttgatgcttgggatgcctgggaacatctcttgcattctttggcttgctttgctcctggatgctcagggtaaccacctggtattcattcacctcccctttctccagaaacaaaaaacatgaagcagtaagcaacagtggcaacttaaagaaagatcaatatgctattattgctattttacaaatgatcttctagtttttgggaggttccaaggggccataagtgacttggaatggaaaggagttttggtgttgatgtttttttgacttgtaaaaagcttaaattccattatctcctaggaagcagaaaacaacatggcacctgccaagggaggccccatggttaaggtgcagattgatgtgaaaacaatagagagatgtatttggcaggcgttcttactactactataagaatgtaaacttgtactttgaaaactctagttttttgcttatttctctttgtgtgtgtgtgtgtgtgtgtgtgtgtgtgtgtgtgtgtttgcttttgtaatgttataaaattccagccatgatcagttgaactaagaataaaggaaagggttgttgctattttgttttatttgttgattctttaaataaatatttattgagtgcctactgtatgtcatgactatgtcagatgctagtgttaacagaatgaataagaaagatagaagccctgcccttgtgaaaatttcagtccacaaatgttttgtaggacaagttgaggaagaaggacagatacccaaaagagtgatgtaaaagtgactgaatccaaagagagaagtgacagcttagggactaaaaactaagagatctttgtatggttcccattggcttttttttctgtaagagttgtctctctgaagaaccctagtatttgggccctgagaagattttattccaagtcatactcttatattcttgaactttgcctgctttgcatacaaaa

SEQ ID NO: 1884596 - DNA, 4001 bp, Homo sapiens
tttcctccatagaataggctctgctcctggaaggtgtctactgagtgggtctgggatacaagaactagcctcttcagctgcccgctcatgcccattattggggtaatggtagtgcccagaaagggtgcttcccacagaccagttcagagttttgcatggtgtcaactatgatgctgaaagtcacattctgtgtaggatccagtaagaattctacaaggtgtcctgtgcagtggtgcacataggattccatccagtgcctaatgcattatccactcaagtgctctatgcagtgaccaccctcagcccagggagttataaggtagtgctgcctgggcaatgaccagtgagatgacctcagccatcccaaacatacaatctggccaagagttctatgccatgctcagctcaattccccacagagtgctccaagctaagcccagcatgaggtctgacactgtgctgaatataattcctagtgcccaatgagtgcccactggatgcccttcaaggtggccaatgaatggacttcacaccccagtgagtgacacacctgggaagttctctcttgcccaaaccccccctgctagggagaagtaggaccacccctctgacctcctgataaatctcaacctcactgccagcctctccacaggctcttggtgtctttaaaaagccacacaatattattttatctaaacaagcaacttgctctaaacctgaagccaaccaagaaaacataaaacccgaatactaacataacaaagttttattttgagattcttttttacatcttttaaaagcaaggtgtagtacatgcttattataacacaaaacatgacaagcaaatagtacaggaacctattacatagaaagtgaaattccctgtttcctttcctctctctcccatctcccatcaatccctctttctagaattaactaccatttatttggtttgcatccttttgggtctgttccatgcattactcagacatttacattacatgcatttaactcttttttatacatatgagctgatactgatgcattcttctgaaacctgcttttttcatttaatataatgtgataatgtggtcacctctccatgtctatgcatacgtatttacttcctcacctttagttaatgcatattattccatagtacaaaggtacttccagttttttaaccagtcctctgttgatggcatttagaccatttccactttttcactgccacaaacaacattgcaattaccatcttttatgtactgataattctgcaaaatcaccctctgaaaagattgtaacaatttacacttcttcatgatgagcacagtagaaatctttcccttgcttctggaaagccattaatcgactccactttaagaaatgcaggaggcagaaggttgccaacgcaagctgcatgtcccttctgtctattcagaatggaactgcctgttctcactgggcttgggtgtggtccctttgtcttgcaatatgcaagctggagcccagtccttggcatgctctcccagctgccaggtgtgaggacctgccctcagtgcacaggaggcaggctcagcttacatggtgataaggtctcattcacagagaagcaggcttcactcacatgggatcaggcttcacccacatggaaccaggcttcacacacatggaatcaggcttcattcacatggtaatcaggcttcactcatatgggatcaggcttcactcacatggaaccaggcttcacccacatggaaccagtcttcattcacatggtaatcaggcttcatcatgtgggatcagccttcattcacatgggatcagccttcattcacatgatgatcaggcttcactcacatggagtcagccgtcaatcacatgggatcaggtttcactcacatggaatcaggcttcactcacatgatgatcaggcttcactcacatgatgatcaggcttcactcacatggagtcagccgtcaatcacatgggatcaagtttcactcacatggaatcaggcttcactcacatgatgatcaggcttcactcacatgatgatcaggcttcactcacatggaatcaggcctcagtcacatgggaaccactgtaggatcaggtttcacccacatggggtcaggcgtggctcacatggtgatcagagtttgcagtgtttctgcttctgctgccccatgactatctcgagagatcccttgagtgatgcagggatccctaaatgagcacagagccattggtcatccctaatttccatagaacagtctttctgtctatctgacaggctctaggtccctggctttccctttagttccccacttggactggagcccaactgaccagggctccgccctcttctctttgctccctccagctcagcaccagccttggtgccagcacccccactgacaatgatggtgagattcttgagattcatgccactctctcactcctctaccttctgttctggactgggtcagaactacctcattctccagaattggggatttggacaactgagcagtcccgcttttatcatagctgcccaagcatctctctgccagcctgtgcttcccacctcgtgcagtgccaggaaccaggatgtctcatggctggctttatctcacatttcactcattcattcaacaaatctttatgatatgccactgtacaccatgcacattttctaccaaactgtaaatgtcctaaaataactacatacgtatcaagttctgtgtttcttttgtaatatggatggcaagttattgaaattttatgaattcattactataaaccggatacagttcagtcctctttctggaataaatgcacttctagacagttaccactatagcactctatcccatcccactgattgtataataaaagtcaacatgtattaagtactcttcaagtttggtccaagaggcatacatgtgttcgtttaaatccccaccagaacaaccctataagtaccattgttatcaccattttacaggtgatgatctgaagttaaatgagtcacctgagttcacacagactggaaggaacagagccaggatccaaatccagacatttgacatcagggcttacactctttttttttttttttttttttgagatggagtctcgctctgtcaccaggctgaagtgcagtggtgcaatctcggctcactgcaacctccgcctcctgggttcaagtgattctcctgcctcagcctcctgagtagctaggactacaggcacccaccaccatgcctggctaatttttgtatttttagtagaaactaggtttcaccgtgttggccaggatggtctcgatctcttgacctcaggtgatccacctgccttggcctcccaaagtgctgggattacaggcgtgagccactgtgccactgcggcctcccacactgttcattgttatggcattctgcacctccatagtggttctctacatgagttccgtgggcagaaaaccaaaaaactcatcaggggcagctttgggaaagcctgaaagataaaagggacagaacctaaaatgagagcaacagttctgagctgtgaccagtgagataccttggcgggctcagtgatctgcagatggcagggcagggcattttgtccagcattttccagtgatgccatgtggtagatcctcagaggccactgcagaggcatggagatttcagcttcatcctgctgccaagagtcctactgatgagcagtggccatccagacttactattccttcaactccagtcatctctaagcttgtctgcatgggggctactaagagctcactgtgagaacgaaggtcaaggactctggggtcaaagtgtctggacctattcacctcctggctgtaccacttcatagatgtgagataagttactaaacatatctgtgcctcaattttctcaggtataaaatggggacaataatagtatctttctcagagagttgttgtgagagtttatctaatgaaatg

SEQ ID NO: 1884597 - DNA, 4001 bp, Homo sapiens
aaaatatgcctgaaattaaccaacagccagcttgtacttaacatacaaaataaacaaaagaatcaactattgtgtaaggagagaaccccgaaatgttcctcgttaatcgaaattcaagagtattagcgtcgggaaagatctagagagtcaactccctcatattaaagaagagaagatggattgctgtcctacattcaaaggaggccattaggagcatgaaccaagggaagctggttttccttctatgcctctgccaggttattaaatcaccaggcctcctaatcaagaattgctcttcgtgtggaagaactcctcttcacctgttgcttcctcatattatttcctgcctcagagatgtagaggaactgtaaaattagaataggatgtttgggtctagacaaatcccagtgaaagctaaattatggaaatttagtctttgtataacaaatgaaaaccctaagtaggctgccaaggtacaaaagctttcttaacccgagacattgcaaatacaacgtactaagtgaaaaaaggagtgggtggggaacagtgggagtagaaggctgtctaaagggaagctaggaaaatggaaagtaatatggagaagcaacatgctccaagtggagtgttttactatttcattgcctgttgaactgtacacaaataggcactactacataaaatagctatttgaaacagttatgccattgcagggtagaacattactctcaagtaaaggcttctaactgtacaattaaagtctcaatcttctttttttaacagaatttctctgatgtactcagcaaagtaaaattttgaatagattattttatttgaagtgaatgatattgtcaaatgttaaagagtctgcattttaaaataatttaaacaatatataaaaacacttggcctaattaagtaatcataacagtatggaaaaatctcttcaagagcacctttgaagggaaattttatcacagatctcagatcagaacatagaaacccatctgtgagttccagagatctaacataaaccctacttttccttgtaggatgagttgcagattctattaaagtgtaagggttgacttttttaatgtcacttgtttcatcatcactctgtagtacatgtaaaggcacagattgatgtatttttctggcatcttcctgacgcacccttgccctatataaatcggtttgccaggatcttgttgcttaaattagcgattgcaaactcttggtcctgccaacacagccgattgtgccaaggttctcagcatctactggcacatgaactgttgccttttctttggctttctgcatgtacctggggccatcatccttccttcacaaagcagcagtctggcttagttgtccctgagaaagacttcaggattggttggactcaactctggccctcttcaggttgtgcatcctgcacaatgtattttcagccacacaatgtattgttcaggatttgtcgtgcacatacttgcagattggcagagccaactgccagagatgagaaccttttaagttgttgtcaaacgtcataaaatgtgttccgtgattaattttgtgggcacagattggtttttgcacagagtccaaaatttaggatatgtcacagtgactaaatggcaccggcatgctgaatgaatttggaatttgttttgtcaagtgtgggagcaggcacacagatgggctttgatccagtggtgctgcttggaattctcattatagcaatgatgtcacttgtcacgtggagtaagtgataatgctgccaaattgtggaaaaagcaaggcaaataggaaagtacacagaccaagagaaaggacttaggtagcacagtaagctttcactatcagatgaatggacataaacattgcttttgggctgccaaaaatatgcatagtaaaaatacaggcagaaaggaaaacttccaactgaaagggcccttaaagtagggcccctgtaatccaagaagtcttcacttcttagagaaaatcaagtaaagcaaacatgtccttgatttttatattaggctatgaaagaaatttctgagctgcaatcaagagtctttctgcaatatctaaccaaaccaaagccaaagtattttgctttataaaaaaaacctttgtctatgaagaagatcagcagtcatgctgggaaattgaaaaaaacaaaaaccttatagtggcaaagaagtacagtatactctcaccaagcatgcacatcagaattctctgtagggctttaaaaatatattcttgatgcagctacagcagtgcttagagggaaatttatagctataagtgcctatattaaaaaaaagaaaaatatcaaattaacaacctaaacttctatcttaagacacttaaagcaaaacaaactaaactcaaactaagtagcagaaaggaaacaacaaaagttagggcagaactagaataaaataacgatacagaataggaaaacatagaatataaataaaaacaattgagaaagatgatgaaaccaaaatctggttccttgaaaagatcaacaaaattgacaatgctttaactagactgaccaggaaaaaaagaggaattactaaaatcaggaatgaaacgggacatttctactaaccttacaagaataaaaaagaatattaggaaatactataaaaatctctctctcttgccacacacgcagtatatactatatataactgaatgtatgtcatgtaacttatctaatttgttgaaaaatatatttgtcacacaattcacgtcagagggtcaccatgtaaattttgattcaaaaactcgagtatggcatgaacatttgtattttctgaaaatataaaggtttttgtgagtgacatgtactttttgttgagaaccattgatctaccacatggaaggcataaaaattgtggaattacaattaaatatgcatcaattagaattaggtatagctgcatataaacacaaaaatccaggctgggcatgttggctcatgcctataatcccaactttggcatgatctcagctcactgcaacctccgcctcccgggttcaagcaattctcctgcctcagcctccccattagctggcattacaggcgcctgccacgacgctcagctaattttttgtgtttttagtagagattggatttcatcatgttgaccaggctggtctcgaactcctgacctcaagtgacccacccaccttgaccttccagagtgctgggattacaggtgtgagccaccgcgcccagctattcccagtattctgggaggctaaggcaggaggatcacttgaggccaggagtttgagatcagcttgggcaacatagcaagaccctgtctctacaaaaataaaaaataaaaaaaattagctagtcataatagtgtgtgcttgtagtcctaactacttaggaggctggggcgggaagattgctcaggcccagaagttcaaggttgtagtgtaccactacactccagcttcggtggcagagcaagaccctgttttggaaaacaaacaaaaaactattttgaaaaaaaaaaaaaaactcacaaaagtccaaaataatagtgcatttaaagtgaatgaaagaaatccatagataggtaacttggtgcaagtatgacagccccatggtatcaccaggatcccagcttttttcattttgcatcaccatcctaggacatggcttccatagtcaagttcactcataatctgagatggctgcaggaatttcagtcattacatgtgagttgcatgccagaaaaaaagaataaggaattgcagaagggtaaaaatcaccctttccagttgaataagcatctttaaagcacccttttcagatgtccaacataatattttgacctatatcttcttagccagactcagttacatgtctccatcttactgcaaaagaactaggaagtaaaatcttttattttgagtgacaaagagcccagctacaaaatctcaactctgtccccaaggaagaaagg

SEQ ID NO: 1884598 - DNA, 4001 bp, Homo sapiens
aaggcattatttaaactctagtagataaaacctcattactaaagtcagtagaaattcaatcctagtaaggttactttgtcttcagaagcagggtatcccaaacactagcttgctcttgggaatcatggatgtgtaaacccactcaggtttatcccattgaaaaggagaggatcttattgttttgtagaaaaagataacatgatttttttttaaaaaaagaagctttataaatgtataaacagtataagtaggtcctcatctgtgtcaagtggctacagatgtttaatatacaaactcatccaacacagatacaggtaacaagtatgcttaatgttaaactcataataaatgtcacaaagtaatgacagcatcttctaaagcaaggcatagtcccttctaaagaatgaaagaatgagctaagaaataaagacggcacagcagcctttgagtcttgctcctagttctgctgcagagtaccagggtggtttcaaagtaacatcgaaccttcagccgtgcttctttatgacatggggctagttattcttgacctcttagtaacatgacaatcactggtggtaattcaccataaaaatatttgagcatagaatcaaaatcctgacacagggaatttcatcttttctttgaggtagctgagagagagagagagagagaaactataactacagactgcataaccatttcctttgacatattttgtacattaaactaccagaaaataataaaatggactaaatacctcattatgtaccttctgactacccatctgtattttctactgaaaagtatccagacatggaacaactaactccttcctaattgacagatctggatttgagtgctggtttggctgctcatatgctctttgtagattgtgggatttccatctaagacaggtaaaatgtctgttgttcatgacattggttatcactatgaaatgaccaagtttatgctttgagataatcaatctctacattattactattccagtcttttggtatttttccatagaagttttcatagaggttggctagagcatatctcaataagagggatataaaattgcattcaaagaccagcttagcctaaaacccaaaatgtgaattccaaaacatggctctttatcttggaaacttccttgagtggagagtacaaaattcttttaatttgatgatatctaagaaagtgcaatacagttgcaaaaaaacagccccaatttgtaatgccttcctgagttcatgtcctttgccatgaaactttgtagtagtggccactctgccttcaggattggccatgtggcttcctttgaccaatgagatattagcaaatacaaagcaggcagaagcttgtaagatccttaagtcacttggcttgtccttgttcttattcctctgcctttaccataagaatgtgctagaactaatctgttgtcagatgtgacacatagcacagaaattagctgcccccatcaatctagtgaccccatcttagagctgacagccagaagaaatgagcccaggcaagaccagaaaacctgtgtaaatcacagatacacagactcatgagctaaatatgcatttattgtatgccactgaggctttgtagtgtttattatgcagcatttttttgtgacaatgctgcattttttgtgacaatttggtgtttattatgcagcatttttgtgacaatggacacctgatatactgaatccctcaaagcctcacatttttcttaaaacaaaatctaacccgaggaaacagaatatgaaaatacagcatgggtacaaggattaaacaaaacttgaattctaaaataccataaaataatcgtacccaatcttacctttcatagggagaaaaggcctggaggaatcatgatcgttctcaccatgttgtttagtgcaagacccaaggaaagctaggaggctgtacagttatctcccttgatgtaattctaaactatacaacctactacctcaacctgggagcatgcagtcacaatggctggaaaactaccatttcttaagcagggaaattacaagttagtcttataatgattcatcgtgctgtcacctatttgggccattcataagagacaacatatcaaagagtctgatgatagaagagataacacaaaaaccttggcttgagattaccatgaaaacatgaagggagcaaatacttgggactggccttcttgaactatttgtgcatggaaattatagtaatgttacataatggtgattctgaacaatttaatgccttctgatatctgttgacgaaatagaatagtagaacaatatttaaacttgggcaattaaaaaaagattagaaaaataaatgttcctctggtaaaactgaaaaactggaatcactaaaagatggatatataagaagaaatggcttaaaccaaaacacagtgaaaagacatagaaaacatgattctgagcaaaatacagattaagaaataccgcaaaagctatattgaacatccacccaacaatatttatcatgtattttacataattctcatatttagaaagtgctcctttttccagagttgactgtttcagcatttctcataaatctgtccccaacagtctattcaacaacctacaaaatgtgcctatttccctgtttgcacttgtaattttttttttttccaagacagagtcttgctctgtcactcaggctagagtgcagtgctgcgatcttggctcactgcaacttctgcctccctggttcaagtgattcttctgcctcagcctcctgagtagctggaattacaggagtgtgtcaccatgcccggctaatttttgtatttttagtagacacggggtttcaccatgtcggccaggctggtctcaaactcctgaccttgtgatacacccacctcataattttaaactgaatctttcttgtatcttcagtcccaggcaggtgctggagcaggagataggctcctacaagcttagcaacttctcatttctatgtaaactcaagtttggtcaggtctatattttcccacaaggactgctctgtggtctatcagaagccacctctcctcattgcttagctggactctggttttgcccagtaaaggctgtgctacaaaggagctaggtcagcctaggcaaatagagatggaggcacatctgagcacactgagaatcttcctgatacttctactgcactgatcgtgttcaaaagacagattcaaatgccatagcattgatgtttcttcatgttattccactagcctggagaaaagtgattttttttccaatgtttccaaccctatttccttatgctttgatgaggtgaaactgctttttttggggggcggagcgggggggctgcctctgttagatcaaggctacctagtttgggagaaagactgggaggttagttttatcaaaaaaaaaaaaaaactctcattcatccttcaagcctcatttgaaagagttcttcctctgattatctcacaatttcatatatgcatttatgctttaattctcacatcattgcattatagtttatctgtttgtctcattcgctggaccccaagctatgtgaaaatgggaccccataattcacctttgccaatctggtattatctgcaatggcgagtagatggcacatatagaaatttaaaaaaaaaaaaaaactttgtcaaatgaaaagaagaatatatgcataaatggataaatgggagtataaatgaacttacagttaagggatgatcatttttatttttatgtccaatcctttgttcttccacttatgttagaatttcactcatagtaagatggatttgctattaagattccagagagggcaaaaaatcagagtggctgaattcaacctggccggtttaaccttaaatcccagatctcctatggaaactcaagatgtatttccaagtcttctgctactagatgctcacttatgtagaagatttaacacttactgtgaccaaaaaag

SEQ ID NO: 1884599 - DNA, 4001 bp, Homo sapiens; identical to SEQ ID NO: 914979

SEQ ID NO: 1884600 - DNA, 4001 bp, Homo sapiens
cccagagtccctcctcaccccatccctgaaaaacggaccccaggaggccagctgagccgcgcagggagcagtgcgagagtccctcttccacgctgaggttcgcacatggccaggacaagcaggaggcaggcagctcccagcgcaggtgcaggggcagctccgcttctcatttcccttcaagatgcccacagaggcacatctctcccagtctgggcactacactcctgcagggaaagttcagaattccctcgggcttcctggaccctgagaaagttggcccagggtaggaggggagccttctcatcaccccctcctcctggccaccctgctggctcccgcacccccgactctgcacccccacccctaccaatgctcagtgccccaggcatgaacgcgttccaggacccccccccaccgcccgcctccaggggctcaatggggaagggggacctgactcatcctcccgctgagcagcgcaggcaccaggcaccacagcccgccaatttccagcttgcttgccgagcgccgtgattttccacttgcgccatctgattgctattagggctggggaaaagggaattcctggttccataagcccccagggggcccaggccgagtccggggtgggaagggggaggggtgccgcttgggcggtgctgaccacctctgccagttctgcactgcccctccatggagccctcgccctgctgccccccactgctctgtatcagcccctgagtaaattaaaacaacggggtggggactagcccctcctgggccagcctgccccgaaatgcccactgggggcagaccaaagacgccaggcaagtgtacagccggtgctccctctcctgggcagccctgccgagcagcagaatgtgagggagatgaacagctggactcgggctgcagtgctcgggccaacgtgacgtcaccaggcggagagatgagttcccggtggggctctggggggggctcctgagcggggcattccttcctgaagcctcatccccgctcagccctgctcagcccctcctcctactcccctccccctccccctcctgccgggccaggaattgggtttggggcgggttctgcttccaaagccatctcttccagcaggagagggctctactctgagctcctattttccaaggctccgggccgcgctcggcgctggcctgctgccccggcgggtccgccggccggaggcgggagtcacaggaagagccctccacaaaaggaggcctcggcggatcaggacagctgcaggtagctccaggggcccagggtccaggggagggtgttccaacaaccggggctgcagggtgagggccaggcagggaaggaaaatgacgcgggcactgtaggggcagagaggtggacgctgtcggggcaggcagctcccagaaatcctaaggccccaggcagggagccctgagaccccagagaggctgtcactcaccggagaagctcccctgccactcctgaggctccagggttccagggccatggaggaactttaaaagtccccctcccgtggcaggacctgacccctctcagctggcctcacccccagccccaccgtccagctcctgctctgtgctgctgggggtgagggctccctctcggtccctcccccagcctcactggccattcaagcatgcattctagaggggctggaacggaacacccagcaggcagtgtcccacacacagggagatggctccccctgctctcagccctggggtgcacatggggtgtccgtgtgggcagccacaggatgttgggcaactgcagtcccaccttctcccaggcctgcggcctgatgaagctgttggccttggatggaggcggctcctggaatgatctgcaaggtctcagtccccccagacaagcctcttcaatccaagctgttaagcaggggactccagacccggagtgaggaaaacagaggctctgtgtctgggggagcgagacaggcccctctgatggcggcacaagcggctaaggagaggggctgggacagccccagcggcgtcggggctgggtcatggtgggatggagtgaagggagaggaggagcttcctgcgggcaaggctgcaggaggctgacaggtggccaggccacccttgggcttgctccgaggggagggtcaggtgtgagctgtgctggcagctttttgggtcagcttcagtggaaactagttctgtcatagcagcccagatcccacccagaggaacacacatacacatgtactgacacgcacgccccatccacgtgtcacacacatgtcctttaatatggcccatctggggtctgctggcttctagatctttctgtgcatgcgtgaaatcgcttttcaggttgtccctggcaggacaaggacaaatgcacagggacacccacataatggagggacgcagatggtagagaggggagctgggggcccccactgcatgcccacctgcagcgtaggggggagcccagcccactgcctttggggcactagttggtgtggctggggtctagcctggccagggtgaatggatgaggctcctgtgagtcaggacatctctggaaacaaggctgggggcccagacctaggggtggtgggtgtccagaagggccaccaaaaagagtaggggcaatggagagagcttggggggctcttaccaggcgcccggaaggatgagggcaggtgataggtctggggttgcagggcaggaaagctcagacaggccccagagcgtggagaagttacggcctgtctgtggcaacgggacaatggcccaactggagtccaaggagggagacttaagatacaggtcgcagcaccagccatctgcaagcccactgcacacacatcacaatgcactggctcactccggcacacaaggtgcccccaccctgggacaccccgaagaccccaggctgagtcagccgtaggccaggcacaggtgctcacaaacgccctttgaaggcgcagagcggcgcggtctggcagcgcggggccgaggggagccaggccactgggtgggaagggtcctgggagcggcccctggggccacacttgcgccaccagctccgggaggcccagggttaaagagggggcgggccacacgcgcagacggccacctcttctagccaatggtgggcgcggaggccaggagtacggcccgcccccgggcgggaggagtgcgcggcgggcgggggcacgtggctggctgaggccgggcggacccgcgcggcgcagaggaaagaatttccggggagttgagctgagcaggatgcccagctctccccttgggagaggaggggcccggcagcctgcgacctgggctgtgcccagcaaggcccttctccgctcacagcctcagtttacccccccagtacagcagggaataataatagatgcttctctgcggggaaggggcacagggcttcacggggagaagcttcctccaaggggtgaagctcaggttgggggaccgggatcaattccagaggacccaaggcaggcagacccatgaggtctggccggccaaggtggaccagcctccagcagggtcaccccctaccccaggcctcccattggcagccctagggtgggtgcagcttcccctctctatgccagcagtccctccctacggcagctgctcgaaacacaaatctgcaaggctgcagggcatggtgtggctatgggtgtgcctttgggcaggtgacctcaccctctaagcccaggagcgcccatcaaaggggcatgaggatacctggcccatagctggtcatgaggaccaaaccagatgatgggtgtaggcgggctggcagggtaagtggtggtgacagtgatgctgatgaccgggctgtcctgcctcccaggcacatgtaggggaaaggccagatgccttagcatgttacaaaccgcggctcagccaaagccctcctcctccagcaggttccccctgccaggaatgatccctcttcccctgctcctcctt

SEQ ID NO: 1884601 - DNA, 4001 bp, Homo sapiens
ctcccactgcccctggttgggctcggaggacaggccaccatcaccgtgtgcccggccatggcaaggcacaggagccaaggcccgagccgcactccccaacccctgactaggggcaatgacaagcacaaagaaggtgccgggggatgctcagccatgaggcagggggctcacgggggtcggaggaagctgcagggggttgcaggcccctgagaaggagcaaaaccttgaagtagggtgggacctgggtcaggggagaggtattcagggctgtctgggcaggggacacagcccaggcaaagatgtgacagggagggctccaggtgtgtgttggcggcttgatggctctctctctgtctgtctctctctctctcacacacacacagtctgtctcatctctgtttctctgtgtctatctctgtctctatctctctgtagctctctgtctctgtctctctgtctctgtctctcaatgtctgtctacatctctgtctctccctgtctctctgtctctctctatctctcttctctctcccgtgtctctcaccgctgacgccgccactgctgagcctggtcctgatgcatctcccaggactaagaacatgacccatgtggatcctgggggaggagggatggctggaaagggaagggctgctctgagaccctctgcctttcagcgcagcttccggtggccaatctctctcgcactctgagaacatcctcgggactctcagcctcgctccttgcaagtggccacttgtatctgcccctccccttgtgttagtggctcctggagaggccccctggccctgccaccatcaccaaagcccctctcttggcttgaggcttcagagcagcctcctgagtgcaccgccggcagcatgagccccgggattcagcttctgcttaggccaggagtgcacagggaaggctgggggctccctccagctcctcacaccgcatcttccctcctccctcctcctcagaccacctgcagcctctgcctttgggcacctccctggacacctccagagaccctccggggaggggacttcgccagcaggctggtctaggctcaccaggtgggagccccatgagggtccaccgtggagaagctcccacctctgggggaagaggaaggcgccacacgtgggttccccatgcacgttccctctgtctgcagacccttgtctggcacacggtggagggtgcagcatcaccctcaccacatccatgagggacatggacatcttttcagcaagttagtccaccctgccaggagcccagggcctgccctcaggtatggggaggcattaggcacgcctgacctgaggtgcagagggctgagacccggctgaggtcccgccgctgggaagggtggtccaggggctgcacccagagggcacctgcagggccatggatgccactccctgtgcccccagcgggggcacaaaagactcctgaggaccatgtctgtctccatcttgcaggtccctcgccagcaccctctgagccggccaggatgtttgggctgttcggcctctggagaaccttcgacagtgtggtcttctacctgacgctgatcgtgggcctcgggggaccggtaggtaacgggctggtgctctggaacctcggcttccgcatcaagaagggccccttctccatctacctgctgcacctggccgccgccgacttcctgttcctctcctgccgtgtgggcttctccgtggctcaggctgccctgggcgcccaggacacactctacttcgtgctcaccttcctgtggttcgcggtggggctctggctgctggcggccttcagcgtggagcgctgcctctccgacctcttccccgcctgctaccagggctgccggcccagacacgcctcggccgtcctctgcgccctggtgtggaccccgaccctgccggccgtgccgctgcccgccaacgcctgcggcctgctgcgcaacagcgcgtgccccctggtctgcccgcgctaccacgtggccagcgtcacctggttcctggtgctggcccgcgtcgcctggacggctggcgtggtcctctttgtctgggtgacctgctgctccactcgcccgcggcccaggctctacggcatcgtcctgggcgcgctgctcctgctcttcttctgtggcctgccctcggtcttctactggagcctgcagcccctgctgaacttcctgctgcccgtgttttccccgctggccacgctgctggcctgcgtcaacagcagctccaagcccctcatctactcggggttgggccgacagcccgggaagcgggagccgctgaggtcggtactgcggagggccctgggggagggcgccgagctgggtgccaggggacagtccctgcccatgggtctcctataagtgggcttgccccgcccacagggcctgccaggaggtgcccacccccaccgaccctcgctcaccccacacccagatgctttcaggaccaggaggagccccgcccaccacctagctcttaccctgagcacccaagggctggacacagctggagagacttggccctgaccaccccccagccaggcctgctgaggatgagggaggcagaaaatggagctggagagaggtcaggcaaggagagagaaaggagaagcctcctgaataggggtgaggacaggcaccacgcccccaggcccagcccagatccccttacccggcccctccccaccctgctgcacctgagtcacaggggagaaaactgcacaataaaacagagccagccaccagcccacagtggccggattggaacccaggcttccggactcctgggctaggtgggcgccgtccatgccacctgctggctgaggctctgattcgccccctacagagttgaggtggaactactccttactccccgccctgctcagccatcattgtcctgcccaccccgcggggaccacacccagggctctgtccccctctctgaggcccaggactggcaggtgcctgatgtcaccagcagaggccaccaggtggtgctgcttctgcacagaacagacccagccccgtgggccggcggatgcaggagcctccatcccctcggtcccctcccatcccctcccacactggtccccacccggcctctcctgcgtccccagggccatccgctctctgcgggttgctcccgtctcccacctctgctctcaccctccctcctcagccctggatcatctggagcttttgccccaagtgtttgctttggagagagagagagagagacagagagagagagagagacagagagagagagaaagagagagagagaaaagaaaagaaggaaagaaggaaggaaggaaaaagaaagaaagaaagaaagaaagaaagaaagaaagaaagaaagaaagaaaggaaggaagaaaggaaggaaaaagaaagaaagaaagcaagaaagcaagaaagcaagaaagcaagaaagaaagaaagagaagagaagagaagagagaaggggaggggaggggaggagggagggaggaaggaagcgaggaaggaaggaaggaaggaaggggatccaagtttccaaagtgcaaaccatttgatgtgttttctgaccatgaaataaaatactttctggtcatttttaaaacattcaagccctacggaaaatactaaaaagagaaatcgccaaaatttttttccacccaaatggggacatttttgatgaaaagcactccagttatgtatttttttaaataaagacctgcagaaattttcttttttgcccaaatgaaggcattcaatgggtgctcttggtgccgggtgggacattctgcagctgcctttgcataaagttgttctttttccactagaaaagtaaaacgttgctcgtttatggaaactttgaagaaggttaacaactggaaagaagaaaagcttacatgtagtcccccaacccagaggcacgcacctttgctggtttttcttccttccccgggatgaatgtgttctggccacgcca

SEQ ID NO: 1884602 - DNA, 4001 bp, Homo sapiens; identical to SEQ ID NO: 914989

SEQ ID NO: 1884603 - DNA, 4001 bp, Homo sapiens
caccctcggtcctgttgtccatctcccccgtcgcccgccacccacgccgtccccactgccttaggctggctgcccctttggacaggggctttgtctacccaagtcacaggacacgtgaaattcagccttaattaagttgttgggtgatggagtcccagatgtgggaggctcagccagaccctcttgggctgcccacccggagagcgactggggctgagagcctcgcctggggccactgtgcagctgccgcctcccgcctcccacctcccgcaaaggcctgggagtggggcccaaggcagctgcagccccacagcctggccttgaccctgggctgccccacagcccccctgctggctccgtgcccactgggaaaacaagctccttatctcgaatgcttcctgtgaactgcaaacagccacgtgtcccttgggagccactcttgatgaacgtgccctctgtcccacgacccagggtgaggccgttcaccctcgggctgggggccaccgggactggaggctctaggcctggaatgaggggaggggacctgcggcagggcagagccaggctggagaccactgcattgggagggtgaggagggagaggagggggcaggagggtttgggtccaaggcctggttgcacaggacagctggggatgggggagaggggcacaggccagaaaggctggggctgcgggggctagctaagaggcgagggttctgggtggcagcagcaggcagggaccttcccggcggccccagtggctccctccctcccagaaccctttctccttccttgggcctagagcttcctccacgtacttttccccgcccccgcctttcccctctctctcaccccgctcaaacatgctgtgacctttccagggcccctggacatcactcactgggtgacagaggttgacaggcatggagctaaggaatgggaggcagggcgggggcggccaagcctctccagccgctcccttcccgcttgccccacagacgggcctccctggatggtcctgggtcagcacacacgctcccaggcgcttccttccccaggagacagtccccagcccctggcggcccagatcctcctgctcaggccgacgcatcccacctgggccccagaaacctctttggaaagggacagtcacctcagagtggcaagcacttaaaagagacccccaacaggccggtgtgtcgtggtggcaggcagggtgtgtctggagagaagggggacgtgtccccagctgggcctgggggcggctccgtgggaaagtcccacctggtcccagccccgggtctccagccttcagactccttgggggtctctgtggcctggcagaggtcggtggcccctcagtggaggtgaggcctctcctgggtcaccaccgcacaccggcctgctgggaagctggggttctgggccacagccggccctggacgtggaggggggcatcaggccagaccccccaggggctcacagggctctgggaggccctggcaaccccagggtgcccccaagccctcagaagggttgtccctacttggaggggaccacacagccaggtgggcaggaacaggcaccacggcggcccttccctgtccaccctctcaccagtggcccgcagtgcagtccaggaagcaccggacagagcacggggcagggaggggaggcccgtactggcttcacagaggtctgggaggggctagcccctgtgcagacagacccctgaagcctagagccgccggcccagctgaggtccttcccaggggccattctgggacccctgaccccatgcacctgtgtcacagggctatgagcgcccccagccccaggacctccacgtttctctctagagggaagaggaggaggacggcaggcctgctggccccacacttactggttggggacgctcagagggggcagccgccatgccgggaagttagggtgggcagaggagcagcggtgccaggacccccaggccatgctgccaccccggaccctgaacagtgggctagtgtgtgggcctggggagtgagggcccaggccgggctgggtctcgctccataaaccctggctggccggagctgcagacatcactgttgacacaggggtgatgtcactgccggccaatggggagaccctcgggggccctacgtgtgcctctctgtgctcccagggcccccgccacgcacgccgcctgctctgaatgctgcctgcataaaccggtttttctaaatgtctttggggccctgcttgccccctgggccccatctcctgctcatcccaccccacccttgggcccagcctatgagccaagcgggagtggggagtggcggagagccctgggcctgcccgctcccacaggcatgtgggccccagagccctgacccctgcaccttcacctcgccagcctctctcccatctgccacgaccccagctgccaccatggctccccacagtcacccctgggccgtctcttcctcctgtcgggagaatgttcctcctgggagagcctgaggccccctctctgctccttgctcccccgtctgtctcccctgccctgccttgcagccctgccctgggtccatatgctcagagctggctacatatcctgtggctgcccatgacacatagctcccccaggcagggccggaccccgggcacctctttgcctccagggccggccccactctgttggaggtcagccggttccgaggcctccaagccgcctttctacttctcgattccagggcctggtctccactccctctgggctttggggtgcatgctgcagtgcagcctccccgcgccccggcctccatgcaccctgctcgtgctgcctcagaggcttggcatctcccccatcttccagccaggcagccagttttctgcaacgtggggcccacggtcagcgtcccccacagccctgccagcccttctccccgggggtccgccctgcacccccttcccaggagcttgctctgcacccactgctgggcctcctggcctaggggcttggcacgtgcctgtgagcagaggcgctgggcaggaggaggaggaggagcctgcagtgcctggcgcccgtgtgtgtttactggtccggccccagccccgcgccgctccccgcggacccggcctcccgcctgtgtccagccaggtgttgggtgatggagcggggctccctaaggacaaggagcacagtgtctgctttctttgcaagcacagtgctgacaaggaacagaatacccacagcgactgcttccaggaaacggctgcagggcgggcgggagcctctgcgagagcagccccttcccagcaagccggcctgcaggtgggcttccaggaaggggcccccgctggcttccctcagccctggaagggggccaacggtgtcaccaggagcaggccagggagcggggtagaggggggagaaagagaaaggagaggcgcggaggagggaaggagggacggggcgcaggcctatgctatgcctagtgtggttaccacagccttaagggagagcaaggctgaccacagctccttctcgaaccttccaatcccccttttgagaagtcacaagatctccactcaggtctttggctctctggggcttgtcaggcatcacacacacacacacacacacacacacacacacacacacccgtgcacacccatctgaaaacacaagcaagctgggccactgggggagaccattccctgagacccagccggggtccaggttgaggggctgacctcctggcccccatgttgggagggccgaggagggcccccgcccggacccactgcgcccttggctctgagtgctcagatcccacccccatctctagagaggaggaaatcatttatcttcctgggagctcggggtcggggagagggggctgccctccttgagtccccgactgttttctttgagacttcccagggtgcattgtagtcagacccaaaacatcgctttgtccctgttgaagggac

SEQ ID NO: 1884604 - DNA, 4001 bp, Homo sapiens
tgggcaaggtggctcacgcctgtaatcccagcaccttggaggctgaggcaggaggatcatctaaggtcaggagttcaacaccagcctggccaacatggcgaaaccccatctctactgaaaatacaaaaattagccgggcatggtggtgcatgcctgtaatcccagctacttgggaggctgaggcaggagaattgcttgaacccaggaggtggaggttgcagtgagctaagatcgcaccattgcactccagcctcggtgacagagcgacgagactctctcaaacaaaacaaaacaaaacaaattcctgcatggccatctgtccaacaactgcctgtccaatcttgaactggcaccacccatgttattcatccttgtagccaaggataactgtctcaaaacaattatgtaatactcatttttcctttcctttatttatttttattatttttttagatagagtctcactctgtcacctaggctggagtgcagtggtgtgatctcggctcactgcaacctccgcctcccaagttcaagcaagtctcctacctcagcctcccaagtagctgggactacaggcacacgccatcacacccggctaatttttgtattttttctagagacgggtttcaccatgttggccaggcttgtctcaaactcctgactccaggtgatctacgcgccttggcctcccaaagtgctgggattacaggcgtgagccaccgtgcctggcccatttttctgttaaaaacctttgtcttcttttacctccctgataagcacatagtctatacccattcccgaataaatatccttttcttttagagtctgttatttaggttgacataagatagcaccagtctttggttttccatggtgcagggtacagatgggatggaaaggaggctcaggtactctgaatggtctgcctctcaggatttctgtgggatgcaaaagagtatatgtacacttctgaaaagtcaatcaagcctttagaaacttaaggcttaactttctgtctcggttttagaaatagatattattatattggcagcgtggccttgtttgtacctccatgattgcctggctggccttgctaacctaatcacatctgtgacgggatatagtgatgtttaatcttatgattgccttaagaattaaggcaatcagacgggttcggcggctcatgcctgtaatcccagcactttgggaggccgaggcgggcggatcacgaggtcagaagatccagtccatcctggctaacaaggtgaaaccccgtctctactaaaaatacaaaaaattagccgggcatggtggcgggagcctgtagtcccagctactcgggaggctgaggcaggaggatggcgtgaatctgggaggcggagcttgcagtgggccgagatcgcgccactgccctccagcctgggcgacagagcgagactccgtctcaaaaaaaaaaaaaaaaagaattaaggcaatcataattccccacgcacactcatatgctaggaccccgccccttacctgaaacgttgtggcttatatagacactgccaggcactgtgttaagtgctcccaaagagcaccccagtctaccattttccctctcgattctatatgtacactcgggacaagttctcctgatcgaaaacggcaaaactaaggccccaagtaggaatgccttagttttcggggttaacaatgattaacactgagcctcacacccacgcgatgccctcagctcctcgctcagcgctctcaccaacagccgtagcccgcagccccgctggacaccggttctccatccccgcagcgtagcccggaacatggtagctgccatctttacctgctacgccagccttctgtgcgcgcaactgtctggtcccgccccgtcctgcgcgagctgcctgcccaggcaggttcgccggtgcgagcgtaaaggggcggagctaggactgccttgggcggtacaaatagcagggaaccgcgcggtcgctcagcagtgacgtgacacgcagcccacggtctgtactgacgcgccctcgcttcttcctctttctcgactccatcttcgcggtagctgggaccgccgttcaggtaagaatggggccttggctggatccgaagggcttgtagcaggttggctgcggggtcagaaggcgcggggggaaccgaagaacggggcctgctccgtggccctgctccagtccctatccgaactccttgggaggcctggccttccccacgtgagccgccgcgaccaccatcccgtcgcgatcgtttctggaccgctttccactcccaaatctcctttatcccagagcatttcttggcttctcttacaagccgtcttttctttactcagtcgccaatatgcagctctttgtccgcgcccaggagctacacaccttcgaggtgaccggccaggaaacggtcgcccagatcaaggtaaggctgcttggtgcgccctgggttccattttcttgtgctcttcactctcgcggcccgagggaacgcttacgagccttatctttccctgtaggctcatgtagcctcactggagggcattgccccggaagatcaagtcgtgctcctggcaggcgcgcccctggaggatgaggccactctgggccagtgcggggtggaggccctgactaccctggaagtagcaggccgcatgcttggaggtgagtgagagaggaatgttctttgaagtaccggtaagcgtctagtgagtgtggggtgcatagtcctgacagctgagtgtcacacctatggtaatagagtacttctcactgtcttcagttcagagtgattcttcctgtttacatccctcatgttgaacacagacgtccatgggagactgagccagagtgtagttgtatttcagtcacatcacgagatcctagtctggttatcagcttccacactaaaattaggtcagaccagggcccccaaagtgctctataaaattagaagctggaagatcctgaaatgaaacttaagatttcaaggtcaaatatctgcaactttgttctcattacctattgggcgcagcttctctttaaaggcttgaattgagaaaagaggggttctgctgggtggcaccttcttgctcttacctgctggtgccttcctttcccactacaggtaaagtccatggttccctggcccgtgctggaaaagtgagaggtcagactcctaaggtgagtgagagtattagtggtcatggtgttaggactttttttcctttcacagctaaaccaagtccctgggctcttactcggtttgccttctccctccctggagatgagcctgagggaagggatgctaggtgtggaagacaggaaccagggcctgattaaccttcccttctccaggtggccaaacaggagaagaagaagaagaagacaggtcgggctaagcggcggatgcagtacaaccggcgctttgtcaacgttgtgcccacctttggcaagaagaagggccccaatgccaactcttaagtcttttgtaattctggctttctctaataaaaaagccacttagttcagtcatcgcattgtttcatctttacttgcaaggcctcagggagaggtgtgcttctcgggttggtggtatgtcccctaggagaacagtgaggcagaaaaggcagaagcctttggtatggggggaagaaatggtaaactacaagagaaatttcctgtgaagaaacagctacagatcctggggggcttcagatgtaaaattggggttattccctatcctaagtaacttgatcagtccccccaggtcattctttttcatcttctaaacagagaaggtagcaggaatcactgtggtgagaggtttgttatggaggcagcaatagaagggatgggtgggggaagaggtttgtatagaaggtgaacctggccgttccctgaacttggtaccagctgtggccttagagtccagggcaggaatctggtctgccttggttttagaagtaaatattatgttgg

SEQ ID NO: 1884605 - DNA, 4001 bp, Homo sapiens; identical to SEQ ID NO: 914995

SEQ ID NO: 1884606 - DNA, 4001 bp, Homo sapiens
cgaacaatgctgaggtttaggcttctaatgatccaggtcacccaagtggtgaacatagtacccaatagtagttttttctacccttttggaatccccagtgtttattgttcccaactttgtgtctgtgtactcaacgtttagctcctacttataagtgagaacatgcggtatttggtttcctgtttctgcattattttgcttaggacaatggcctccagctgtattcatgttgctgcaaaagatatgatctagtcctttttgtggttgtatagtattccatggcgtatatgtaccacactttctttatccaatccactattgataagcacctgggttgattccatgtctttgctattccataatattttatagttttcagtatacatgtctttctcatctttggtcaaatttgtcccaaatttgctgcttttttttttttttttttttttgctgataagagatatttaaaaattttccatttctaattgttcattgctagtatatagaaatacaactgatttttgtatatttgattttgtatcttgcaacttttgtaaactcacttatgagttctagcagcttttttgtagtattccacaattttcttatgcaaataaatgcagtgctacaacttcctttccaacttggatgccttttatatatttgtctttttttatttcattgaccagaacttccaatacaatgtttaattgaaggcaatttttacagagtaatatttctaactcccaggcccggattaggctgaactatggaatcttgttgaatttgatatcttttggaatttattaaatcattatttatacttcatttttaagctttttccttttccagtgttcaaatattcatcaaatgttcaaatattgaacaagtaccatgctggctgtcagggaaataatggtgcacaaacaggcatggacctagcgctaatgaagtcttaccgtactaccgaggcagtttaaaacaggaattaaaaacacaggttcagggttctgtctgcttgggtttgaatctggctctgctccttaatggttgtttgaccttggaaaagttaatcgacttttctaagcctgtgtcttagtgaaggtattaataatacctactcacaggattgctgtgaagattaaacgaattaatacctttaaagtccttaaaatacggtttgacatatagtaaatggtcaaagagtattattattagagggaagaattagctcttcacaaggtgaatctacaagtgactggtgaaggaggggtgtacaaacaagaaacataaaaaccagtttaactgctaagcatagaggcagcagtgtcagctgtacctgggttaaaatccttgctctgctgtttattgtctaggcaactttgaccagacgacttaaacaagagcaatgcccgtaaagtgcctagtgcagtatttggcacacaacagatgcttaaaagacagcaattactgattcagacgtcccgcagagcagtaatatcactaacatgtgctcatcatcatatctatcatttatcaaagctcaggattttgaaccttgtaattacttttcatacattctcttatgcttaacaactcggctaggtgaacacaatccattgcctcataaagaaacaagatgacctttgtgtatctatcatcagtggggaggctggaggtctgggaagtggtaccttggagcccaactgttgaccaaaccagggctctcagtgcggccttggtcgccagcggggcgctccactttccgctccggagatggcaccaggagagatgggagtctgccaggctgtttccatggccacctcatgaagcccctgctccgggagcgtgacaggcgagactctccttcgccgccacctctcgtctcagatgaccatctgggctcgaaagccctcaggagctgcggagcgcgggtcggtaggggcgctgcagaggaaggttgggcgccgtctcccggcaacgcgcggggggcggggctttgcgtcacagaggtgcgaccgggtcccggcctgagtcgcggccacccgcaggtctgagctgtgggctgaggcagcgcagccgctgccgcagggtgcgcgatgccttgaacctggggtgagctccgcggcgctgtcctttcgtgtttcccttgctagctgctccaggactctgggtctgggaagagaaaccccagagggccctccgctgccgagccaggcttccgcggggagacaggcctagccccgccgccctccccgggcctcggattggggcgtggggacggctggggaggccattctattgacgcccgtcttctgcccggcgggttccagttgcccggggtggcggtggcttgtcccgcctcggggtggttctgagggacccggagagagtttttccttctctatcccaaaacggttgtttgaatattgccgccggctcagtcattcggccgccggacttagctgttggttaaatgtccaggtgcgcttgaggaggggctgaggcggcgtagccagagcgagcgctagggtggcccgcgggctcggtctccgccgggctggacacccaaataagaaaccttttgcctgggacgatagctcagaaatagccacgtcgatctacttagccagccccacacttatgaattggcttaggctgctacccttcccaaaggtctttccttgtcaaactagctgctaccttgagacccggctaagaaaagaacgttttcttgctaataataagaaggtagtgattacacagcaggagcagaaggcttctgtgttagcttttgaaattattccttcagttatttgtctcggcgttacaaaatgtggatttacgattgttattgaaatcgatccctatgccccttattaaaggtagtgtaccttttatattctgacactgtcctatttagcggtgccagctaattcagttcttgcctctggcatatatataaagctgctggaacactttcaattgtttataattcttacatcttcagcacgaatttattcgttttcactcccttctgcccattcttcttgctataaaatgacctctacccattcagaattttgtctgggggcatgagctgccaccggccgacgatcctaaattagtcacctccatgtcgaagtcacccgtctgagaagtgatgctttctgaattcagagctcaaaaatagtatggatttttatccttttctttcacattgcctgacttcagtttctagaactttttctcaagaatatgactatatgtttcaaaaattaatatttgtcatttggtgtaaatgaactttatattcgatgtgtgtagcctgatccttcttggttcccatctaaatacaaacacgctttccttcccaaaaaggcaagggaggtccagagagaattcttacaagtctaatatgctttttccaatatgaaatgcatttagtaaacacactgttactgtgagaaatccatattcttaatctcctagtacggcactctatccttttgtagtttctctctccttctctctctaatatatatgtatgtatctttttctgatcaagatctttgattctggaacaggcattctggactctatagtgactctggcctaattatttcactatgtatctatattaacttgtcttgaaaaaaaaaagttgatatctgtttacagatctacagtttgagtaaacaatgagtaataaagtaaataatatccttagggacccagtcagtagtacttggtatttattactgatgttaaagttgacttgacagtgaaaatcattgatgtttatttcaattaaatccttttaggtgaggttgatacaaaatttgatggagaactggtttcagagaggtttttaaaatactacagtgcagtacttgtcatttagtcattttggtgcattttcagccttttccattttgctttagttattttatgaatgaattatggtttaaatttttaggagtttttgagcagttttttcg

SEQ ID NO: 1884607 - DNA, 4001 bp, Homo sapiens; identical to SEQ ID NO: 915003

SEQ ID NO: 1884608 - DNA, 4001 bp, Homo sapiens; identical to SEQ ID NO: 915004

SEQ ID NO: 1884609 - DNA, 4001 bp, Homo sapiens
aattcctggtaaattacatttcttcctaaatcgttaaggtattcttagttctcttgatgtgtattagtatggtgaagaaaaatctttggtgaatttgatagataactctcttcaaatgatttcaaggactaacagaccaaagattagacttttgtatgtagtcatgcatagcagaatgaggagcaatatgcaaaagtcagaaaaaaaagtggatgagatttgggtttcctaataattggaagtgcttggcaatggaacaagttaccctttgaagtaacgaggtccctgtcatcactggaagtatgtaagcattctaaagccaagattctacattaggatatttcattccctgttgtcaccaggcacaaagtgtttcctttctgccaccacccactgtagtaaggattgattgattgattgtctttacaatacttgagatttataggactgtctagagagggcagagatcaaactgtcacgactttgagcacccaaggccacctgcatgtcagaaatacatagtagttttgtcacttgtgagatacttactcaacacaggtttcagtgagtgtaatagagcctttgcattactagaatgtggacaattctctgacttaaagataatttcaacattctaccagagagttctctgccagtggaagagggggcatttatgtcattccttgtagtctgatggcacatttttggccacgagcaggggagatgacatagaatagcatttctgtgtgtctgtcacagagacacagttcccacccagtgtgtctggtctaatgtcttgtgaaccaagcaagatttccatgtatgtcactggataagtaagctctctggcttcaaaagatacatctttccagttgcgttttctattgtggataaatctctgaagacatttttcctaggccccctccagatctaaattcatgctcttgattctatgtattgtgctcagaggtcaagaaaccaaatcccttagagttgagctgtcataaactgtgtgcctgctttatgcctggggccgcagagacagagatgatgaagacaaccatcttcctgggccagggcagttttctagttagtctatctattgaaagaaagggaagcaagatcttggcccagtgtcatgtgaataggcctgtagaaaattattactcatggctctttggctcagatggagtcagagtctcagctgcagcttagaatttgaagacggcagcctgtgatgcactagtgtctaggcccactttatggctgacctttccctgaagtaccgttagccatttcagtaggaatggctgtgcttccttccccaggaattctcaccaactcctctgccctacccttctttaacagtccggtgccccttggcactgggtgttcaacctacacaaccctttgtctcttcacagactctttggtgggaagcctaccaagcaagtgcccatcgccacagctgaaaacatgaaaaattcggtggtcatctccaatcctcatgccaccatgactcagcaaggtaacctagactccccgtcaggcagtggcgtcctgagcagtgggagcagcagtcctctctacagcaagaatgtggacctcaaccagtctccgctagcctccagccccagctcagcccactcggccccttccaacagcctcacctggggcaccaacgccagcagctcctccgcagttagcaaggatggcctgggctttcagtctgtcagcagcctccacaccagctgtgagtccatcgacatctccctcagcagtggaggggtccccagccacaattcttccactggcctcatcgcctcctccaaggacgactccttgactccctttgtcagaactaacagtgtgaagaccacactgtcagaaaggttggtgctgtgcctctggctgcctttctcagaaagacacccttccaaaaataaaaagattagcttaggaatcccaaatgtcgaatagcctttgcctgtaagatttctctctttctaattactgctgtctttcatggggaagccacttcaggatggaatcaagcttggctctgctccctgttatcttttcctctgtggttatttttggtgcttggagctgctcagtctctcgggggcagatttatgctaccatttgaaatggcattcagcttttgaaatccttcagttttatcctgtttgttcatcaacagcttcttttccctccccttgtaattgtgcaagcagagcaggtgactgggtgcagacatggagtgtttagtaggatgctctttagacagctgggtaggtttgttgtcattgtggcaaacaccctcctcctggactgataggaaatcaagaaattaaaagtgttctcagagccctggatttctctgcagcagggataaatgtgtccagtttctgcatatagggaagaaagcgaggatcagcatggggaatgaaaaaaatgtatataacaacacctctcctttcttccaagctaacgttccttctcttgttttctacctgcctggacttctagccctctctcttcccctgctgctagccctaagttctgcagaagtactctgcccaggaaacaggacaggtaatgacattgcaggccggggaccaaccgagcctctaggttcttctgcccattcgttgtcaagccagatgtcttgtgcgaggctgttggcctaagccacctgcttgtgtttgtggctctagtgtactctgtgacacatggacatgccagtgagagtctgttcctctgtctgctaaagcccagggagaggtggagttgggctggcctcttcattcccattttgggaaggcgaccttaaaccctgccacttgatctggggcagcggaagctctcgcttgcatctcttgtggcctcctgtggcatgttcctgcttttcagcttccttcccattccttttgccacccccaaccccaagcccagaaatgacctgccacccactgtgtagcttggccctcacctttgtctacccctccccatgcagctgcctcttctccctttcaaaatcctttgctgaagtttggctcattatgtcttgcagactgttgtgttctgtgtgcccatttcctgcgatgataatgaaaaagaatgtgtagagtattaagactttacaaatgtacacgcttgtgtttgcccccagctgtaggtgggcctcagagatggatactgtccttaattttgtgggggagtgatgacctggccaaacataacaaacagatgttgtctcctgccagaaaaaaaaaaaaaaaaaaaccttcaccccatcaacagtgaaaactttgtttttgtcagctcacaaaccaagcctttaaaccgttggtctttagaaatccaagtgctttgacttcatcagccagcaagttgtaacatgccccacccaggactcagctcctagctatgcctgggccgcagaaattgagagggacctggaattcacttcgttacagatgaattccaaatatgcagactgctggcctcttgaaacctccaacaagtctgttctcccatttgaagtcattgccagtggcatttagggggtgggccagagttaggggtgcagggaagtgggcatccctctctctgagaagccgtgttggtgcagagagtgcccctgggcagtagaaggcacaggacctctgctttgaggtggagcaacccctgaattttgctttgaatctgtggaaaacgaggaacaattggggttaagggactcaggcctcctggtgacctggggtaaagtatgcgctggtgtcagctcaggctgaggattgggtttcttttgttttccacggatgtggatgtgttgcattgcacgcctagctggataaggcacttcctggtgatgtgcacctctttctccagggcccttcagtcccctccctagctttccctctctctgccttctgtgtgctgctctgaagttcttatttttgttttaactttcctacagtgacccgcaccttgat

SEQ ID NO: 1884610 - DNA, 4001 bp, Homo sapiens
tacatagagaggtcacaagacagtaaatgagctcaaggacttgttggtgcccgacatacgccagatcccacttgccttcctcaaggatggctgtgccgcttggaagccaccacacagcctccctcttctgcagaacagcaagaaggtgggagacaggctcaaaatgaagccacattgcacccctcacaaggcattcgcctccctccatcgtctccaagcccaccactggaggaggagcccactgccttattctttttgatagagagaggagtggtccagggagcatctgcttctgtgtttacaggagtgtggcctccagaggtttctgattttcagcgataaacagcttagaggatgaggccccacaccttcaagaggctcatagtgtcagcagtaaggggccagcaacagtgaccccgccttcttccctcctcaccagccgggggtatccagagtgcccctggcccctgctggaacccatgaggccctcctgagcctcctcaccactggagtgccactggtgtgtgtccagccttcagatggtcactgtcacccccactggcaccttgtggccagcatttgaagtgttgggcatgcctttcttcactgtgatacaatttttctgcataggagaaaaatcatgacacttctgaataagggagttgctgtgttattctgtagaagagaacatgctctgtccaagctgttatttcacgtctgttcttaagaattgtcactttaattccccaatgtcaacagaatcctgatggcatggctgcctagagctcagcgtcctccatataccagccccaacctacctccggggtcttacttgcagttattattattgggaataatgatggctgttgattaaaatgatcatatcatccacagttgaggactcacaaggcatgaggccatctcctaagcactcgactcattatctcactgggttctcattggagaattcatccagaggaagcaggtgttaggtcccattttgcagtgagaagtctgcagccaggagagggtacctcacttgtccctgggctcctagacttcaaagctgaagcttgtgctgctctgttgaccatcactccacacccaaggcccccatctcctccacacgaactcccttctccagtgaaaaccgcctcctgcccggtcctcctgtgtgcctttcacatgccttccccatgcttgtcaggctgttcccttgaccaggaaagccttggggagcagcaaggtgaaatggatggggcacaggctctggagtcaggaacagtgcatccctcctgttccacttcccagctcccaaactatttaagctttctgggcctcagtttccctacctggaaaatgggaagatgtcatgtcatcattgatttggtgaggcaacatacacaaaacatctgggtggtggcactggctcacctgttgaagttctgcctgaagctggaggcccagttctgcttcctctagagcgaggccttctctgactaactcagtctggtgacatttcttcttcttccgagccactcttcttctttctcctctaggaagtccatgtgccatgagggcaagggcccccacattgacttaatgccatcgtttgcacattgcaagagcttgatcaaggtttgcaaagcaattgctcttcaggactcgtcaccatctgcaccccaccttcttctccagcatcctcactctctataccccagtgtcttcactcttcacctcccatcgcccactctgagcctcctgtatctgactccctgtgtccccagacactgaagttctctcttacctcctggcctctctgtttataatgccttccttcacttctttccctgggtagcttctggtcttcctttaagatttagcccaggtgttttctcctccttcaggaagtcttccagatactccaggctggttagatactcctcctctctgttcccacagcctctgacttctctcttagcacttgtcaacctgtatttgtcctgtttgttcacctctctatctcccctggtaggatatgatcccctgagggtagggaccctgttgttgtcatctctggagccctggcatttgacatggtggccacgaccaagccagtatttgttgagtagatggatgactggaggaatgagcacctagctgaaaaattctgcacatctgccacttggagtatctgctggttgggttatgcaacgtctgtgtgtgtgatgtcacttggccacctttacctttgcatccaagagactgtgctagcttgtcagggaatgggacacagtactacagagctgtgtgtaaatctgcatgtgcgtttcgtgcctccagttcaaaccttgttcattagcacagcaattaacagcagagcctaatgacagatggcccggctctgcacctgaacccctggctccttggcaggcttggagcagggcaggcacgtctggcatggttgatgttttcattgatctagtgagttcagctcccagggctgccggctatggagacagtgagctgacgtcagtactggctttggtggggggctgggcctaaaagggccaggcttgtaacagactcttggaaagcttgcagaagtttggggactttattgtttttatctttttttaagatattaatttcacattgggaagtcccagcaccccactctcaaattttcctaagctctaaggacttccctaggagatggtgtctctttcctgctaattctttacaagcttctaggctttctacaattgttatttaggattgtgatatccaggccctttgacttcagctaacagacacagcttcgtgtttagagtggcatataagatcagtgttgtgtaaacacaattatatttagcaagtttggagatgtggggtttttttcttcctgttaatcccgggtttgaaatggcttcctagttattaccctgtgaatgtcattcatttctccataaaagaaatatcaaatttgtgttcaaatagttgtctgggtcataaattcaagctaaagtgcagtgtgtcctaagccatagcagatttcacagaactggagttcattagagctagaaaggatcttactgtccaacctgtgtcattgacagatggggaaactgggccccagagaggtgcactgatttgcccaaggacacatggcaagtaggtggcagagctgaagccacgtgttggtctccagtggcccctttcctacaccatgtttcagatcatcagaaatgctcaggctttgctgtgtgccaatcccaaaccactctagaatgaatttcttaagtggtgttggatatgcttccttgagcctgccaccaaacttggtctgagtgaaatagaagagggggtgcaggcagaggaagtgaggactgcggtctgtcgttagtgatgtggaaaccacgcatcttctttacgaaggtgttgacaagtctgtgtgcccagggagccacgcaggggaagaaggttagaaggctgggtagtccctgaggtaggaagcaacttcagcgagaacctgcccatctttgcaaagtgggcacttctctcagtgagggggttgcaggcaaaactgcggggatagtcttgttcccacagaagaagtggttggagaaatacctatcacatcgtggaacagtgccctcattctgcattttcttatctaggagacaaaaaatgcctcctggagataacctacctgccctcccttcctttgaggaagtttaacctttctccctcattgatatggaatcccaggtatttatctgatgacctgctgagattggtagttcagaaaaaccagtcttcaggcttaggggaagctggacgtgtatcctagggtggaggcccaggtctcggggacaggtcccacctctcctgataatgttccccgcctccctgtcaggaggtgcaaaggtttgggtgggcattgtgaaatgttgccccagaagaaggtttccttctctttcagcatcatgctgagaggt

SEQ ID NO: 1884611 - DNA, 4001 bp, Homo sapiens
gccacatacctgagactgccattaggacattctctgtagctcctgcctctgtttctctctgcatattggtggaattcttctctcatgctgcagattgacattacccacataacagaaaggatgtccactgaccactcccaggatttcttacttagagctgtagacactgcatatgtggttttggagagagtatgtagaaagaagcggagatggaatcacttagtcctgagtttaaaaatcccaacagagggagagattcattgggtcaacttgggccaggtgtcactaatgaacaattaaccatgccttgaggtggggtgggtcgggtcatgcagatggagtggggagagagagaagaaggaaggcctgtactggccagcaagctggaatggccattgcatctctcaggtgggggccattcctacagcagttggacagtagagaaccacaaatcacatttacagcaaagcaggtggccaattttcacatgcagcctaaatgaagttccaccacaccctgggctgagtgggaaggctgcccttcctatatgtatgttaggctagcttctctagaagatagagcctggggcaaaaattgaaagtgagatgtttcatttggaagatgcaaatccatggcagcaaaggtgagacacaaggaagcgaggcaaagaaggatgcaaagccacactaagtggtgtgtttccttgatggctattatgtcacaaacagccatggagacacccagaaggtcactgcacaagacctttcagcatgacacgtgggattcagctggatgagcggcaaggcagactgtcatgaagcagtccatggagagaggaagaaggaatgtatgtgtcctgctccctctcaactcctattttccactggtcaaagttttcctagtgggggttaactcttctgcacttcaggattgtatcacccagtcctaatggcagcctctcaggagaccagttcccaccccatgctggagagtgttttcatccaaatctggaagaggtaagaggagccagaaactataggcatggggctaggaagggcccatactccaggacttgtagccgatctgacccaagtggcagaactgcctgagctcaagtcaggcagggcagcagcctaggcagagtgagtggcagaatgttctggaagcaggtggcatcaagagcctttgagaaggctcatcagatttgtgtttgatgcactgtgtgaccttggacaagtcactgaatctctctgagcctcaatgtcctcaactgtgaaatggggctgatcatacctatctatctcccagatcagaaataatattggtcccagttgagtgttgtgcctggcacctagcaggcactcaatacagaggagccatatttgtagagttaggagttctgactcagttctggtggcattagcatagctggatttcctgaggaaaggccattgagttttggtcaggtagagctcttgagctagagtgtggggtgacttggtagctctgaaaggaaggagaaaagaaagagaaaatgccacccagaaaggagcttcatagtatctgtccattgctttgtcctcacacaaaactggctatataatttgaggggctcactgataaatggacatgtggagccccttgttcaaaaatcattaagaatttcaagatggggccagcagagtattgaatcaagcacagggccctcctgagcatgaggccctgtgtgattgcagaggtcacacacccacaatgcctgccttacacttacacgttgccagagtgcagtatttggcgccagagcttggcaatgttctattctccccagcaacctctctgcctaaatgtgcctggcttgatggtgtcttggaaacatccaaggaaggaaagggatgttggagctgattgaaaatacctctacctgaattccaagtggtgtcatgaacaagtacatacataatatagcagttaagtgcaaatttggaatctgtatgtatgtataaagttgctgttgacatggttctagtagttacaggagtgttgccatggtgactggcagggccagctgttgtttcatttcccccaaagaattgtatggtaataatagacccctggagagtcctcctgggacaaggaatgatgttaaaaatctgccaattaatgaacaggtagtataaactgacttcatcctcatttgttgtaattaacaggattttacaggattttgatgagaagtggctaatttggtatagaaatgtggagggtagactacttttggagcctgggtttgaatctgcactgtgtcactaaatagctgcatcacttaatttctctgagcctgtctccttatttagaaaatggggatcattaaaccaaagttggaggaacattgaaaataaaggatgtgaaatgcttagctcagtttctggagcattatagacagatactacatggtttctatgatgccgatgatattaatgaaatcatcatcattataatcatcataaagcttccatttattgaaggcttccacctatatgtccctatgttgtgtacattatctcatttaatctttataacaaccctatcagtgagtccattgttatcctcaagttatagatcaggacacggaggttcagagatttgcctgaggtcacacagctagtaaatgacaatgtcaggattcaaattcaggcagtctaactccagagcccaggcttttaacccttatacacagtgcccctgggatgaggattaataaatacgtgaagcctaagagacatgcatttctggatttcagttggctctgaaaggttggtccttgatgaaatggaaagtatgtttccttttatagcaagggcagtggtggggtgggatgaaggagggagattgttttaataagcacatgctgatgggggctgctctgtggaccagccttgctctgtctcaggggttcagccttctcttcctgaggctgtcctactgattcctctggagttgcagcaactcctaccctgacctgatccatgggtcagaatcagggtcaggatgagtcaaggctgactcattgactatccactctaatggcccttcctccccagggctctatggatgctgacctttgtcctcttccaaactaaagaaaaacaaataagcatacaagcacaaaaccagccccttggacttcctgctaatcctatttggttatttaagtgtggcaggtaccttctctcctcagggcctttgcatatgtttctactccttcctcctgggcttctcttcgcagttctcattctcagtcccatttactgttgggcgagttcctaatcacctttcatacctgcatgtaaatgttacctcttcagggaagccttccctgattatcctccactccagtctctaagttccccgtcctgtactccaacagccacctgtctgccttttgtatcacttaatcagaattttaattaaatgattatgagtataatgatttaagatttatctctctcaataaatgttttattcactattgaatccccaaatgcctgtaacagtggctgactctgaatttgttaaataaatgaactagcaagtaaaacctccgaaatctcaacatctgccctgggggaaaagcttatgctttgcaaggtgagcccttcataaatttcctagcttccttaatattgtggtcctactaagtgttcaggagaaagcaaacaaaacaaaattattacataactgggtagtttgagaaggaagagcagaaagtaaaattattaagcatctactacatttcagggcttgtgtttctcattgtatcctcaaataccctgcaatatagaagaaattatttgcatgtgacaaatgaggaaacagaaaaaggacagagcattaggacttgtcagtcccttactctggacttcagtgtcctcttctgtaaaatggggttggggatgagtgagcgaggcaacccttaaggtctgtgccaactcattcacttt

SEQ ID NO: 1884612 - DNA, 4001 bp, Homo sapiens
cctgctccgtagagacccccacacccacctccccaccctacccccacctcccgtgcccctacccacagctcccggccaaacagttcaggccaggattccaaacccttggccacaagacctgcttggctgagaaatgcctgacctcaggcatttctggttctatttcggtggctgtgggtacccttagaaggctcctgtataagtagggatccctggatccctagcccctgttctcaagttatacacatattctggaaatggcttaaggtggcaaaatctcactgaaaggcttagcagagtctgcttaggatttcttgaaattctagggttttgtgttttccccctgaaaggataagggaagctggggacctggtaaagttctctgcccctcctctgttcagaaacctcggggacccacggagccccagaccagttgtggttgtaatgcctgcctagctgtcaaggatcttatgggcttaaagggaatggagtttcagggaaccacaaaatctgtgactggaagaacccacagctcctatgagccattctgagtactcgtgatctgccttattcgtgacttttcccatcggtgccctggggagccctgcaggacagctgggcccagttcctctgggacctgggaagcctagagcaggtggatgctgaacagaagcctgcccctccttgaatggagatccagggcagggatcaggaagccctaggcaggtctgcaaggacttcagggaaagggagctctatgcagagagctggagagacatcagcagggaagggctagcaggtcccttttgagaccgccacgttctctgtcgtctcctgtgtcctcttctgcccacctgggcgtgtgcttcctctcagcatccttctctctctgtgggcctgtgtccgtgcctgtgcctaactgcatgcccccacccccatggtccctgtcctgggcttcagccctcctcctcgcttctctgtcacgtctcagcttcattgtctattctcttctacttcctgtcctcccacaggctgcctgccgacactacggccactgtcgaggacatgctgccttctgtcaccaccgtcaccactaactctgacactatcaccgaaacctttgccactgctcagaacagccccaccagtgagaccaccaccctgacctccagtattgccccgccggccacggccacgcctgactcaaactctgtaccggctggccaggccaccccttccaaggggcccagcgcctctgccccctccccggccccagcttcagcccccaaggtcgcccccctcgttgacctgagcgacaccccgacctcaacccctgccgctagcaatttgtcttctagtgtcctggctaaccaaggggctgtcctcagcccaagcgcccctgctggtgtcggggaggcctctaaggctcctccggccagcaagcccacccctgcaccagtccccaccccgactggggcagccagtcctctagcagcagcggctgcccctgccacagaagcccctcaggccaagcaggaggctcccagcaccaaaggcccggacccggagcccacccagcccggagccgcgaagagcccggccgaggcagccacagcccttgctagcccgaagagcgaggctgcctccgtcagcaccacaaacccttcccagggcgaggactttaaaatggacgaagggaacttcaagaccccagatattgaccttgcaaaggatgtttttgcagccctgggctctcctgctcccgccgctggggccagtggacaagcccctgagcttgctccttccactgcagacagctctgtttcgcctgcgccagcaaagaccgagtacggcctctctttgtctgctgtcatcgggttgtgtcctgtggtggtgtgcatttgtgctgtgctgtgtcctccttgttagatgtgtcttcagcctcatccagggcttctctgaggcgaccgtcaaccaaggggctgggataaggcagagagagcaggacaggcagctgggccccaggagcagccgcctgctggctaattaggccatgttaattatgttttatccttatcatcctagcagcggcttctgttttccctgggggagcccttgcagtcaggccactgatgagaatagcttgggaagcaggctaagaaggccaaggtgcccttatcagccaccctggggcccccagtcggtgtgttattcagtgccaggctgagtccctaccagaaaggcactgatgtgcaggaagaaaagaggtaggccccaggcccgtggcaggggagggtgcagttcagaggtcccctcacactgtggctcagatgctcaccctcccctcccaaccccggcccccagcccactcttgcttctcctgctcttagagtggctgggaagactcggggctccccagcatcaaatggctgctgggtctcaaagttcaagagaaaggccttaacctttcaggtttgtaagtgtcttgccaaaattcagtggcaccagctgaggctggggtctgtgcctgtccccatgcatcctcagacccgactccctttcctggaactgatggaggcagagtcagacctagatttttatagaggctcctatggctgctccccagataagctgccatgctgccaccatgggctgcaaggggctctcgccaggagccctgaatctcagcatcgggagggaaaaggactctgatagccctgcccactcagctgccctcaactctcgcatagccaccaggcccactctagtaccccaccaggctgccatgaaaagctgcctccatcagtgttttctcaccctacccaggcaggccctagaggcatcatcctgcaacagcacagggtggggtggggaagggacaggcaagagtgggttgcaaaggggcccctgaaatcagtgctgggagcccagcccagcccagcaggctgcatttacatccagctgagctgttgccactgcagctggtcagggtgaggaggagctgcctctgctgcccccttccaccaccccaggtaaaaacacagcctctggcatcaacttagggctggaagaggaaaggactcgttcttctgactcagtgcttctcaactatggctgcacattagagtcacttgggtgcttttaaaagtcactgtgtccggaccaattaaatcaggatttccgcgaacacagctcgggcttgggtgatttttagtgctcccaggtgatttgacgggcagaggttggagccgggtgctgtcactggagaacccctcctcctccctgctgtccccaaggcctggatgcaggggcgagatgtctgcagaccgtggtctcagtggttctgttttcctgattctctgcaggaagggccccgtagaagcaaagccagagtgccaggagacagaaacgaagccagcgccagccgaagtcaagacggtccccaatgacgccacacagacaaaggagaacgagagcaaagcatgatgggtgaagagaaccgagcaaagatcaaaataaaaagtgacacagcagcttcaccagagcatttccaacaccacagacacacacacgcacgcacacacacaaacacacatgcacacacacacatctcatttctctagtgtcttttgcctttaaaaaaaactaaacagataaaacatgggaatctcctttttgtaggtttatagaaagggtccctttgttgcacactcacttgtaagaaaatgagacaaaaaggttaaacccacagccaaactaggacactccgttccctgaaaccgttaaaaaatcaaacaaaaggaccccaaattaagaatctaggaagctcagaaacgaaatctaggttcaggaagaccacacttggtgttacccgattggcacagaccagtttcagagaaatactttcaggcactaagactaatcgaatgaacaaagtccacagtttatttttatactttcagtcaagtttgaactctgtaaaacctcataaataagttata

SEQ ID NO: 1884613 - DNA, 4001 bp, Homo sapiens
aaaaaaacgaagcaagaacaaaagagcactaccggtgtacccaccattcccttctcctagtaatctgcaatgcaatcacaatgcccaaactagacctgccatttctcacacacagatttaggaatgaccaacttgtaccctcccagcgtttagcacaacacaatgacacccttaatttgacaatctgcttcctctaatatatccccagtctaaggcatttaaaattaaacagctcttcaacgccccaagttatttcatcaggctaagaacttctccgagaaacgcacaagaaggcaggcaaacaggtgggtaggtgagaggtcacggggctccatctgcaagctccatctacaaggcatcaatctgcgttgtggcatcaacgttaaaatgttctacagcttagggatcttcttgaagcaaggttccaagcacaaaactagtatgaccggaggctcaatttagaagatgcagcatctgaaaacctttaccccaggaaaggaggggtgcctgctggcattcatgggctctggaacaagcatttattcaaagctgatggcccctcgagccggatgcatctgctgtggactttttaagattgccccccataagctcatctgcaaactttaaatggtagcctcctgaatacagggcttcctgagcaaggcctggaaacagaacattggagaacttcctcctcctaagcctctggaaattcaatctgcaggcatcaattgaggcgggctctctcctccagggtctcccctcctgcaatgctaggactcacactggccagggactccatgtctcccggttccatctgctcgccatgaggaacactatagtaacaaaccacggtccatgaagcatttttgtaactttcagctggatggctgcaggcccacccaagggtgcacattcactccccaccctctctgcaggcaagcaacaccgatccgccccaccccagcctcagcgggaaggcctctcttcctccaccattaccaacaataccgactccaacagccactcggcttactgtcccgggcttaccagatgaccaggtaatgttttaagtgaatggataagttaaagggaggaagaaggggtggagtgagctcacaagaagagtttagcgccaaacctagagaaaagtccaaaaggagcactgccacctggaaaataaagcgttggtcaatgttgtccccaacacccgagcagcgtgcctcgcagtccccgcctgtcaaacatgctaggtgccgcaccagtcaccggtgaggatggcgccttaactccacatcactcctcagaccacccctcacctccgcccaggggcctggcttcgcacccagacctggacgctccaccaggctgggcccggcctgggccccgtcccaggccgagcgaaaattacataccaccctgggccagagcggtcagccccgtcgagctaagttcagttccacaagaccaggcctcatccccaggcgggttcacagcccttggtctggaaaaaaaggggctgctggcatggacaagttgaagattagccctcccggccctcctgcagccctgcacccactgcctgccttcctgatcatttccagggctgctgcggcctattcctcctgactcctccaccccttctacctctccctgccttcctccttccacacagaccagcgcacccgggctcgctcagctatgcaagagcggcgccctcccagaggtcaagttccccctccaccaggcagtagggacagcctggcctggagcgtggctgttctgcctgggggaccctgcggatattttccatgcagcctgccccactgtggtccccctagacctagtctccttgccaagcttccttctcgcacccccagcccgccccctcgtctcatctaactcagtcatctctccctgtctgtcccctgaagccctgagctagccacttcctcccccacaactacacccaggcgcgcatccctccctgtcgctaactccggctggacttgccacaacttttgcttttatagccctcagccgcgtcaccggggtcattgctcaacgggacgattcctccacggccaccggcaaaaaagtccctccccgaccctgcccggagagactcccgggcggtgcatggtctcccaggcggcccccacgcaaggaccccagtgtatccccgcttctctttaacagtgctttttgggatcgcggacagcgctcaaggtgacatttgggaggcgaatgccatgaggaagaagaccccttttcttcccggatgttgttgaggtcgggcgggggacgcgcttccccgagaggggctgggggcgtggcgggcgggggcgccctcttgagtgggcgacgggagccgccggggtcgcttgaggtcaccacgcccagccgaggcccgaaagaagggccggcaggacatctggaaaattccaggcggcggcggagggatctctgcagagggcacgtcccgccgggaggcgcgcgtgactttcgggcggtggttccgagtcgggctcggccgatgacgtcagcgcccgggcgcgggttgggggcggggcggcccagaaggccagcggggtgctgcgaggggacgtggaacgctccgcaccccaacaggcggtttctctggccaggaaaccctgctgcgggctgatagcgtccaggagctagtgggtgacaacatggagccccgtggagccgcgcgggcgcttcaggggcaggcatcgtggttttgactcttcccaggggcctggcgaggggacgtgtttcctgagaatgcgcatccctgccggggtagaacattcaagaagtgtgttcaggatggattaagtgggaagaggccgttgcaaaataatgtaaaaccaagatattgtgcggaaagcagtatctgacatagccgagggacaggctgtcggctcattttacatttgggtgggggtggggagaaaggtgatttttatttatttatttattttttatttgctgcatttgcaagcaggcatccccagcctggctcttctggaagcaaacctggtgaactcctgagccctccagcaaggcgggcagggcccgaatgtctggagaggactttggaccgtgtagcgggcacctcccttgctagggggtgcagggtgatgaggaagctctggcccctgaggtagaggatgaaaaaggaccccggttcaagtaaccagaatggaaaatggcatctgacaggaactcctgccaggaacctctccctggttaacacccacaccccatacaaaacaaccccttgaaagcaggcccccttggcaaccgagaagaagctggtgaagacatttcgcctgcgtctgtgaggtggtatcagcaggcagggctgggcctgacatgcacccctccctgtgcttctcggaaaactggtgactgtgtgtcatctgaccttcagcacagaaggtggtgatgtggcaagcccaggcttgctccctggcgcctgcttagccctgtttctctgccaggggaagattccggcagtgcggcctcctccaggatctgccccatcagtctcttcctgactgtatctccaggggtgggttggggtggggtgatttggcctgaaagaaccgtgtggaaagagggaattgtctgtcaaaatgttctagaaagctgggcagcttatgaaaccaatggaggagtcttcactgctgcttcacagtactgggcagtggagtcagccagacctttctttatctcaccaggcatctgagaggtgggtcgtccccgctgtagtgctgtttctgggccccagttgatgtcttaacttgcttttctctatttcaggtctcgaaatctctctaattcacacacatcattcccaaatcccagaaacaaactatggtagattttatttttcaaaaaagagtgggatccattcgcttttgaaggccatggtgggaggattgcctagaggccaggagttcgagaccagcctgggaaacacagcaaga

SEQ ID NO: 1884614 - DNA, 4001 bp, Homo sapiens; identical to SEQ ID NO: 915063

SEQ ID NO: 1884615 - DNA, 4001 bp, Homo sapiens
cagacagaaatagcctgcactgccataggccagactcgtttatgttttagcttgaatgagtctcttattttatgttcctgataaaatgagggggatataatatcgactgtgaagtttatagatcagtttaaatattttaaatatatggatgcattctgtaaattgtactccactgtgtggatattagaagttattatttcacagaaaccagagactcaaactaaaggtactgatgatcaaatgtcagccagcagccaagccaagtgcttggggtgataggtcttccttgcagatggaagctcttagtttgcaggtgcccactgactctgcaaaccgaggaagccagtcctgagctgaactccatttttctcatgatgcagccaggataagctagagtggctacattagcaagattcccatctacaagaggctggactgtgccttgaattgtaaagatcctggtggagtgagactcatctgtcaaggctaggagaggcagacagtctaagggacagcgactggcagtaaatatggccagagcagagtcggggaagattgatgtcctacctgagaaaaggggagtgatgcaaagaataaatgatctcttgtgtgtcctttggtcctaagagctaaactcatattgccaatttgatgcctggggaaccgctgtgaatataactcatggagaaaaagtgataagtgtaatgggtggtgcccgagacatagcaagtccaggtgcaccgatgccccaatctgggtgctcctgaacagcagggagtgtgcctcaggctgtcgaggggtggctgtgacagtgagagtagcagtgccatctcagtcaggtccacgaaggaggacacttagaaaaacagagttggtcagagctgggagcatttcattcctccttcttcaagatgtgcatgacaattaacaacaacaaaaaggtgagaagagagaggtacaaagggagctcagagcagaggctgcccatagtcctgtgaccacagggtggagaggaaggctggtgggcatgagaaccaggtaggatggctcccagtcaatgttaatgtgaagccacagagggcaaggcaggggtccaggcctctgaggggcagatgggctgagagagcactactgaggatgccccttgagagagggggagtccaggtgggaagacgtgggtagcagggaagcctaggctgggaaggtctgagtggacagcacctgcaggcagcgtcactttgctcctcacactgctctttctgctgcatctcagggtcccatgagcacagtcccagagtgacccttcctgctcctgctcatgcttccccaggtggatgagctcccacctctcttggagctgtgctttcctcatcctgttgctgtggcaaacacaccagcacacattcctaagtcacgcatgcatccgcagcggctcagcctcgtggctgtgcagcagtcgcagtgctgggcatctgaggcgggtctccatgaggcaggagtagaaaccctggccggccccgccttctccccaaggccactgtcggggaagagtcaggtggggtttacaatgtgacagttggaggaggcagaggagagggactgaccagttgttatgggctgatttatgctcccaccccaaatccgtaagttgaagtcccaaccgccagtatcacagtgtgagggcatttggaagcagggtcccagtatcacagtgtgagggcatttggaagcagggtcccagtatcacagtgtgggggcatttggaagcagggtcccagtatcgcagtgtgagggcatttggaagcagggtccctaagtaggtcatgcagttaaactgaggtcactgggggagacccaatctaatgggactggtgtccttaggagaagagatcaggacacagagatgcagagggaagacatgtgaaaacacagggagaaggcgaccttctacatgccaaggagagaggccctcccagaaatcaaccaggccgactgttttagctcagacttctggcctccaaatttgtaagacaatgcattgctgttgttgaagccctccaggctgtggtactttgttacctcagcgctagcaaccagtagagtgggtgtccaggggaaagcccagaatagggagggggctcaccttggagggtttgctgtgcgccagctctttcccatacctcatttcattttaatccccacaaaatcatcctctagggatcctggggctgaggccccaggggctgggacagtcctttggaagtggtggggctttctacaagcactgggcattgcctcagagggaggaaggaagggagagggagaagcccaagaggaggagaggaggccaggaaaagggcgggatggagggaatcactgagatagagcccctggggtgatgacagcacaggcactcccatggggcctgggcaagagcttagtgtctcctctgcagacacggttactggtaggacatttccactttccctctaaagccccccattgaacaggagggcacatttcagacttgcccatcttagcctcccctcctatccctcttcgctaaaagcattctcagtccctgagcctaacttagaacagggtgctatgaagtaccgcctagaggtggaagcaactgcagagagaactggatgcttcttttctttcattcatcatttaggaatataaccatgatgcaaatatttttttaagatgccaattttttcatccaaattgttattcaagcataaataggcatcacattttgcacatcatcccgagctccttgatctctgatcgctgtcctaattgtcttacttgacaaagacgatgaggcaccaaaccctgcactagaacaatgaatctgtgcttctccaagaggtggtgctaattatcttgagccactcccttagaactattgggctggctaaagtaggttatgattttaccaacttggaaaaaattaagaatttgccagatgtttagcttttacaccatatgacagaaattgcccctgttgacccggagcggtggctcatgcctataatcccagcactttaggaggctgaggcaggtggatcacgatgttaagagattgagaccatcctggccaacatggtgaaaccctatctctactaaaaatacaaaaattaggtgggcatggtggcacgtgcctgtagtcccagctactcaggaggctgaggcaggagaatcgcttgaacccaggaggcgaaggttgcagtgagccaaaatcatgccactgcactttggcatggagacagagcgagactctgtctcaaataaaaaaaaaaaaaaaaaaaaaaaaaggaataaaggaatttcccgtttcatttcttccaagtacattaaattatatgaacacatgttgataaagttgtttaacctgtatctattacaaagcttaattaaaatggcatatattatataaacacacatatcacttggagttaagaagttaagttaatgcctattaataggcattcatagattgtaagaagattttgtgtagattatgtttctctcttaaacaggctaaatattcaatttatcactttacctgtcctaatgttttctaaatcatcttcctctttctactcttgacacaaaggaaaaacttattccaactgagttgaaacatcccacatttttaattaattaatctggttggaattaatgatgtttcactgtttgggcaatgagatattttttggaaaacatgagcttttcaagacacaagctactcggggagcgtatttctgttcagagttgttgtagacaaaaatctgctatttgaggagggggctgggactgtcatctgaaagctcctaatgatcagcattatacatcacaataaaaaatgtgtctttgtgtaaacttggaaaccagaacaatttatagctatttcaagttacccactggcttccagacacaagctattccctaaagagctctagctcagctgctctggtgacaagagaatt

SEQ ID NO: 1884616 - DNA, 4001 bp, Homo sapiens
tgttcagccacctgagcagggctttgccctcatcctaaaagttctagaattcaagtcttatttcaaggcattcttcccacttccatgttccacatgtaaaaaagaattctacgtttcttaacgagctttcaggtaagatctttaagcttttggaatgtaccgcttttcgctgtgaactaagagcttagacattacaattagtcatcccttgctagaacttaggctacgaaaagaatactttggaagctttcacaaaaaagtatgtggttcttcctctaaagaagaaaataccacacagaaagagggactgaggaaacataaacccatctgtgctgacagaaagctaccttacatgatcctcatgttcgccccaggttcccatatattcacagcagtaaagatctccacaaagcagagaggcccaactcccttaccattaaagctttaacgaccagacaacccagaagtttggaaacatagaaccaggcaacagatactagagagagggaattatgtattaaagcaagaaaatatcatcacgttttcaagagggagtgccattccagtaaagaggacagcttaatactgaggttcaaatgccactaaatgaaaacgggaaagcgaaattcctgtgccctttcagcccaagaaattattccaaagcatacatttattcccattacatgtcgcaaatcctgcctagccattaggatacagtgacgaaaaagtctctcgttatctagaagggcagacaaacacgcagacttttaaaataccagatggcaggccgggcgtgatggctcacgcctgtaatcccaagcactttgggaagccgaggcgggcggatcacgaggtcaagagttcaagaccggcctggccaagatggtgaaaccctgtgtctactaaaaatacaaaagttagccgggtgtggtagcgggcgcctgtaatcccagctactcgggaggctgaggcagggaactgtttgaacccgggtggcagaggttgcagtgagccgagatcgcgccactgcactccggcctgggcgatagggcgagactccgtctcaaaaaaaaaaaaaaatgacaagtgctaactcagaggtaagcaaaagagagtacccagaggcggcagcatcaacccagtgggctcccgcccacccacaatcttcacacagtcacaccacttatagtcataaatttgtactctccgaggtgcgtgtatgaaacatgttatctgtgagagtccatggatgaaaaacaaaaacaaacaaaaattaaaaaaaaaaaaaaaaaagacttaacctgttttgaccaggacaaccaccccaggaagtaggtaaggcaggtaaggtcattgtttacatatatgaaaagtgaggctcaaaatacactgaccagtccaagacaacgcgcgcccccacaaagcaccttccccgtccccatttatgcccaacccataaacccaaagtagagccaacctcgcactggctacgtaacccgggccaagctaaacattataaacctcaggctccccatctttaaagtataacaggtggttagaagattaaaaagataaacatttggcaggtcattgtggacggtgtagctcagaaaatgctgactactgcactaccataactactgctattgttaacgataaaaggcaaagactttccaggacccgacccctcgcttacaagcctttcgggaacttgccctatacccccgaccccagtcaccttcagatttaattccacagacacgcccccaaacagaccctcccctttaaggcaccccccccccccccggctcctccctctcaggcgcctctcctcacaaaccttacccccatagattctgccctttcggactcggttatggaggaggccttccgctcgcagcggcctctccagcaccccttttaggcctgagcacccgcaggggtgcccaggccgcacgccaaacgcgggcccgcgccggttacctggctgcgcgctcccgctctgcctcgcgattctccggaatcgtacctcttcgtgggctcgcgccagcgctgtgagcgcacaattagtttaaactatggccccgccccctcgcgctgccctctgattggcctctgtcggcggggcccgcttaaggacccgggaaaaggaagtttgagggccactgggaaagagaaggggtatcaccgcttccggaccccggcctgtacttgaaggcaaagagaactacaaatcccagcgtcacccgcggccttgaagccccgcccctgacaaactgaaggtcccggtaagcatcgcgtcagtacttatggcgcctgccgggttgtggtgacgaaagcagttgccatggagttgctctgagtaaccctgaggcagtgggacgccaagactggagaggaagcgactgcgggtgagtcgggcgggaaaacaggaaacccgttctaggggacaagagatctatggagaagggaggggcactcacagaacgactaagaaccttcctgctcggggatctgagatttcccccaccgaccctcatcacctttcacagcgaacaagatacaacactcacatgggacagactgggcgagggggagcagagggagggataggcgttgagatatatatccatacagatttggggatgcttaagaaccacccccagggccgggagcggtggctcacgcctgtaatcccaacactgggagaccaaggcgggcggaccacttaaggccaggagttcgagaccagcctgagaaacatggcgaaccctgtctctaccaaaaacataaaaaaattagccgggcttggtggcgcgctccagtggccccagctactagggaggctgaggtagaaggatcgcttgagcccggagattgaagctgcagtgagccgtgatcacgcaactacactccagcctgggctatagagcgatacctccatctcaaaacaaaacaaaacgaaacaaaacaaaaacaaaacaaaacaacgaaccccgcccccaacgcaaacataaagctcccaaaatcggatgcttcaagttccaggcataacctgggagatcagaaacgccctcagaaatggggttggttttcctctgaggaactgagaccctcttccaagacatgcggttagcattagattgagtaaatcgcagtcgctaccctaattctagagatgtaggaaacttcctggggcgtgaagtgcctcattccttcttcttccaaggagtaaaaccccttctcaatctgtccccagattcccttttctccccacaccttctccgtggtccgctactcaaagctctacagttagagcttcattttttttagtactcacgacagatctattacatttagtaacctacccagtgctttcacagtctctcttttgatactcttaacagctctgtgagtcaaggatatttatcttcatttcacagattggaaaactgaaacccagagaaaagggacttgcccaaggccacacaccaaattagtgacagagctagaactagactccagttctccgacttccagctaagtctctttagcttcagcctactgcctctatagcggaaggacttgttccaaggaacaagttaaactgccccagggaaaaggaacctgtgtggcctactttgtattatttacacttcagctggaatgaatttcagatcctcccctgaaacttttaatggggaaaaggaactagagagactaagacaatgagacttgaacatttttaactaaacaggaaacagaagggctaacacagcacccatgtctgaagtgaccatgattagctggtttctagctggtgactagctggccctgactggtccacttactaccttaaagttctcccaggtttggtcctacgccctcttgccactgcactctatattctcttcttgggtacccctccacacccacaacttcattttccacctgtatgcaaatgtacacaagtgtgtatctcaagcccagccctcatctct

SEQ ID NO: 1884617 - DNA, 4001 bp, Homo sapiens
ggggaatgaatagtcgtggggagaacagtttggaggcagactgatacagagccagtgattcatatggagaccaataagctctggtataaaggtaagaaaagagatcgggtgtggtggctcacacctgtaatcccagcactttgggaggtcaaggtgggcagatcaactgaggtcaggagttcgagaccagcctggccaacatggtgaaaccccgtctttactaaaaatacaaaaattagccaggtctggtggtgtggcacctgtagtcccagctacttgggaggctgagacgggagaatgcttgaactcggggggtggaggctgcagtgagccaagattgcaccactgcactccagactgggcaacacagcaagactcttatctaaaaaaaaaaaaacaagaatagagaagctaccgaaactccaagactccgatattttctccatcacctttccctggaatagaaattaggatgaaagattattaattcaaaaaaaagcacaaactcagtggtcccagtttcatttgaatcctattcctggcttagccccacgtgtgcactgtttgggcctgctgagaacctgagaacaacatctggagataaatccaaggtagggcagattttacatgatgatgaagatggcaataaccacatttactgccatatctccctttttttttttttttttttagatggagtctcactcttgttgtccaggctggagtgcagtggtgcaatcttggctcactgcagcctctgcctcctggtgattctcctgcctcatcctcccacgtagctgggattataggcacccgccaccatgccaggctaatttttgtatttttagtagagacagggtttcaccaggttggccaggctggttttgaactcctgacctcaggtgatccacccacctcagcctcctaaagtgctgggattacaggcgtgagccactgtgccccgcccatatctccctttaaaagtcacaaagtactttcacttaatatatctattgatcctcagaagtacccccagaatttagatcctgcaggtagtttaatctctattttggaggtgaagaacctgaggctgggaaatggaaaatgacttttcaaaaataatataactaagaactaacagtataaaacacaatcaactgttgtgccccttctccttatctttctggcagtatgccatgtgtctctgcccagcagtattgaagagtggcatgtgtttagagcagcgggaccctcgtcattgctctcttcaaagcatccttaagttctgtgttcctcatgctgtagatcaaagggttcagcacaggggtaatgaaggtgtaaaccacagacactgcctggcccctctcaggatagtagctagagctgggacacaagaaggcgaggcgtgtacatcagtcctggaggagaaccacagtcaggtgggaggaaaggtggagaaggccttgtgcctcccctctgcagagcaaatcttcaagatggcggccatgatggagacataggaaagagtgatgagcaggaaggggacggtgagaaaggtggtgctgaccatagacatagtggcctcatggacccaggtatctgcacaggccagtctcatgacagggaggacatcacagtagaacgtgctgatttctttgctgctgcataaagggagttggaagataagcacggtcagctgcatggctaagaagaaccccaacagcagagaccccagggtcagctggacacacaacctccagctcatgatgaggccgtaacagagaggacaacagatggccacaaaccagtcaaaggccatgacggccagcaggatgcagtcagcccttcccaggaagatgaagaagaacatctggcctccacagccgggcagggaaatgaggtttctccccatgggtaggacattggccagagtcagaggggcaatggtgaaaaagtagaagatctccagacctgcaaagtttgtcaggaagaagtacatggaggctgggcacggtagctcatgcctgtaatcccagcattttgggaggcagaggcgggtggatcacctgaggtcaggagttcaagaccagcctggtcaacatggtgaaaccccatctctactaagaatacaaaaattagatgggtgtggtggcatgcccctgtaatcccagcttctagggaggctgaggcgggagaattgcttgaacccaggaggtggagttgcagtgagccgagattgagccattgcattccagcctgggtgacaaagtgagaccctgcctttaaaaaacaaacaaacaaacaaacaaacaaaactgcattcttttaaaggctgaataatactccattgtatgtatatgctaccttttgtttacccattcttctgctcatggacactgaactatttccactttttagctattttgaataatgctgctaggaacattggtgcacaaatacctctttgagtcagcactgaaatttaaaacacactataccattcccagaccacaaagccctctacttctatctcttgcctggttgtcaagagtacagcctctagtctaggttctaattcctgggctgattgaccaagagtatgacctcggataacctgttgaagatttctgctgcaacttctttatctataaatataacggtaggacgcagctcaaaaaacttgttgtgagaataagtgtatctggctcccagtcagctcttcataaatgttagcaataatcattaatactatgaagtgagcttgctgggaaatgtctcaggatgtgctagggaggctgaatgttgcctccttggttcccttttcccacctcttgggaaacaggggatatagggagaaacttcacagctagaccacctgggtcccatattttggggtttttaccaaagtgtttttgtctgtggatagttgctagttgacctttctgtggggggagtgaggcctgggaccccctagttcaccatttattgatgccactcataatgtctgttttgaagacttacttgttgttagtatcattagcatataatgtcacttcattagctccaggcggttaaactactgtaaatgtttcaattcatttgtaactccacaccaggaagtccctcacagggttaggaaatcccaaagcccatagggttcactggtccattccccagggtttagaccacataacagcccaatcagcccagtcttccctttacccttccttgtctcctgcccagagaggctgatgatcacatccttaccagaaactgagtagagcccgaggtagaatcttctcctttactatcttgggaaccatggagtcaaatctcgataaaccgcctttcaccgagggaagcacacatttagattctgttagtcctttcctgctgctgcttcaaaagagaaggcggtggggctttcattgtaggttctttctcaactctctctccttctcatatcatttctggagaattccctgcctaatttggttcagtaaagccccaagaggataacttagctttcaacttgaccatccccagtagggttaaagtttgaacacaaacaggaattgcttaaagacaagatagtctaaactggtttaattgttactggacatatatatatatatatttgagacagagtatcgctctgttgcccaggctggagtgcagtggtgcgatctcagctcactgcaacctccacctcccgggttcaagcaattctcctgtctcagcctcccaagtagctgggactacaggcacacaccaccacgcccagctaacttttgtatttttaatagagacggggtttcaccatattggtcaggctggtctcgaactcctgacctcaggtgatccacccacctcggcctcccaaagtgctgggattaaaggcgtgagccactgtgcccaggctagacttagctagctctattttaatcattgcttaagtttttattctccacatttaagataagtttggcaagatagccagc

SEQ ID NO: 1884618 - DNA, 4001 bp, Homo sapiens; identical to SEQ ID NO: 915147

SEQ ID NO: 1884619 - DNA, 4001 bp, Homo sapiens
ttttagagtgaaaataaggtttctttcaatagaggggaggatgagcaggtcactatcaatgctgtataagctcttgagtttctcagttttgggttttatctcctgtaatcatatatctcctgcatgtatataatatatatatgtatatcatatatatacacatatatgtgcatatatttcacataatacatacacatctgtgtatgttttaatacacatattttattttacttttttacaacgggaacactaaagtctgatcccatatttaagttctagatttaagcctataattctgcattaattctcattgttgggaattgatggatataaggtatgaattctgggtaaatgagcctgctcggtagcaccagactctgcatggtatgttgttttcctaagatgtacacttgcaagaaggtatagctgaatattgaagttatatttaccagtgacaaaattgatatgctctatatttttctgactcctgcactgatttcctaatttgtcagggaaactagggaaaagatggatatttgtccctaataccccaatatccgtgaagatttactccactgtctttcctttccttccttcttttctgcatatattatccaaagaaataatctttcaaattttactttacagttacaaatagattggctgtagagaaaaatacctctcaagagaagaaaagaaaagattccctctaccccctgctgagtctttatactctatttaatggaagtccttacacaacattgattatgcacttctcattgatttactttactatttttttgatgacagatatctcaaaaaagcctcattaaaatgtatggatgcaatttcaaagatattgttttagacacattttctttaaggaacacatggattagaagtttgtttatttaatcattccaaatgtttttctctatctttcaaatgctattgatataattaagtaatgcatttctgtcttatagacatttgtcatattttctgagattgagaaataagagcactgttggctggcttgttgagccatgttgagatagaaatcaaagttcaaattagaaatactttttttctgttagttttatggcttcaatcacatcttggtttctctggctgtaaatcaaggggtttaacatgggaataataatgccataaaacacagaggccactttttcttgtttttgagactcattaatacgatggcatagatacatgtaagagagaaccccatagaaaatggtgactgctgtcaggtgggaggcacatgtagagagacttttttcttccctgcagcagaagatatcctcaggatggcaaccaggacatatatgcaggaaatgatgaccaccatcacagtgcacatcaaatttaatcccacaaatactgttaataacatgatgttgaggtcaatattggagcatggtagggcaataattggaggttcatcacagaaaaagtgattaattgttttggatttgcagaagttcaatgagaaagtgaaacttatgtttatagaggcatttaggaaacccatgacatatgaactaactaatagcttaatgcagagtctctgggacataacccctggataatggagtgggttacagaaggccacataacggtctactgccatagcagccaggatgtagcagtcacttgttgcaaagtaccataaactagtaattgcaccatacatcctatacatgagatagatttttttgtttctacaaagtttttcaacatcttgggagtgatagcagaggtgtaacagagatcaacaaatgccaagtgttggaggaaaatttacatggggatatgaagagaagcatcaattttgataagtaggatcattccaatattacctactggggtaaccacatagattgctagaaatgctatggagaggatatgccaagacttgtgttgaccagcaaatcccaggagaatgaattcagtcacttcagtgccattattttgttccatggctagcatagattaaatatcagctgaaaatatgcaaagaaagaagcaaatagaaagagaaagctaaaatcattgttatcttttaacttatttcagatttggaaatgtcttaatatttggtttcatagtggggtcagcatgtactttctgtgacatgattgacttctattttaaaggctgaaacttgacagccagcttagaatttcatctacagtttgtacaaattgcaatggagcagttgctatattcccggggtacaaactgattggcaattcaaaaatatatcggttaagaaatctatgaaatattcttttatttaattatgacttcttttatgttctttatattttaattaaaatatctcaatttacctaaatagtaattttatatctaaaaatcttgacttcttcttagggttctatatgaccttgtttcaacttatctccatattttcattttacccttttccccttcttactaactccaccatggccatcatgactcatggctatgtagaactcttcacggaagtatttatccaagtatctgtgccaaatgatcttattttaaaaataattcccaatctgttatccagttatggatagataccaaattgcttacaatttgtctccgatacaagtaactcagtgtgaaaatttctcagtgatgtactcctagagacaaaattgttgaatctgaggatatgcccacatttaacttgacaagcattgcagatcactttccacaatggaggcaccagtaaacagtcttactaattgcgtgtgggaattccgatatccacacttccttgtgaacactggtatttttacttttttcttttcttgggccacaaaacaggtgtaaagtagcataccattttaattttttcctctaactgcaaatgtaatatccttcttagaattttggaattctattgttctgtaatttgcctgttcctattttttttacaaatatttctattgagttgatttataaatgttctttttaacttatcagttgacttgacaaaaatttccaaacattgtattatctattaactttgtctataatatgcttttcatggaccagaaattattaaacttgaaatgataattgatcattttttgttttatgatttgttctcttgaaaaaaaaaaggaatgaagttcattcctttctctagttcattttccctgtggatacaaatgcaatgataaaacttattttccttcttatagtgtgttgctgctacctgatgcttgctgaatcataatactttataccatacatataacctgatatttttgtggtttctcaatatttttttttttaaagaaagctaacaggaaagacattatttagtagttggtgtgtgtgtgtgtgtaccaaatatttaaatttcaaaatattaaatgatttgattttctattttaaaattaacccacaaaaacactagaatcaactatgttgaatacctatgacttagatatacagataaaatgtaagaagacataaaagcacaaatcgtaaaacattgaaaattcaaccatattaaaataaaaatatcaatattatgaaagagaaaagactggatagtgactggaaatttactcacgttggaaatttactcaggtaaatttattttaaacacatataaatgccaaaaaatatgtagccacaaaacttaaaaaaaataaaaatttagtgtctagtacatataaataatttctataaataaacttgaaaaattcacaaaggacataaaccagataattatagaaaagaaaacccaaatgaccaacagaaatgtgaaaagatgaacaactcactagtaatcaggtaatttcatattaatacttcattgaaatacagtcttatgctcaacaatctgaaatgccaatttttgatgagtaatgtggagccacagggattcacatatttctgctgggaaggagaattagtacagtcatgttggaaacaaatttggaaatatcagtaaa

SEQ ID NO: 1884620 - DNA, 4001 bp, Homo sapiens
aaaacggtagagtgcttggctgggcgcagtggctcacacctgtaatcccagcactttgggaggccgaggtggatggatcacgaggtcaggagttcgagaccagcctgcccaatatggtgaaaccctgtctctactaaaagtacaaaaattagccgggcgtggtggcgcacgcctgtagtcccagctactcaggaggctgaggaagatcacttgaacccgggaggcagaggttgcagtgagccaagattgtgccactgcactgcaggctgggtgacagagtgagactccatctcaaaaaaacaaaaagcaaacaaacaaaaaaaccccaaaacaaagagtgctcatatttttgcctaaatgaaaaaaaattagagatttttctttcacctatcccccaaaacaccaagaattcatatagccttatttccaagaaattggaatgctggatctgtgaaaacaaaaataaagaacatggaaaatgttgcaaaactaaagtatttctctagatcattcaaattaattaagacaataattttgtttcttagaaacattcacatatacccaggcctgattacttccccaaatgctccctctttccattcctttttctccctactcacccctcaccccctcccaaaaaactcactatggctccactttccagagactagaaaaattgaaccctggctgttgaaaaaatgactatttttaacatctctaaaagtttcctaaaccttctctttatctcttttaattaaactttcttttctaaacaacccccccatctaattgaatcccagtggttttttttttgttgttcttttctccccccactgttgctgcaatactatattttctattgtttatttaaagcatgcagtatttcaattacatttggattaaataaggtttttgtaagctggtcttgaaacttaatcaccgtctgtagcaaagtgttatgaagaaatatgttctaagactaacaaattactctctacaatacagcctgttgtaaactgaaaagtgtttcttataacatcgattttcatgtgtgggttttgtacccagctttgttaaattatagtttcacccagaatgttgcttttcaggatcttttttaatatagagcttatattattatttaattggtagtaagccatttcttcttcagcacatgaaggacacagttattgacattctagcttgtaagtcaattttgatagttcacgataattggattaaacattactatgttaaataagtgacccagtactttggtcattaaaattcccaaattggattactgtttgcttcctgattggacagcagttggcctgctaaatgtaaacttaattagagacattaccttgtcaatatatcaaactttcagtatgctgcgttccattaactcactcactataactctttgccctctagcatttttttcagggcatcctttacttctgtgtttctcaggcgatagataagagggttaagcatgggaattacaagactataaaacacagagactactttgtttggcttccatgaattccccgcttttggttgctgcaggtacatgaaaaatagtgtgccataaaagatggtgacgacagtgaggtgggaggcacgggtggaaaatgctctgcacttgccctcggaagactggatttttataatggaaaagaggatgcaaatgtaggagatgaagatggtaaggagggacccagtgagatttactgcagagaagatcatgagctgcttttctttgttgtgggtgtcagagcaggagagggccaggagaggggggtcagcacagtagaagtggtggatgacgtcggagttgcagaaagacagctgaaacgtcagagctgtctgtatcacagagtttcggaagccataggtatagacccctatcactaactccctgcagacccgctgcgtcataatagctgtgtaaatcagggggttgcagatggccacgtagcggtcgtagggcattgtggccaagaggaatcattctgtagtggcaaaagcaccggagaagtacagctgagcaaaacagcctgaaaaggagatggtttttttcttcaccaatacattttgcagcatcttgggcccaatagaagatgagtaacacagatcaatgaatgccaggtgactgaggaagtagtacatgggggtgtggagccgcgagtctgctctgatcagcaggatcatgccaaggtttcccaccagggtgatgagataaatgacaaggaacaccacaaagagggggagctgcagctcaggacggtctgtgaatcccatgaggacaaattcggtcactgtggtacgattgccttttgtcatgttctctcgcctgctgcaaaaaataagaaatgattagatacttaaaaacaaacgcttcttacctctttgttgcattaccatacgaaaaaaaaaatgtggctttacatttccaatagttaaaggctgtcattagctatgggactttattctgctaaaacagacttggcaagactgaactcatttctttttggaaccaggagaacgattttcctaggacagaacctatttttatgttaacagtgttggtgttttcagttcaactcaacagatacttctgggctttgtgtggggccagatagcatgcttggtgctgggctggagatgggtatgacaatgacattgtctttgttcttatggagtctagtggagggttcgtaaaacattcctaaggggaagtgagccaagtatttttggagctgcagagtgctgtaggagttcacaggagggagagattgaatgtggatggtggaaatggaaaagcttcattcattcattctcattcacttatcaaacacatattgcccctcttcaatgtgccagatgctatgctaagtgaaggtgacccaaacatgaataaaacgtatgtctgccttcaatgaatgcacaggctggtaggagaaacatacatgtaagtaactagttacaattcactgtgggtaatgctctgaaagagaggaatctcctaactcaaccgtgtgtgggggtggaggatcagcagtcttaggcaacactgaattgtcctaaattttaggctggatatttaaaattataaatgtaatatatccacttggtgaaattatcaataggagaaagggatataaatgaaaaaacagtttctctcctctacctccaatataattaatggtatccaatgttaacagttcctttagtattcttctaagaatgcttaggtataaacaagtatcaatacacacaaaacacacacacacatacttttctacataaatgaaatcatacagttttgtaccttttctcttcttacacttaagaaatatttccatgataagaacacatggatacatagaggggaacaacacacattggggcttattggagggtggagggtgggaggagggagaagatcaggaaaagtaactaatgaatactaggcttaatacctgggtgatgaaataatctgtacaacaaccccctatgacacacattacctatgtaacaaacctgcacatcctgcacagttacccctgaacttaaaataaaagttaaagacgtatttccaaagtagttcatagaaatccatgacattttcataactgtatcataatttattaataagttctctcttaatggatatttaaatgtttacaattttgtttttttttttctatctcaaataaagcttgcgctcatatgtctaagcatgtgtgtggattaaagataaaccactaggtcaggcatggtggctcaaacctgtaatcccagtactttgagaggctgaggtgggcggatcatgaggtcaggagatcgagaccatcctggccaacatggtgaaaccccatctctactaaaaaaaaaaaaattagctgggtgcggtgacacgtgcctgtaatcccactgtaatcccagctactcgggaggctcaagcctgagaatctcttgaacccaggaga

SEQ ID NO: 1884621 - DNA, 4001 bp, Homo sapiens
tatgtacgccccctgatattattcgttatatcctcgggggatgttactcctaatgtcacacggggtgtactccctgtgatattattcgtaatatcctagggggatgttactttcagtgtcaccgggggtgtatatcatgcgtattcaacgcctgtgatactattcctaatatcctaggggcatgttcctcctaatgtcacatggggtgaacaccatatgtgtacgcctgctgtgatattattcataatatcctaggggaatattactcctgatggcacaggagatgtacaccatgtgtgtcaaccgcctgtgtcattattcgtaatatcctagggagatgtttccttgaatggcacaaagtgtgcgcaaaaggtcacagaaggtgtgcaccttgtgatgttatctgcaataccctagaaggatgttactcctaatatgtcacaggggtgtacacactttgatattatttgtaatctcatagagaggtatgacttcaaatatcacagtggatgttcacacgtagtgtataccctgtgatattattcataatatcctggggagatgcaactcctgatatcacagtgcatgtacccggtgtgtgtacacccttgatatcagtcgtgatatccagggtaaatatgactcctcatatcacacagtgtgcacaccctgtgatatttttcataatatttaagggagatagcgcttctaatatcaccgtgggtgtaccccatgtgtgtgtactctgtgacagtattttttatatcctagggaggtattactcgtaatgtcacagtgggtgttcaccctgtgatgtcattcttatttgaccttggcgccttttttaaaccaccctacaaaaggaatggaacagataagaagatgttgagattagactgtgctgccatgcggccgccgcaggacacttttcatatccctgtttctcaggctgtagatgaaggggttcagcatgggggtgaccaccatgtacatcactgaggccactgcaccctttctcggggaagatgacacatctgaaccgaggtaccctccaatgcctgttccataaaatcagcaaacaactgacaggtgagacccacaggtggagaaggtttatacttcccacctgatgatgaaaccctcagaatggaggaaacaattttacagtaagagaaaagggtccccaagatgggaagaaaaccaaatatggcagcagggaaatactgatgttcctggtgaaggtgtcacaacatgcaagatgggagagttgagaaggttcccagaagaaattaggaatttccacatccttgaagcaggtcatttgtaaggcaatcaagttgtgcagctgggagtctgaaagactgagaaaaaaaaaaaaaaagacaacaaatctaggaagccacagaaacacgggttaaagatggctgaacaatatagagggtgacagatggctacaaaccggtcataggccatcacactcaggagcatgtctctcttccatacctccaaaaatggcaaagagagacatctgagtcaggcagcctgcataggagatgactctgctgtgagactggatgtccacaatcatcttggggaccgtggtggaggtgaaaccgatgtcaggcaaggacaggttggagaggaacaagtacatgggggtgtggaggtgggagtcagggctgacggccaggatgatgagtaggttccccagcaccgtgaccaggcacatggacaggaacagcccagcgacgacctgctgcagttctggatcctctgagagtttgaggaggaggaatatagagacatctgttagactctgtgggtctgtatcatttggatacaaccctcttttgcctggaaaagagggttgaaaaatccgaaacaagtaaaccaatacccagcattgtgtctgcattttggatagaagcaattcaccagtaatgtttgcaggtttcagagcaatccacactcagcaatattttgtagttctgacaagctcaattgccttatagtgctttcaacatcgattgctgtgttattctcctcttgctgtacacacctgccttagagacactagcttcgagaacgttccaagaaccagatcatcatatataacaaattcgtaattgctagaaaatacagcctatcttttccgaagaaaaagatataataaaaccactgtcttcactttaagaaaaaggttatcctaattaaaggaaattaagaactcaaatattttatttattctactagattgatacaaattcccttgatttagaacatttgtaaacactgtgtaacagctgagaccatgccatctggaaatgaaatgaaagttgatagttcataagcagaaaatagttccacatgccagttaggtcctagtgatttcatcattctgttttcggacttttctccttcgagagagtaattgcttactcaaatcggtgggtcttgttttaaaattcatggaagctctaactcctgtccttagcttaggtggacttagagttttcatcagaaagtttggccggatatggtggctcacgcctgtaatcccagcactttgggaggccgaggagggcggatcacggggtcaggagatcaagaccatcctggccaacatggtgaaaacccgcctatacaaaaaatacaaaaacttcgcccggtatggcggcgcgtgcctgtagtcccagctactcgggaggctggggcaggagaatggcttgaacctgggaggcagagactacagtgagccgaaatcacaccactgcacgccagcctgggcaacgagagcaaaactccgtctcaaaacacaaaaaacaaaaagaatcaagtaagtcaaagtcatgctgatgacagccaattttggtgaagcaaggaagtgtcaattcaatcattaatatagattttgacttttgctgtctcctatgtgccaagcaagatataggctctggggaatcagaagcaaaagagactcccctgttcctctcacagtactcagtacttactgagagaaggacaaaacaaaatgtcctgtctggaatgcagggaaagcagaacttcaggtcaggggatatttccgttgaattgtgtggagttgaagctgaaaatcttaaggaatgtatctaaaattcactttgcctttactttatgcatccgtcacctagagatcacacagcgggcgcctacgatcggcttaatcatcattcacttccatcggatcaactggaaatcaagtcaggtgagagtgctgagtctcagaggatggacgtctcaccccttgccatacagagaagtagaaagggtggtattcaaaattcatggccagactcgaagtcccgggtactatacttcctggtcttccaactctcaaaaagttgtgggtttttttttgtttttgtttttgtttttgttgttttgagatggagtctcattccattgcccaggctggagtgcaatggagtgatctctgctcactgcaacctctgcatcccaggttcaagctattctcctgcctcagcctgccaagtagctgagatgacaggcgcccgccactacgcctggctcatttttttctattttgagtagagacgtggtttcaccatgttggccaggctggtctcgaattcctgaccttgtgattcgcctgcctcagcctcccaaagggctgggattacaggcatgagccacggctcccagcttccaaaagttttaagcagagctcagaggtcttaaccacaggcacatcggaggagcatttttgaaacgctttccagcttcctcaataggaatggaagccaaactgaattgatgactcctttgaggaagtcgagagctgtaaggaaagccaggaacaggggcaagggagagatgcgccccgaatgatcctgtgccaattctttctggaatcctcgatgtgatctcagctgccctttctatacttgacacagtgattgtggcacccactggtctagctctggtctacaaggaacgcgcaa

SEQ ID NO: 1884622 - DNA, 4001 bp, Homo sapiens
tattcttaatatcccagggggatgtttcttttaatgtcacaaagggtgtacaaagtgtacaaaaggtcacagaagtgtacaccttgtgatgttatctgtaatatcctagaaggatgttacttctaatgtcacagggggtgtacaccctttgatattatttgtaatctcatagggagatattacttcaaatatgacagtggatttacacacatggcgtataccctgtgatattattcataatatcctagggagatacaactcctaatatcacagtgggtataccccgtgtgtgtacacccttgatattagtcttaatatccagggtaaatattactcctagtatcacagtgtatgcacaccctgtgatatttttcataatattttagggagatattgcttctaatatcacagtgggtataccccgtgtgtacactctgtgatagtattttttatatcctagggaggtattactcctaatatcacagtgggtgttcaccctgtgatattattgatatttgaccttgctgctttttttttttttttttttttttttgagacagagttttgctcttgttgcccaggctggagtgcaatggcgtgatctcagctcaccacaacctccacctcccaggttcaagcgattatcctgcctcagcctcactagtagctgggattacaggcatgtgccaccacgcctggctaattttgtatttttagtagagacgaggtttctccatactggtcaggctggtcttgaactcccgacctcaggtgatccatctgcctcagcctcccaaagtgctgggattacaggcatgagccaccgcgcccggccagaccttgctgcctttttaaacccacactacaaaaggaatggaacagataataagatattgagattagactgttctgccgtgcaggcgccgcaggacacttttaatatccctgtttctcaggctgtagatgaaggggttcagcatgggggtgaccaccgtgtacatcactgaggccactgcaccctttctgggggaagatgacacatctgaactgaggtaccctccaacgcctgttccataaaataagcaaacaactgacaggtgagacccacaggcagagagggctttatagttcccacctgatgatgaaaccctcagaatggaggaaacaattttatagtaagagaaaaggatccccgaggtgggaagaaaaccaaatatggcagcagggaaatacatgactatgttattggtgaaggtgtcacaacacgcatggtgggggagttgagaagggtcacagaagaaattaggaatttccacatccttgaagcaggtaatttgcaaggcaatcaaattgtgcagctgggagtctaaaagactgagacaacaagacaacagaactagaaagccacagaaacatgggttcatgatggctgaataatatagagggtgacagatggctacaaaccggtcatagggccatcacactcaggagcatgtctttcttccatgcctccaaaaatggcaaaaagagacatctgagtcaggcagcccgcataggagatgactgctgtgagattggatgtccacaatcatcttggggaccatggtggaggtgaaaccgatgtcaggcaaggacaggttggagaggaagaagtacatgggggtgtggaggtgggagtcagggctgacggccaggatgatgagcaggttccccagcaccatgaccaggcacatggacaggaacagcccagcgaggaccggctgtagttctggatcctctgagagttctaggacgaggaatattgagacatctgttgttagattctgtgggtctgtatagtttggacacctttggcctagaaaagagggttgaaaaatcagaaacaagcacaccaacacccagcactgtgtctgcattttggatataagcaattcacaagtaatgttttcagatttcagagcaatccacactcagcaatattttgcagttgtgacaaactcaattgtcttataattctttcatcattgatttttgtgttattcacttcttgctgtacacacctgccttagagacactagattcaagaatgttccgagaaccagatcatcatatataacaaattcgtaattgctagaaaatacagtctatcttttcagaagaaaaatatgtaataaaaacattctcttcactttaagaaaaagtttatcctggaaagagggagcgtggagcctccgaggccgaggactcggtcccagtttggacagatagaagatgtgagcgctctccctctccctctccctctccctctccctctccctctccctctccctctccctctccgtctccctctccctctccccacggtctccctctcatgtggagccgaagctggactgtgctgctgccatctcggctcactgcggcctccctgcctggttctcctgccttggcctgccgagtgcctgcgattgcaggcacgcgccgccacgcctgactggttttggtggagacggggtttcgctgtgttggccgggccggtctccagcccctggccgcgagtgatccgccagccttggcctcctgaggtgccgggattgcagagggagtctcgttcactcagtgctcaatggtgcccaggctggagtgcagtggcgtggtctcggctcgctacggcctacacctcccagccgcctgccttggcctcccagagtgccgagattgcagcctctgcccggccgccaccccgtctgggaagtgaggagtgtctctgcctggccgcccatcgtctgggatgtgaggagcccctctgcctggctgcccagtctggaaagtgaggagcgtctccgcccggccgccatcccatctaggaagtgaggagcgcctcttcccagccgccatcacatctaggaagtgaggagcgtctctgcccggccgcccatcgtctgagatgtggggagcgcctctgccccgccgccccatctggtatatgaggagcgcctctgcccggccgagaccccgtctgggaggtgaggagcgtctctgcccggccgccccgtctgagaagtgaggagaccctctgcctggcaaccaccccgtctgaaaagtgaggagcccctccgcccggcagccgccccgtctgggaggtgaggagcctctccgcccggcagccaccccgtccaggagggaggtggggggggtcagccccccacccggccagctgccccatccgggagggaggtggggggtcagcccccccgcccggccagccatgccatccgggagggaggtgggggggtcagccccccgcctggccagccgtgccgtccgggagggaggtgggggggtcagcccccctgcccggccagccgccccgtccgggaggtgaggggcgcctctgcccgcccgcccctactgggaagtgaggagcccctctgcccggccagccgccccgtccgggagggaggtggggggggtcagcccccctgcccggccagccgccccgtccgggaggtgaggggcgcctctgcccggccgcccctactgggaagtgaggcgcccctctgcccggccagccgccccgtccgggagggaggtgggggggtcagccccccgcccggccagccgcctcgtccgggaaggaggtggggggggtcagcccccccgcccggccagccgccccgtccgggaggtgaggggcgcctctgcccggccacccctactgggaagtgaggagcccctctgcccggccaccaccccgtctgggaggtgtactcaacagctcattgagaacgggccaggatgacaatggcggctttgtggaatagaaaggcgggaaaggtggggaaaagattgagaaatcggatggttgccgtgtctgtgtagaaagaagtagacatgggagacttttcattttgttctgtactaagaaagattcttctgccttgggatcctgttgatctgtgaccttacccccaaccctgtgctctctgaaacatgtgctg

SEQ ID NO: 1884623 - DNA, 4001 bp, Homo sapiens
attgtgtgtgtataccacagttttttaattgaaacaaattttttaaaaatatatattttaaaaatgtctcagaatgtgaaactttagggatactgtgaccattttattcttttctatttcccattttatgtatgtacaagtgtgagataaaacagcaatcaatgtgtgtataaatctataacttcaacaaatgtaaaatgaaaatgctaagtggtaagaaagaacagcataataaaaatttgcatcatgtttaggacaatgcatttgaagataatatttgaagaaatcatattacaattaacttctgttcttattcattggagcttgatccctctaggaacttcatcattgaaacagtctctggtgctttaaaaaaaaaaaaaaaatctgcatgcccacacaggtgcaagtaaatcggaatgtcaggtaatgagacccaggcctcatcatgtctaagctccccaggtgatttcaatcaaagccaacgttgagaaccgaaccggtgacacggatctctacacataacctgcctaaatagattccctagaagcagtttataaggaaattccacatgaactgtggaaaaggatgtgaatttgatgtacagtatgtcctgacttaacatcttggaaagtctcttggaaactgcacgtttaagaaaaattatgtatagtgaaaccaaggtattcctcatcaacactataactaaacaaccttagacaaaccattggtgttggaggacatgctgcacattgtttccataaagtcaattttcagggaattacaaaattacaaaatgaattacttcctgtatataaaaagatggttgtgatttcacctggagtacagggttattgctgagaaactaaaggaggccgcccagatatagaggattcagtcatgatgtttatgctaaacaaaggatcccagaatactcacccattccagttaaaggcataacaaagaaagcaatattcacataggaaatgtggaaaggaataaaagccatcaagcaacaaaaataatgtgacaaaggggttaggatttgcagatgtacagatttaatgtggttgccctttcttactcacacaagagaaaggatggaacagatcatgagatttgactgttctgctgcgcagcctccacagggcactatgaatgtccctgtttctcaggctgtagatgaaagggttcagcatggggatgaccacagcgtacatcactgatgccaccactccattcctgggagatgatgacacagctgaagtcaggtacacgccaatgcctgtttcataaaataagcaaacaactgccaggtgagagccacaggtggagaaggctttatacttcccatctgacgatggaattcttggaatggaggagacaattttatagtaagacaaaaggatccctgaaatgggaagaaaaccaaatatagggatatctaaaatacataatatgttattgatgatgctgtcagaacaggcaaggttgagaagttgagatgggtcacagaaaaaaaattatagatttccacattcttgaagaaggtgagttgtgtaacacaatccagctgtgcagctgggaatccaacaggctaaggaaaaaggacaccaaaactaagaagacacagaggtgaggattcatgatgactcggtagtgcagggggtgacagatgggcagatggccacaaatcggtcataggccatcagagtcaggagcatgtcttctatacatgcaaaaaggacaaagaaagacatctgtgtcaggcagcccgcataagagatgactctgctatgcgactgcatgtccacaatcatcttgggaactgtggccgaggtgaaaccaatgtcagcccaggacaggttggagaggaagaagtacatgggggtgtggaagtgggggtcagagctgccagccaggatgatgaacaggttcctcagcatcgtgaccaggtacatggacagggagagcccagtgaggacgggctgtctcccagtatcgcagggggttgtacacgccttctgggatattgttcctaatatccagaaggcaagaggatgatattactcccaatatctaagggagtgtaccaccccctgtgatactgttcctaatatctgggggagagaggatattactcccagtatctcagaaactgtacacccctgctgtgatattgttcctaatatccagtgggggagagaatgacatttctcctaatatggtaggggttgtacaccttcctgtgatattgttcttaatatctaggtgtagagagcataatattacctccaatatcgcacggaatttacaccacccctgtgatattgttcctaatatccagtgggggagagaatgatattactcccaatatcgcaaggggtttacatcactcctgtgagattgtccctaatatccagggagggagaggatgttattactcccaataccgatgggggtgcacacaaccctgtgatattgtacatgatatctactgggggagatgatgttattactcccaatatctcagggggtgtacaccgcccctatgatattgttcctaatatccaagggaagagaggaagatgttaatcccaatgttgcaacaggtgtacaactccctatatttttgtttttaagatccaggggggagaggatgatattactcccaatattgcagggggtgtacacacccctgtgatggtgttcctaatatccagtgggcgacaggatgatattactcccaatatcacagggggtgtacacaaccctgtggtattgttcctaatatctagagtaaaataggatgatatgactcccaatatcgcagagggtgtacactcctcctataatattgttcctagtacccagggagggagaggataatattacattgaatattgcagagaatgtacacccaccccctgtgatattgttcctaatatccaaggagggagaggatgatattactcccaatatcgcagaggcagtacacctcacctgtgatattgttcctaatatccaaggagggagaggatgatactactcccaatatcgcaggggtgtacacacaccggtctaaaatctaggggagagagggtgatattacaccaaatgtcacagggactgtacatccctcctgtgatattgttcctaatatccaagggggaagaggatgatattgctccctatatcaggggaagtgacacccccctgtgatcttgttcctaatatccagggaagaagaagatgatattactcacaatatcagaggaagtgtacactcttcttgtgatttagttcaggtgatatctcaggtgaggaggggatgatattactttcaataccgcagagggtgtacacacttcctgtgatattgtttctaatacccgttgcaggagaggaggatattactcccaatattgcagggagagtacacccactctgtgatatcgtttctactatccaaaggggaagaggcttatattactcccaatatcgtagaaagtgtatacctaccctgtgatactgttcctaatatccagggggagagttgaagatattactcccaatatcgcagcaggtgtacaaacccctgtgattttgttcctaatattaagggtgaggggggaaggatgatattactcccagtatcacagtgggtatacaccacctttgtaatattgttcctagtatccagagggcaaaaagatgatattactcccaatatcccagaaagtgtacacccccccttcataatatcctggggggagagaatgatataactcccaatatcacaagaggtgtaccttcaccctgtgatatttttcctaatatacagggtggggaagaatgttatgactcccaatattgcatggggtggacacctccagtgtgatattgtttctaatatccatgggggagaggatgatattactccaaatattgcaggggttatacacacccccgtgatattgttactattatcaaggaaggaa

SEQ ID NO: 1884624 - DNA, 4001 bp, Homo sapiens
caaatatgaggaaaataattttgttaaatggatgacacatcccaagaagtcttctgaagctcagggatattacaagcatatgtgcactgttttacagtaatattaaaataaaaataaaaaaagaaatttataaagataacacacaccggccgggcgcagtggcttacgcctgtaatcccagcactttgggaggtcgaggcgggcggatcacgaggtcaggagatccagaccatcctggctaacacggtgaaaccccgtctctactaaaactatttaaagaaagattagccaggcatggtggcgggcgcctgtcgtcccagctactctggaggctgaggcaagagaatggcgtgaacctgggaggcggagcttgcagtgagccgagatacggccactgcactccagcctggactacagagactccgtcccccgacccaaaccctccgaaaaaaaaatctaacacataccaattacttagccaaagcagaaaattatatctaagtttaataatgaatgaccacttttccgctttctgacacgagaaatttcattacacacaagcactctatgtattttcagtaaagctattaagttatttgaatattcctcttttacagattacatattctcaaaatttacctactttgtatttgaattttcatgtagacacctgaagtgtatcttgaagcatgttgcctatgaattaatccactatttttattttatttgacttatgtaaatttaaatgaattacttcattaatctagatactaacctttaataatttacaaatctttaatttcacatcttaatagaccaatgaaaatcacattgtgcacattagtttttatttaataaactaaatctaaacttggtattacatactaataacacaggatttctattcattttatgccttaatgtaggtctccatctattaatataattttattttgggggttatttggatataggtaatccttgaatcttgattctatcattctttccagcttgtttgcttacttttctaactttgggaccttcacagattttgaaaactagtttccacttggccttatctaattactgatgaagaaattgactcaacatagccaatagcataattttaacaaataaattattcaaaaaccattaaatgaggcaaaacattggttgatagctgcaaattttgagaatgtggtaacaataaacacctaaatgaaagaaaagactagaaattagaaaagttgggcttggcacagtggctcacacctgtaatcccagcactttgagaggctgaggcaggcagatcacaaggtcaagggtccgagaccagcctggccaatatggtgaaacaccgtctctactaaaaaatacaaaaattatcccggcacggtggcgggagcctatagtcccagctactcaggaggctgaggcaggaattgtttgaaccagggaggcggaggctgcagtgagccgagatcgcgccaaggcactccagcctgggcaacaaagcgagactccatctgaaaagaaaaaagaaagaaagaaagaaaaattggaatgcaatagagatagttgcataacaaagagactaaaatattgtctttataagagagggtttcagaaatattgttagtttctaaagaaagaagatgagaaaatcacattcaatacaataattagcagtttcttaatgcttttacaagttaattttcttttgggttaaataaaataaaaatattaggaactttgttttatacaaatgcattgaacaatatgcaagaaaatataataactaatataaatctgatgaatcaggtaaacaattaaatttacataaaaagtacacattcaaggggtgacggacggcacctggaaaattgggtcactcccacacgaatactgcgcttttctgacgggcttgaaaaacggcgcaccacgagactatatcccgcacctggctccgagggtcctacgcccacggagtctcgctgattgctagcacagcaggctgagatcaaactgcaaggcggcagcgaagctgggggaggggcgcccgccattgcccaggcttgcttaggtaaacaaagcagccgggtagctcgaactgggtggagcccaccacagctcaaggaggcctgcctgcctctgtaggctccacctctgggggcagggcacagacaaacaaaaagacagcagtaacctctgcagacttaaatgtccctgtctgacagctttgaagagagcaatggttctcccagcacgcagctggagatctgagaacgggcagactgcctcctcaagtgggtccctgacccctgacacccgagcagcctaactgggaggcaccccccagcaggggcacactgacacctcacacagcagggtattccaacagacatgcagctgagggtcctgtctgttagaaggaaaactaacaaacagaaaggacatccacaccaaaaacccatctctacatcagcatcatcaaagaccaaatgtagataaaaccacaaagatggggaaaaaacagaacagaaaaactggaaactccaaaaagcagagcgcctctccttctccaaaggaacgcagttcctcaccagcaacggaacaaagctggtgactttgacgagctgagagaagaaggcttcagatgatcaaattactctgagctacgggaggacattcaaaccaaaggcaaagaagttgaaaactttgaaaaaaatttagaagaatgtataactagaataaccaatacagagaagtgcttaaaggagctgatggagctgaaaaccaaggctcgagaactacgtgaagaatgcagaagcctcaggagctgatgcgatcaactggaagaaagggtatcagcaatggaagatgaaatgaattaaatgaagcgagaagggaagtttagagaaaaaagaataaaaagaaatgagcaaagcctccaagaaatatgggactatgtgaaaagaccaaatctacgtctgactggggtaccggaaagcgatggggagaatggaaccaagttggaaaacactctgcaggatattatccaggagaacttccccaatctagcaaggcaggccaacgttcagattcaggaaatacagagaacgccacaaagatactcctcgagaagagcaactccaagacacataattgtcagattcaccaaagttgaaatgaaggaaaaaatgttaagggcagccagagagaaaggtcaggttaccctcaaagggaagcccatcagactaacagcggatctctcggcagaaaccctacaagccagaagagagagggggccaatattcaacattcttaaagaaaagaattttcaacccagaatttcatatccagccaaactaagcttcataagtgaaggagaaataaaatactttacagataagcaaatgctgagagattttgtcaccaccaggcctgccctaaaagatctcctgaaggaagcactaaacatgaaaaggaacaaccggtaccagccgctgcaaaatcatgccaaaatgtaaagaccatccagactaggaagaaactgcatcaactaaccagcaaaagaatgagctaacatcataatgacaggatcaaattcacacataacaatattaactttaaatgtaaatggactgaatgctccaattaaaagacacagactggcaaattggataaagagtcaagacccatcagtgtgctgtattcaggaaacccatctcacgtgcagagacacacataggctcaaaataaaaggatggaggaagatctaccaagcaaatggaaaacaaaaaaaggcaggggttgcaatcctagtctctgataaaacagactttaaaacaacaaagatcaaaagagacaaagaaggccattacataatggtaaagggatcaattcaacaagaagagctaactatcctaaatatatatgcacccaatacaggagcaccaagattcataaagcaagtcctgagtggcctacaaagagactta

SEQ ID NO: 1884625 - DNA, 4001 bp, Homo sapiens; identical to SEQ ID NO: 915242

SEQ ID NO: 1884626 - DNA, 4001 bp, Homo sapiens; identical to SEQ ID NO: 915266

SEQ ID NO: 1884627 - DNA, 4001 bp, Homo sapiens
tatagcttcttgcttggccacactccctggtgagctggctggttctctacctgggggttggtgggggcacgcagagggccagagccccctccccgctccgccctccgccctccaccctcacctgtgtttgacttgctgcttagctgctccttgggatctgataaactgaacttggaccgtggtaaaggtgagctgagccctgagccaggctcagtgtgctgttatttttagttttatttcacatcccaatcagtaacagatcatgtgttgatttttacaaaggacaaagaaattccgttggttgaaatcattgacttctttttgtcctagctattttctctgccacacttccagtggccacagtggaagtggcaggggagacgtatgccccaggggcttcctgtcaggtgcaggagagggcctctgggtggtccaggccacccgctggcaccatccaggtgagggagacctgccggcttctctgtaggctcctccaggatgtgtggcgggagtccaatctcaaggatgaagggagaatttgtcctcatccccatggcaaggagagaatcctgtgggtcaagtaaagggtagaagatagagaacttaattttacctctgaaagtcatgtggcccactggagagttttcccacagtttttggcaatgagaaagggactgtcctcagtccacgctcgggtgcctcagatggctggagagtgggggtgcgttttgtgctggcctgtcccctggctgggccattccatcaccagccaaccatgaccccagagccagctgggcacgtttccgttcacctcacagattcctggtaagttgtgaccagctaagcgttgaccccatttccagtggagggcccaggaatgtgggagtgtttgagttctgaccttcctgccaggttcctctgagaccctcaaagcctcccagaaggttttgggagaaggttttacaggccagagacactggtccccagcccgacagcactgattccagggccccagtttgacaatcccatcagcctctctccccaaggcagaattctagagcttcttactcccggggcagaatctttcccctgggaagaggtgaagatggttgcaagcaccctggagatttgaaaggattactggctaggaagccaccttgaaccgctcccccacccacccccccaaccaccctcccctcgccttcctttgttatgtcaatattgacttggagtgacagggagtaatgctggttccttgaggataaacctaggcacctgtacccagggggtaaattctacctcctggacccaccagggaagggctccaggaacagggttgaagctggttcccccgagccccaccccatgctgagtgaaatctccaggccaggaaaggacctgaggacagactgaggctggaagctggagtcaaggagcatcccagggcctctcccaggcctcccaccactgcttcccagcctcccctctgtcactgggctggccacagtctgctctgccactcgcctggtggacactcgagctcagggaggccagcaggctgggcggtgggacactggagcttccttcaaggaatgtggtccagcctggctctaccactaggtagtgtgggcacttgggcagatctctttccagctggtcaggaaagctgagagtgagctttggggcccaaggatgtgtcgggagtgaggatagtgagagctccggcctctgatgggatggttaccctgtagtcattcctgggccgtgtttggcagcgaaggagatgtttgctgtgcttgccagggagcggggctgggagagtggacagccacacagtggacagagacagaagagcagcatgggcctgggcagccagctagatgagactcctacctgtcccctgggatcctgtcacccaggctgctaggctgtctgtgctgagcttgggtgtcccgaggcggaaacctggcagatgatttgtctcagaaagaacaggtgagggcgagtcctttggctgcagggaggatggcgagggaagctggccatgggtgaagtcggggctcctttgtatcatcggccatttcaacaagtcctggatggagtcccacagaggcactgggcctgtgcctggctgggtgggggctgcaacaggaagcactgctcccactgttctgggcgggcaccctggcgcgagggccgaggcacagttttaacttctttgtggatacccagtgaaaagcggttgggaaagagggaaaatacactgtctgaggcgacctgtggcagttcacagcgtggaaacagaaggccaagagactggcccatgcgttaccgggccggcctgcctctggctggtgctgggtccttttggatgattgctagctgacctatggggaccagaggagatgggcacggggggcaccagcccttcctgataagggtgcaaggctgctgagaaccagctgcactgtgctgacatgctgggcccccgtctcaccttcagaactgggctgacccccatgttctggggcagcacccatgtggtcagtggggcccaggagggggtcatccttgcatctgcttcacttactctccccagagagccagggacaggcctcatgcccagccctgtcctgaggccttggatggggggacccggcactttccccaacatctgggccagcagctttccatccaagagatggaggacttacagaggccaaggcaggagacaggcctcgatgggcagctgccctggacacagtccctcggtgtccgtgcctctgctctgagcctggccctcaacattgtccaggtagaggcaagtagggccagcaggaggggacccataagcccccaggcagtaggaagagggccaagctagtttggccttgccatactccacagctgtgggcgggtgatgagtagtcatagcgccaccgccttgccggaaacatctaattagggacagagagcaccacaagcagggcccaaccagttctgcttcctgcctcctgccactcagcgacactcagtgccaggtggcacgccagtgtgcactccctgtgcgtgtggccgcagaagggacacgctcatgggggtggcagggagacaggtttggcagggtgggtgggatgaggcaaacatccccaccctggcagcgggtggccgcccatccagcctcctctgcccctcgctcagggtggaggtggaccagagagccaaagcaggcaggcccactccctggccccggtctcccagcaccagctcagccaggtttgtgtggaacagcagaggtgggcaaaggacacaggtctcctcccaaatgcatggatctcaggaccctaaccatgagcctcccctctcgtggagcaaggcagcccagagcagccacccttgtgggctcagcccgtccctcacctgctgtctcctgccctgctgtggtgcagctgggggacctcgctcacaccatccagtactaacaggcagaggagggtagaggttcctgtttgtctccacctggattgagaaatgaaaactgtcatccagctttgaattctcagccaaggtctccaatagctggtgagcctgcatcagaagttcaccatcgcccctgcccacccccagccctgtgggcacagacagctcctgcggcaggggaacaggcctgggtagacagccagaccccgacgacttgagcctgacactcagactcagagaaaggtgcaatgccagcccagaggccaggccggggccaggcgctggtgaatcaaccctaggaatgaggtggctcattaaaggcccccggacagacggacgccagtgcctgcaggacgggttctgggcggcggcgggtgcattcttctctctcagacctttgttgtgttttgagggggcgagagctggggcctctcccgaaacttcagcactgtcaaacgcacccttgctccacaatcacatttctctgcttcccccatgtccctgtcctcctgggagaagag

SEQ ID NO: 1884628 - DNA, 4001 bp, Homo sapiens; identical to SEQ ID NO: 915277

SEQ ID NO: 1884629 - DNA, 4001 bp, Homo sapiens; identical to SEQ ID NO: 915283

SEQ ID NO: 1884630 - DNA, 4001 bp, Homo sapiens
taacaacaacgacagagttgaaacgaatgtttgtatgccatatttgtgcctagaaatattttcagactataaaaccatgcgtacatcaatatttgggaaatgtttgtttctttaaaaaaaacggatattcagagatgctttatgcctcctggcaatttttgcttctttttggatgaaaagacgctatactatttgtactacatacagaaaccgaggaaaccttgacgctatttgcctcctaattttagtttctttgaagtctgcattctgttccaatatatcagccttgtattaaacaccaaaacaggaaaagaaagaaacccctatatcaaatacacagaagagataaacaaggtgttaattttttcaaatattatttctagagttttgcatactacctgcacacgctccacagcagggaggggcgttaagaagaggtaagcctggagcacagtgaaatgtgaccttgccacaaccccatcaaaggtctgtttgattgatttttcttccctgcaaacgatcggaaagtagcagtgacagaacaagtccttaaaattcgacaatcactagggcatacttcatttcatcacacaaatagggagttgaaaggtcgccactagttctatgggtttcctcagcaagacagactctttaacacccaagttttgaaagtatgaactacagtattccacagatgattgtgcctggtgtttaaaaggcccctgcagaggtctagtcaaaatatttacattcctctctgaaactgtaatgcaaaggaaaagggaaaaatcgtgagaggacaaatcaaaagaaaaactttccttccccggcaacaagaaaaggtgtcaggccgctgggtcttctgcagacagccctgttctcttggtgtagatcaggtgcccatcacacacttttccaacggacgtacatctatagcaaggtgcattagctgcattccgtgtcaaaattagggctgtatccatttctgaacacatgtggttaacagaaagcctcatcatcccgccgtaagtgggtgtgtttaattgtccatgcgtgttccccgaggcgctccatggacgctgcaaatagatgggtgagtgatgggcacatatattttctccataaagtgcagccactggctcaaagtgaggcagactctggcaaggaagagagttcgaggctgggtggcggcgaggatgggatgggggtggggaggaggagcaggagggggcgatgattagcgaaggaaatgacccaactccctcccttctgttttcacaatctgcgtcacactcctgtacgctcccggcccgcggcgggcgagcgggcggccgcgaacgccgggtcaggccgggcaccagcctggcggtcgcctcccaagctccgggtccgccagccgctcggctgcccgctgtaggccccctaaagaagccgaggtgggcactcggcctggcgcctgggggccgagcccacgaccagcagaacttctcccaacccagcgcctctcgacgtgggaccggctgggctcactgggctcggggctccggtcggcgaggaggcgccgggagcggggagtggagactctttggtctcccgggctgtggcggtgcaactcccgccgcctgcgttctagacagaaaagccccttctgaccatgcattagtagtactactccattattcctgttagaacaagttaaaagtaagggttgagcccaaaggccccaggaggggggtcatgtgcgccccagtcactcaggctcccctcgcttctccggttcgagttatgccatcaagctaatatattgtgactgctcttctctcctgtgacaaaggcttgcagctgcctccaaatcaatagatgtcaaagaaatatgaaaacaatcatgacacaaaacttaaatcctggctggagcctacataatcagaaatgtgctactgttcttcaagccaccgattaatttatcccaaactttagtcaaatttttattccggtacctttttcccagcagatcctgctacgtctgtcgggtttgtaatgtaatttgtaattactgcccttcatgtggtccggtgccttgaaccatctttaattaaaagcataattaagggaagatctaaagaaagacaattaccagatggtcttttttttagaggcggtagttgcgcagagaggggctcggggtctgtccccgggaccccacgccttgggagggggcggcgggcccgaacggcgcctgcgcactgaggaggccttggcctggcttgcaccccgggtccctccctcaccccaccgggccacaccccgccacaccccgccctggccctgaggctccaccgaggccgcgcccagaggtgagcgccagcgtccccgccgtgcaaagagactctggctttcttcgcttttccccggggggtagcgggatgtgggggtgagtccccagcagggaggctgggagaagatcaaggccgaggcaactttcaaatctgcgaaggggcccccgatccgggcccatcccgccctgcacgcgagcctgagagctctgaagcagaaagaaggaaaggatgcgagggctggaagggagacgaaggaatgagagaagagcgtttgccccgccagatgacagccttgggaggaggccctggcctaggtcctccctgactgggactgactagggtgggagctgggggatcctagccctgcgggcctgggaacccctgggacaaaaagacagccggggagcgccgtcgaccgcagccccgtcggtcaaagtggccccttgacagctattctctcggctttcggttcctcggtgtccattggtccccgggattttcagaataagttcgggggaggggaagaaacccactctccactcctatcccatccccacgtccccgaaatgaataatgcaggcaggagccaagatttctgcattagcgccacgttgccccggcggctggcgctaggatcccgaagtcggataatggaaattaaactgttgttgtgtggcggggatgtcattatgtgactgttcatattcaaagtcaggcagcaatgaattgtaatcatttcaattatcttcaatacactttctttaggacacaagttgtcaaggataaaaaaaaaaagtacattcttgcggctccgtgggtccattttccagatggtttgttactcttgctgcctgatttagtttcggcttttattccccagcctcagattctcttgcagagactccgccggagtgagcggcttctctggcgctgcgggccggctacgctggtcggcaatcggcctccgtgggcctggcgtgcgcattttggttgctttcaggtataattaactttgaacaacaaatatgcctggagctctggatctagtgtccccttggggaagggggccgtcgtattatactctgcgtccttcccagcctggggcggggtgggggctggctgcagcagctgcacccactccccaggccagcgctgcgcgtcagaaaagcatgtgctgggctgtacccactcctccgacagagcccggaccctctccttccaacccagagaactcagggaaaagccgggatccccggagcctgccgtcctttgttgaaattaccctctgcccaatgttcgctccctcctgtgcctgaacgtggggctgcgacaagttggatgtggtgtccttgaagtatcccttcgagcgccctccgcccccagactgggcaaaaagagtaggggtcgcctttgaagcccaagtccgcggctcctatttggactaatcccgatctttacactaatatcgcctctcgggttttcattatactcatttgggaggaaatgagcttttgctgggcaaatagcaccctgcaccccacttctcatagctgtgcaggcccggggcctgaacaaccccgcaggcaatccgggagctgccgatattatatttgtgaaatgtccttttgttgaggcttttaacaccttcttataacgaatcatttg

SEQ ID NO: 1884631 - DNA, 4001 bp, Homo sapiens; identical to SEQ ID NO: 915312

SEQ ID NO: 1884632 - DNA, 4001 bp, Homo sapiens; identical to SEQ ID NO: 915319

SEQ ID NO: 1884633 - DNA, 4001 bp, Homo sapiens
ggctccgtctgttgcccaggcgggagtggcatgactgtaatcacagctcactgtagctttaacctcttgggctcaaacgatcctcctacttcagcctccctagtagctgggaccacaggcgcttgccaccacacctggccttggttaattttttgtataggtggggactcactatgttgcccgagctggtctcgaactcctgggttcaagtgatcctcctaccttgaactccccagtgctgggattacaggcgtgagccaccactcccagtctcccattttttaaacaaacaaataaatcaattatctctaatcccttgccatcaccgaaaacccagatggctttaaactcatttacattttaggtaaaagcccagttcaattttgcattcatgtctcacaaaggagtagtggtggaggttttttaaaaattttttttgagatcactctggagcgcagtggcaggatctccactcactgtaatctccgcctccctggttcaagccattctcgtgcctcagcaaaccgagaagcagctgggattataggtgcccaccaccatgcttgaccaatttttgtattcttagtagagacagggtttcatcatgttggccaggctggtctcgaactcctggcctcaaataatctgcccgcctcagcatcccaaagtgctgggattacaggcatgagccaccagcccggccagtatacgctttgctttctgcgcacagttcctgctatgagactctcagtcactaaacaggtctagtttctagaaaatgcccacctttcactcttgtaatatcagttttctgctaatgggctaggccccagaaggacttccaagaagagcccaaggcacagaaaaccgagggtaaataataggatacaaagtgacaaggctttaacagaggcctgcccaagcattagctcaactcgctgtgaaagcttggcaaatgtatcactgagaagatgggaacatttgaaatacccgtcctttaagaataagtaggggttcggctgggcgcggtggctcacgcctgtaaggccagcactgtgggaggccgaggcgggcggatcacctgagttccggagttcgagaccagcctggccaacatggtgaaaccccatctctactaaaaatacaaaatcagctgggcgcggcggcgagtgcctgtaatcccagctactcgggaggctacgacaggagactctcttgtacctgggaggcggagattgcagtgagccgagatcgtgccactgcactccagcctgggagaaagaggagacagagcaagactccatctcaaaaaaaaaaaaaaaaattagttcatgggcgaggtggctcacgtctgtaatcccagcactttgggaggccgaggcgggtggatcacttgagatcaggagttcgagaccagcctgaccaacacagtgaaatccccgtctctactataaatacaaaaattagctgggcctggtggcggacgcctgtaatcccagctacttgggaggctaaggcgggagaatcgcttgaacccgggaggcagaggttgcagtgagccgagattgcgccaatgcactccaccctaggcgacaacgcgagacttcatctcaaaagaaaaagaaaaaaaaagaattaggggttctccacgtgcagctgggaaagacgttccaacaatcctcatttgtaccaggccctttggtgggccagtcccttagggcatctctaatgctcctaatgtccatcctagaaattcagggagggaaagaaagtgctggggcgagcatgggtcaggagagaatagggtcaggatttagggccctgaagaagcctcgggcaaactctttggacagacagaccttccaagagggccctcaggctccgcacgtggtctgggcgggaagtgcgggcagagagactaggaagccttcccagcagcgccggcggaccggggcaaggaaagggtcgaatagttaccatgccattctggggccgtccctctgattggcccgagctccctcagcccgagtcgcggcgctccaaggaagggggcggagtctctatgttgcgtcaccacccttcccgacaccccgccggtgcttcccaatctagccattcacaagcccacttcgagaggccctgtgtgacgtcacgacacgctcccgccaaccgcggcggcgaggggcgggactccacggccctctcaccgctcctaccctgtgcctccccgaactccttctgcccctcctcttccctctcgccccttcccccttcagttcggtttcaaaagacgcgttgcccaatgaataacagggtcgacccagagtggcggccgcgtccaccaattcgcggacggcgagggcggagcgtccgcaacgagcctctgacgccgggcggcgtgtgacgcagtcgggccctctgcgcgctgcgcccgaagcggcggtcggtggcaggggtggtagcggcggcggcgacggtttcgtgggggccgcgcgctgctctgtgagcggcgggtggcagcaggggactcctgacacttccccttccccaccgaaccgcggtaagtcgggagcccgagctgcagcggccgagaccggcaggtttctccccccttccgggcgggcggacgcgcggggcgtctcagggcctctccgcttcgaagtctagcgccgctgcgcgcaccttctggcctgagagaggggcggtgctgaggacccgggggcccggagcccgggaggcccggctttggaggccctgggagagaatggacatcagtggggtctaggcctggaggtctccagttgctgcccacgcgagtgggtgtctgtctggttgtactcattcattcagtggtgtaaggaccccacggtgggctggcctttccggggtcagcgccttgaaaccctgaatacggtctgccccgcacttccttgaccgtcatgtgggactgggctttatttgccttggcttctccataagggaagtgggcaccccgaggattagggtgagtccgaagtttgggagatttttaagataatatctgagaataggagtcggttcggtggagcaaaaggttcttttctattttcccacgtgttcagtgtaaagccagatgaggagacagattgagtttctggattactatagccataaggactttagaaattgtttaagtcaatccccctaccttacatcagttttgtagatggggaaaccgaggcccggagtaacaggcaggattagccaatgccagatttttgacagtctaaacagttttctactacctcaccctccctggatatttcagtctcccattattaagaattccctttaggaggtcggtgcggcatggacattaggtagctaaacgtagatgtagtcttcacagcgttttccgtttagttgctaccagctctgttcacgggtaaggtggaagcttcgttagtggtaccctaacctagagcttgagaactaaacttagaagatggttaaagaacgtcagcgttgttatgtatcggaaacaaatcggtaaaactacaagccattgtttccctttctaaatctgaattttttgacttgtgtcagctgatgaggactcggagtcagttagggatttataacagtactggaatagaaagcaggaaatattgataagacttagaaagccaggtaggagtccgtttgtagtagttgtacctcggaactcatggctcctttcaggtacagaattcaaagtgaagtattatagtagaataaggtgaggaaataaaactccgttttggaggaagaagctaactggaataaagagcaaaaagagagcagtgatcattccctgtgacggtcttacaaattcgaaaagaaactcgagttaactgggttacagtatgtttacctggtggaggaagttagggtatttaaaaaccaaaactagaggttggacaggataaaggtactgggaaatacttgggtaaaattattctttttgactcttcagatttgat

SEQ ID NO: 1884634 - DNA, 4001 bp, Homo sapiens; identical to SEQ ID NO: 915321

SEQ ID NO: 1884635 - DNA, 4001 bp, Homo sapiens; identical to SEQ ID NO: 915322

SEQ ID NO: 1884636 - DNA, 4001 bp, Homo sapiens; identical to SEQ ID NO: 915325

SEQ ID NO: 1884637 - DNA, 4001 bp, Homo sapiens
tagtcaaagcaagatatatttacttaaaactacgatgtgcagtttaaagcaccaaaaaggtattagtgaaaatcatagtatttgaagactccaaaaattaatagctcatggcaatggatctcccatatcaggaaagtgttgggcattgatctagatttcagaaaacgaggggtgtgacaggtgtaaatcagtgatccaaggctgttgcctgcggtcctatttatggctcactgacacctctctgatggggtgaattcagcctgattttcccctctgactctgcaggctgcagcaactcactgggagccatgggaaagagagaaactcctccctccaggggtcctgggcagagacaaatggatctcccctccccctcccttatctgaagagggcttccctctgagagtttatggcagcctgacctccagcctctgggttggagaatctggccgcttctgtaccacataaaaagggcaagtgcattcattattattatattattatacaatgtataatatataatagcgattatgctgtcagcagccagagactctgactgcagatcagaggctagggtgacataaatccacctagtgaagtttttgaaggttctatgtgaaggtgagaggattctaatctgtctataatgggggctaccactgaagagtttctcccacaagcaacgttggtgggtggatttgagggtattgggaggatctggacaaacagtagtgtgtgtatctgggatgtgatataagaagggtctcaattgcctcccctgagccaggcaatgctaacagctctcatccttgcccatgacggaggcgggtgagtggcgacccagaggcctgagaagagctcaggggcagccttcaacttcttgggtcagattctttactgaaaacccagaggctgggtttcactttctgctttcccgcttttgtcggtgtctttgtctgggcttcttccaggccccctgcctggcctggggtcagaggatcaatggctgcctgactggctgaaagggctcctctatggggagcaagaagcaaacttccagaggcagaaggggttctcttgtccctttatgcggagggccatgtgctaagttgaggaagcaagcaagtgtgctcctgtgtgtggctcttagtaggactgtgatctctgctgagtgaatggaggcgcttgtgggtctacacatgcctgcttttgtcttccactgtagagggcatgtaaggagcccatttcctccctgatgtagatgaagccaccccagcaggcccaggctgaaacagcccagctggtctttccctttatatgactgcaccccagcccccagaactctgggaactcactgagtttcttgaggactttttattagaatgaaaatagcagtggcttagaacaggcttgcctgacatttgcaaagaagtgctttactgacaaagcctatccactctttcctctctccctctgccccaccttgaaccagacaccccgggaagcccacagcagaaaaagctcttgagaccaggaataactaaccagagtgtcatctgaacaccttttctggggccagggtaatgagaattattcaaatgcaatcataaaaatgaggccagccaggcaggaaaagggggagggggagtgctggtggaaggaaggatttcttgcccgttttaagtttcatcatttctggggagttctcttggggtccacagaaaatctcacctcatctcggtcccctcagcaccggtgatatcttggaactcggccccggttgttcgctaaggaggacttggcttgggggcgggagggtgctccagagttcctgggggtccaccgcactccccatccgaggctcctcgcgagcggagccgcttctccaggccgcccgcctccctgccgcaggagcaggcccgcgcccgccgcccgagagcctccggtagagggagacactccagcggctcctccgacttggcagcggccgggccgggagtgggtgggggtgatggggggtggggagaaaagggggagtggggagaggggaggtgtgtgaagggggggtccggggggcgggtccctgtgccgctgacgtcccgagcagtgctgggaagtataggctgtgttgtcacgccggtgtcagtctgatgaagattggcatcaggtaagctgtcattcatttccatgtcagagacgcttttgcaggcggcggcggcggcgcggcggcggctgctgctgcgggcggctgcctcagagcgcgtgtgttttattccagtccccaagccagagtattattcattgcgacagggcaaggaggagagagggagagagggaggcagcagggaggagagagagggaggcagcagggaggagggaggcagggagcagcgagggacggcgggagcgtgcagagagaagctggggaagcgccgggagagcgcggagcggagcagcgcgaggggcggcgaggccgggcacggaggctgcgagagccccgcgggccgcccgctcccctgcccggccagcgctcagccccgccgccgccgccgccgccgcctcgccgcgcttgggcccgtggccggccgcgcattgtcctcgggtgcaaggagccgggctgcggactcgaatcgccgcgggcccaaccccgtagcgggcgggcggggagctgtgcgccaggagcgccaggggacccgagaataggaacaggcacgccggcccgagcccgggtgcagaaggctcccggccgggcgctccgcggggagaggctgggaaccgcgggcaggctccaggttctctttctcccggcttcgggcgtccttggggccggcgcttactccgcgccaccagcctggagatgctttccagcggctggaggcgggagcggtcccaggctggggccaggtgaccggaggagtcgaggagccgcggccgcggcctggggaggcagggcgaatgagggtttgcagacggatcagtggagacaggggaacaccggcggggcccgggaagccaggatccgaggggctacacgcacggaccctcacccagggaggagcgagaatgtgtagggtcaccggctttccatgattgctggggatctttggtgaggcgggcgtaggggcccgcgcgaggcttgggaatcgggagcccttctggctcgagaactaggggatgagttcgtaaaagagggaactgaaagcgatcgagagcggagagctgagggggatggcgcaggatcccgaatctgccgctcaaagtttgcatttctttcgggttaggagacgggctttcctggctcccgatccccaggaagaaacgagcgaaatgggccgtcctttcccggggctcttcacgggggagccgggggtttccgcgcggtggggagactcgggttgggaattgaggggtaggggcttgtggatcggcctgaattagggctgggttttaggaccagtctagagttcggtttataggatccagactgtttacggaatcgggatcgaggggccgataagtagtttacacgccggccagagcagagggctggaggtcggagttgggggctggaggaacgggtggcgtttttaggattcagtaacaggatcacagctttttcttgtggtggaagctattggaatttggggagggtagcacgaggggtcctgcagctccgcgtgtgaaaaagcgtttaggtaggcgatgaaagtagttgatctgagccatggcaggcgagccccgaatttttgctgcttccccctgaaagtgtttctttaggaggagaggacttgggccacacaggacccggtcctaagagagcgattccgggaagcggacagatcgaagagaccttctgggcgaagcggcagggcagcctcgcggggctgggagtggatctgaggtcccgacccaggcggctcggagtgctccaggagccacctgggtctgcgggcgcagcgcggcggggcgggagcggtggcccgcaggggccgcggcctgcg

SEQ ID NO: 1884638 - DNA, 4001 bp, Homo sapiens; identical to SEQ ID NO: 915352

SEQ ID NO: 1884639 - DNA, 4001 bp, Homo sapiens
atgttttatacatgaatgttcataacagcatcattcatagcagtcaaaatatggaaataacccaaatgtccattaatgatgaataaacaaaacttgttgtatccatattacagactgaatcatgtctccaaaaaggtaatgttaaagccctaacccccaataccttaaaatgtgaccttatttagaaatagaattatagcacatgtaattagttaagacaaggtcatattggagtagggtggattcgtaattcagtatgactggtgttcatataagatggacgtgcaaagatacagatatacagggagaatgccatgacaatgaaggcagagattggaattacgcagctacaagccaagaaataccaatgattgccagcaaaccaaattagctctaatctatgtaggctatctgtagagttaaaagcaaagcataacaaaacaaaaaaaaattccaatatgattaaaattggtagtaaattggacttactgtttggcctggttaacatgaacccctagtgtatagctcagccatttgtatgtcacctgtaacaagaaaaaatttttcaaatgttttattagatgactccagagtgcacatcagtcccgaaggtctgttgctaaagattcctattcttagatgattatgccttacaaattacaataaatgccactgcagttttcccaagaactatctatctgggtaggcaggacctatttatcttaaaaatgctaagaagtttgtttcatgaactaatgaaaagtaatctaaaaagacaagctgaacatacctaacagaaaaaactctcattttcctcacattccttgttttactcaggccctttcctcatgatgttttttttgggggccaccagccaaagccatcctaaaactcattcagaagctagatgactttgaagtgtgatgtctcagaaacttctaaagaaagttgcacccatgcaaacattaaagggcacaggtggtgcaggggtcaggaaacgaaaaaagtgggtaaatatttttataagagattagattgggaactaccagcatcaagccttcatccctcctagacccaggatgcctgcactctcttctctcaaagtctcttccaattccaaatgtcaagcttccaatagttagaagacttgcacaggttaggcaaaggcagtgtgatgtagaagaaagcattagtaagaggacagacctaggttgaaaaactgcctatcccttaccaaacgcaaataaacaagttatttggcccctcagcttcaatttcctcatctcgggataccaccaccgacctgggatggggtgcggggaggtcactgtaaagattaaagtgccttggcacacagcaggcactcaatcatcacggtttgcaaagtgcactcacatccatcaattcgctcgatcttttcctcacccgtgtgaagcggatcaaacctctatcaatgcttaaatttccaggaagaggaaacagtatctggaggttacgcaacttgtaacttaacacagttaagacacgatttcctcaactgtaaacttaaaactttaaacgccaaccaccttaaaagaaaggtgtagggacgccttagaactctcagccaacggccctccctccgcgcccggtctccgcggctccagccccaggctctgttcccagcacgcccacccaagggacgcggacttccgtgtgtgctggaggaccttcccgacgagtcctcgctcgctctggggcacagagctcgcccaggtcccctcgtggggacctgtctcccctggtccccacgaagccacaagcagacagagggtcaaggctcccgccgccctagccgggcccaggaccccggtcgcacgcccgcgttccccagtagtagctgctcacgatcttgttttggtccgtgacgaactcgtctatattttccagataaagctggtccgccatggtgcggcagcgctgggacccgcctctaacccctctctcaatcacagccacagctcccgccggcgggaaacgtctttgctccctcccaggtcccgggtcgtttccccggcaacggaggcgacgcactacggcggccctcgaagggtcaaactagtcagggagacggcgcagacggaggtaggcagagctagtagaaaacaccgaagtgcggggcctcctggctggttttttcctatacctacgtacctatgataaagtttaatttataaattaggcacagtaagagattaacaaaaataactaacgataaaatagaacaattattattatactgtaataaacattagtgaatatggtctctcaacagatgtcattgggtataatatttccctaccgaggttggctgcgcgtgatgaaacccgggaaagccaggataaaggggagactattgaaaacaagtaattttagtagtgctgccaactggggaaaagtactgcctgttataatccctcagagttgagaaattagggaaggtttttccagaggggttgaggagaggctgagtgtttcggatagaagcaggagaatttgctggaaaagagttcattatctctggattgttaggagaagaggcggatgagagagacttgggagaaaccaaatcgttgtgcctaggagactgtgaagaggcgcttgagctgtgttctcaggaaaacttggagaaaagttatcaggttggggaatttcaactcaaatttctcctagtatcacccccgcaaaaatctttaataattgacttcagcataagccggtgcagttcagtatcgcaggtgtagtgcgtaagagagtgggctctagagtcagacttactgggtttgaatcctggttttgctgtttgttgtgtaaacttaggtaattctttagccactaggagcctatttccttatctataaaatgggaataataacagtacctacttcaaaggcttgtcgcgacatgcattcattcaaagcatagcaaaatcctgagaaaggccagatactattctgagtgttgaggtgctggggctgcagctatgagcaataataaaccgagcctgttcacatgtaacttacattctgagatttttaagtgaaagatagtggtggtttaaaatagggtagcagaccgggcgcggtggctaacgcctgtaatcccagcactttgggaggcctagggggatgaatcacctgaggtcaggagttcgaggcctgccaggcccacatggtgaaaccctgtctctactaaaaatataaaaattagccgggcgtggtggcacgtgcctatagtcccagttactcccagggctgaggcatgagaatgtcttgaatccaggaggtggaggttgcagtgagccgagatcatgccactgcacttcagcttgggaaacagagagagactccgtctaaaaataaaataaaatggctcggcgcagtggctcacacctgtaatcccacactttgggaggccgaggcaggcagatcacctgaggtcaggagttcgagaccagcctggcaaacatggcgaaaccccgtctctactaaaaatacaaaaattaaccaggtgtggtggtacacgcctgtaatcccagctactcgggaggctgaggcagcagaatcacttgaacctgggagaccgaggttgcggtgagctgagatggtgccactgcactccagcctgggaaacagagtgagacccccctcaaaataaataaataaaataaaatagggtagcagtgccaggcacagtagctcacacctataatcccagcactttgggaggccaaggcaagtggatcacttgagccccaggagttcgagaccagcctgagcaacatactgaaactccgtccctactaaaaaaaaaaaaaaaaaaagccatggtggcacgagcctgtggtctgtggtctgtggtcccagttctgaagtgggaggatggattgagcccaggaggtagaggttgcagtgagcacttgatcatgccactgcatacagcctgggtgacagagtgagacc

SEQ ID NO: 1884640 - DNA, 4001 bp, Homo sapiens; identical to SEQ ID NO: 915353

SEQ ID NO: 1884641 - DNA, 4001 bp, Homo sapiens; identical to SEQ ID NO: 915359

SEQ ID NO: 1884642 - DNA, 4001 bp, Homo sapiens
gacaacaagcaggggcctgaataaagatctggaggaagagtattccagggagaggtagtagcaagtgcaagcgttttgaggagcccccacattagcagcttaaacaacttactttctctctctggtaaaggaagagaggtgagcatctcaggcaggcccggcactccacgatcatcagggatgcaattggctctgccatcttcaacattgaaccctaccttgtgacccgaaatgggtgccccagctgtagccatcgtatctgcggccatcataatctgcattccagagcagaaagcagaagggttaaaaagagaatgcctttccccaagaggacatgtcccaggggttgcagttctattgcattggtcagaactttgtcacatagtgacatgtaattgcagaggagtctgggaaatgtggcctctactctcagctgccatgtgcctgacaccaaattaggggtgcgttcatcaggaagaggggagaatagatgatgagagacggctggccatctgtgccacagtgacaaaggcgagactgaaaccccacgtcctgactccccagcactgtctctactgccctttcccatctcctgtccccaacatgatgagcagatagcagcggggagcaaggccaaatgtcaggggatgcctggggagatcaggctgagggagctgagggctggaggaaataaaaggaggaggtgggtgtggaggggttccaagggggagctgttacagagggaggcccagctgtagattcctgtccccacggcttagaagggctggcagctggctttgaggcccatggcagggagacatcgctgtcaccttcttttgggggaggcagccagtgacacagcttcagacagctccctattgttcccagcagacagggtggcaggttggcgggatcccactgtggtggcaggttggggaagggcgttgttaagcagttggcaaggccagccggcccagttccctgcccccatgcctgtgctggtggctggacaagggcagtggtggctccagactctgtttatctccttctgccaggtactgagctgccagtgtctcctcatctccctcccttccttccctcccttccttctttcccttccttccttccctcctctcttccttcccttccttccctccttcctcccttccttccctccttcctcccttccttctctccttcctcccttccttctctccctcctccctcccttccttccctctattccttccctccctttcttcattccttccctccttccctccctccttccgtcttttcctccctccctcccttccttccttccttccatccttccatccctccttccttccttctttcctccctcccattttctgctccctctacttcctcccttcagtcctcccctcccctcccctcccctccctttccttctcctttcccctcctctcctctttcctcccgtcatatccctctctccctcttttcttcctgcatgttcttccttcctgccttttctcctcttccccaccatgactcacttccttctcctgctctctcagcctcccccaccccctcccagcccatgccccactctggggtccctccatgcagctggggcagcactgggcagaggacattcaggggcagcctgggtggcaggtcgcatctgtcccgggcccttcccagaagcctcctgtttcctgtccagcatcaggtgttaggagaggtcatggcaccccatcgtctcacctcctgctacctgccacccactaccctgtgattccagcccacccccagaggaggacaagggactcacattcattgagctgcaactgcatgctagctacttgcatggcacttcaatttacttaagcctcccacagtccattgaggtggcttactcttattcccattttatagatgaagaaaccgaggttcagagaggcagagcagtgtgaagccacacggtatgctgccgggagagatggtcctcaagacagctggaacaaggtggatcagaggctcctgctgtcggggcctcccagtgccagccctgactccagctctgagcctgatgctactttctggcccttgatcccatgcttgtttggtcactcagccctcatcttcagataaatccaggagtaaggagagaaagagagactgggaccgcaggaggtactcaatgatctttgcagtaggcccagatctttgcagccaacttcttggttcctcagtgctgctcagcctgaaactctctaaatagcctctctccccccacagccaccccagcatacacagatacacaccccacacatggaacagctagagcacatgtggcctcccacaccgccgcttctgtgggtgtgagggcgtagctgtcgtggtgatggtggcagcaatggaggtggtggggttgttgtagtggcagtggtggggtagtggtggtgatgacaaacagcatatcatttagccacacataaatctacaagatacatagtatacatgcaaactataaagaaaagctgcacaatgattaacactgagtaatgacaaattgtgctcacagatagataacgtttccaagaaaccacaaaccacactcatagacacagaccaggctaactgtgagaccccaccagtgagtaagcaccggtgaaacaccccttcctctccactgcctttctgagtgacagtggcttgctcaccagacaacgccggtgcggttttaaccctcctgcctccaagatcaaaattattaagtgcccatgcactcagtccagaactggacttgctttcctggttttccttggaatcatccagccaagcctagatcttctcaggggctttccagatccctttccctgagacaccaccgaggtttccctgcgctgtgcactcccttgcagcgacaagcttacgaaacctcccattttcttactgcaatcatgttcttgggtctctgggccatgggcttccacagcacaacacggaacccagtggttaacctgggcagggggatatggggcagccacagggtcagggcaagcgtgggcttggaaagcattgggaaggtttcttaggctgggtttcttagtctgggcttatacaagccttcatttattattattttacgatttaacatagtcttttaaatgtgcgtacgttatatagattattttatatgtatgtttcacagtaaaaagtaaaaataggctgggcacagtggctcatgcctataatcccagcactttgggaggccaaggtgagatgttcacttgagcccaggaattcaaaaccagcctgggcaacataacgagactccatctctaccaaaaaaaaaaaaattaggcaggcatggtggcacatgcttatagtcccagctaccgaggaagctgaggtgggaggatcacttgagcttgggaggtggaggctgtggtgagacatgattgcaccgctatgctccagtctggatgacagaacgagaccctgtctctaaaaaaagaaaaaaagaagtaaaaattaaaaagttaataaaaaagaaaaaaacaacaacagacgccatattcttgccagatgcccagggaatgactctggcctttttcctgggccccattggcctgggaccagcagagcagccctggggtcctggaggagtcagggctggttctcaggactggggcgaggccctctgaggggaggaggtctgaccagcaacttgccttcccctccattcagggccttccccacatgcccggaattcctgacctggccctggtgctgcctcccttagggacaagaggtgggggcctttgagtgtttgtttagaggcatagtttccttaaatggctgggtttttaaaaaatgtatgtgcctgcagctaacttcctctccctgacagccagggcatcggatgcaggagggcaggcaagagacgggagggggctgggaggagtccagggacgggggacagaggagccagaaagctaggcaaggag

SEQ ID NO: 1884643 - DNA, 4001 bp, Homo sapiens; identical to SEQ ID NO: 915385

SEQ ID NO: 1884644 - DNA, 4001 bp, Homo sapiens
catgcactactatgcccagctcacacagaaggtttctgagtaatctgttgctctttttccctacaatttgtcttccatataactcaaactgacaaggctatggcttacataaagaaatatattataaatcaacaacactcatgataagtttacataagacatgagaatacacctgaatcaccaaccgggaaaaatgattgaagagcttgaaattaagcctaagtgtaagtctctgttaagcttacaacattacaatagttaaatcgaaggttagaaagaaaatggtagacattgctccttttcctgtacttaccaccattacttagagaagtttctgaataacaacaactttgagcctttttcattgttgtattcatggatgacaccaacacatactacttctgcttaaaaatcaaactcattcatcttgacttgttcccagaaacatgacacagaagatcattttttgaaaaagtatttttgtaattaccatctgcatacacctgagagactgtttctaacatgttttggtcatttttaatcattctatctgcctttctttgttataaggatctatttttaattttattcactcctaacatagaggggaagtgcataccttcaatgacgcaaagtaactagttaatgttgtttcagaataatatgcaaaagggaagggaggaaacagcacaaagtatatcatatttttacacatcagacaccttcaggaagaaaggacatttctcatcttagtgtgacagactctgaaaaagaacacacagcactgtttcagtgacacaagaaaaaaagtacagttcattttgagatactgtgcaaaatcactcaaaagacaattaactttggtttcagtcacttagttaaaaaaaaaatttatccatgaccgatgttactctggaatctattgccagacgtcagaaggcctatcatcaataatatcccacccctcccgccttttctgagacacgggcttgctgtcgcccaggctggagcacagtggtaggatcgaggctcactgcagcctcaacatcccgggctcaagcgatcctcccacctcagcctctagtgtagctgcaactacaggggtacaccaccatgcccagctaatttttttgtttaatgtttttgtagagacggtacggggtctccgcatgttgcccaggctggggttgaactcctagaatcacgctatctccccgcgtctgcccccaaagtgctgggattaaaggcgtgagcgaccgcacctggccaatatcccctttgaacatctgctttcgctggttggtaaaaaagtgtcattttaaatttagtgttactccttcaggctattccctctctcttcttacttgcagggccaaagcaacgtctctttccaccttggtcaccttccaacaacgatttcttcggacgcctttgttaatcattcctgtatgaaaaatcagtgaatctgaagctttggggagagtgaaagggggttggaaaacaaacggcaaaacaaaaatgcatttcggaggactaccccaactctgtgggtggaagtgggcttctccgaataaaggcgagggtcgccgcctcgggtcctcgcacctcaacaaaagacaccaactctctcaactgtactgttaacagatctaaatgatactccaagcccaaaagtaaaccgactctctcaatctcttagctaaaaaatggagaaggaagcgtagggccccatgcaaccccttcaggagctgagaccgaggctcactgggcctctggatgccgcttccagtcggtcccgccctacatcagtccccagcatggcctccaccctctggttcccaggttcgtgcccgcggctatccgaccagatcgtcctccacctcaccgtccccactgaaccaccacttgactcctgcgcacccctaaaacctctgcccggctccgcggaatcgtcccagtactcctaacatggcggccgagtcccctttgctccttcactctgggcgcgtcccacttggagcattttgggcattgtagtttcggggattgcctgggtatcccttcaggacgtaagaagactacagttcccagaaagcaccgctcccgagcatggctattggggacgtttggacagagggatgatgtcattgcaaaagccccactgcattcattgtgctacggtctctccaccccctgctgctgctgggcttgcgattgccgctcgctccagctgagctaagtgtagcagcagcaccagggcagggactgactccagcccttggactcaggacatcgcagaccttcccttgcgtgcgtgactcattcgcacatccatttctgtttatgcctggggtggggagaaaaatcccaaaccaggtgagttgaagtgatttattcaaatgcttctaccaagttattcctcccgcttagttctcaaggctttcttttgggaagctgtgagcggtggggaggtgggggggattggggagaggcttgcaggcacagctaaggggaaaagctctgtgccatttgggtcactgcaaagaacaactccagcaaccttcccccgccagaggacgggtgcctgccaattccctagtcgcaactcctctcaacctttttgaggcggagagagggggctgggctgggaaggatgttggggagtgctcttggaaaatctgaggaaggcagaggtgggggactgcagtcctgtcacacacggcccgagagctgaggtttgagtgggaaggggtgatgcgtggggagaaatggagacagtgaattaatgtggtcgcactactttagaacatttgaatgtcgcttggacgagcactagttattaatttttaagatgaacgtgcttaagttttgtagggctttattttatgtgtgtatgtctatgtggtttgtctcgccttttctgctgatttgaggtgacagtgtcctttaatggtgcactccgtgccagtcagaaacatttcacgtgtctggcgaaggttctttcaggctgctggaagcagcgtttttgttaaatgttttccgttctccgactgctggattcaagattgtttggaagtggagccgacagatttgtgcttgtgtgttttaaattacattgcataggctctttgccactgacaatggtaccataatgagctgctgtttcctgaggcatagtcactactcacaaataacggtttgaagagatcgattagggaagaggggttcattttaacacattagagaaagggaaagttagaagcgctgttaaccttcatttgccattactgaaaggtgcccatggaagagtgattttggttgttttgttattgttgtttttttaaacgaactgacatttaacaggagagaaagcattctgacttacatgatgctcttgtaagagttatagggataattagggcaatagatatgttactttgagataaacagctggctggctccacaacagatggggccagtcttggctgagagatctacacccttggaaatgaatgggcctggggtcaaccacaccccctcttggaatgtcaaaagaaggagaaatgccagagtatttgcttaactctagaatgctaaaccttttcctagctgagtcagacatgggcgaaattctttactggctgtcttctgctgctaagccaattttgttcattttaaattcagatccttaggtctccaaagttgtagctgtgtgatatttcattaaatgctgcttgatgctgaatgcaaaggacagtccattgtatgggctttgtagtagagtgatttattgggatgccaatgagcagcttttggatttgggaaaagatcaacagttagcctttgcctctgcgtctctctgttgatgacgctctgctcttctggacaccctacccttctctcctgtactttcatttcttccccccaccccaccccatcccacccacatctcttgaaattctgtttatttctctatctctccatttgcagtttacattttt

SEQ ID NO: 1884645 - DNA, 4001 bp, Homo sapiens; identical to SEQ ID NO: 915442

SEQ ID NO: 1884646 - DNA, 4001 bp, Homo sapiens; identical to SEQ ID NO: 915446

SEQ ID NO: 1884647 - DNA, 4001 bp, Homo sapiens
gatcattttgcacttgggggtgaaaagcacctttcctggactgcgtggccggatcaagccagccctagtctgtctcccggctccattatgtaatatgtgttctggactgttagacaagaaacaacaaacgatttaagaaacgatttaagaaacactttagaaacgattcaaatcattaatgatgtgtggggcttcgttctggaatataagtcacgaaagaaagatgggaaaaggaaaccgacgattttttttttcttttgagagaacttcgcccttgttgcccaggctggagtgcaatggcgcgatctcctctcacctcaacctccgcctcccgggttcaagcgattcttctgcctcagcctcccaagtagctgggattacagctggtattactaaaccaccgcgcccggcctcgtttactcttcaagaggcggacagcgaggcgcggtggctcacgcctgtaatcccagcactttgggaggccgaggcgggcggatcatgaggtcaggagatcgagaccatcttggctaacacggtgaatccccgtctctactaaacatacaaaaacaaaactagccgggcgtggtggcgggcgcctgtagtcccagctactccggaggctgaggcaggagaatggcgtgaacccgggaggaggagcttgcagtgagccgagattgcgccactgcactccagcctgggcgtcagagactccgtctcaaaaaaaaaaaacaaaaacaactaaaagtactctgtgctatgctacatgagaaacgcagagaaagtcatcgctcagtagaaatacagtaatagcgcatgcgtaaataggagagggaagtcgctactttacctagagattaacacagaaaagcaacaaattaccagtttacaagtaaaccctttatctaacgcgaagatttatttattttttgagatggaatcttgctctgtctctcaggctagagcgcccgccaccaggcctgattcacttttcttttggttttttagtgaagacgggatttttcacaccatgttagtcaggctggaattacccaatccgcccgccccaacctcccgaagtgctaggatttcacgcttgaaaccccgagcgcgacctaggtttaacacatcaaacgcgaaaccaggccgggcgcggtggctcacgcctgtaatcccaccactttgggaggccgaggcgggcggatcacgagctcaggagatcgagaccatcctggttaacacgttgtgaaaccctgtctccactaaaaatacaaaacaggccgggcgcggtggctcacgcctgtattcccagcactttgggaggctgaagcgggcggatcacaaggtcaagagatggagaccaccctggccaacatggtgaaaccccgtctctattaaaagtataaaaattcgctgggcgtggtggcgggcgcctgtagtcccagccactcgggaggctgatgcaggagaatcgcatgaacccgggaggcggatgttgcagtgagctgagatcatgccattgcactctagcctgggcgacagagcaagacgacgtctcaaaaaaaataaataagaaataaaaatggaaaacattagccgggggtggtggcaagcgctcaatagttccaactaccccagaggctgaagtatgaagattgctgaagaccacatggagatactacgctccgtgctcagttataaaacaaaaccttctctcaacaagacactcaaacacgcgtcattcaacacactagcgataaaaacacctaatccaactcaaacaacaagaacataactatttagcttgtaccctaactgatcgaaatcttccattaaacaacggttgttctctccccgaagggagagtgcaccgttcctggaagtactgcaataccaggtcgatgcgtggagtggacggagcaagctcctattccatctcctatttccaaaaatccatttaatatattgtcctcggatagaggacgtatcagatattaaactgataagaacagatactacacttgatcttagccaaaaggccgagaagcgatacctttacttcggtcgcctcggcggccttatccttcccatcttccaaccagttatggtaactatccaggcactaaatgttaaattatctcccaatacattataattccgaaacacagttttcattattctttctttatagtagtggctatattttggaaacagccctatttaaacgtcctctacttcttccgccgcctgctccctgctcagtttgttttgcataaacccgcccctttcgcttttttaggatcctgggattggtccacacaccagtcgtgatttcaatgcccgcgtggcctccttttccccgattgtggcgttagtctcccatcctaggggtttttcggctttccagggggcggcgggacagtgctgcaggtggcggcgcccctctccgggacctttcttgggagaagccgcggcgcggtgtcaaagcacaggttttggagtccaaaaaaggaggttgggctccctgctctccagttcctgacttaatggcctgggcttggtatttaggctcttgtttcctccccatttaaacgggggaaatggtgacactcactctccggagtttgtgagaactgaggacataggggcgaggcacgacccgcaccttgcatttgtactgtccgccagcaaacatctggcccttcactgagagggaaagatgccctgagaaagccatttcagaggctcctgatcctcaaacccgggatcccgcggtgggagaaaggtgctgacgcctcagccccgatgtcctccgacccacgcactctttagagttactttcaggccgaccagcaacgcggcaaggcatcccacccggaagtccgaccgagaaaccacagggcctctcctcgaaggcagaggcagggtcgttagaggactggggcgaaggaggaggaggagagtgtaggtaaaattgaaatggagcgatttttttttaatcgatcaaagcaagctcgccagaatgaaagggattaatatgaggccctggctgagaagggacttaaggtcttgctttcttggaagctctattaatataaacgtggatcgttctgttggaaaccccttaacctgggttggaaatagaggcggtgtctttgcatcaaagcgtcttgcatggctgagatcctccaggcaggagtggggcgttaacattctcactgataaaatgtcaaccggcaaagcttctgataatctatgattttatgacactggtattaataaacaaaagaaatttctacaagttctcataagtaaacccagagccttcagagaggtgccacatcaagagagtagtaggcagggggccgggcgtggtggctcacacctgtaatcccaacacttcgggaggccaaggcgggtggattacttgaggccaggagttcgagaccagcctgggcaacatggcaaaaccctgtctctactgaaaatacaaaaagtagccaggcatgatggtgcatgcctgtagtcccagctacttgggaggctgaggcatgagaatcgcttgaacctgggaggcagaggttgcagtgatctgagatcatgacactacactccagcctgggtgacagagcgagactctgtctcaaaaaaaaaaaaaaaaaaaagaggataataagcagaataatgccctccccaccccagagatggtcagtgagaacctctgaatgtgttaccttacatagcaaaaggtattttgcagatattattaaattaaggattttgagacggcgagatttatcctggattttctgggtgggttcagagtaatcacaaatgtctttataaggggtagagggaggcaggagagtctgagtgatgcaacctgaggaagatttgagcagccagggcttgctctgcagatggaagagagtcatcagccagggagttgtgggcagcagctagaagttggaaaaagcaaggaaatagattctcccatgcagcct

SEQ ID NO: 1884648 - DNA, 4001 bp, Homo sapiens
agagtttttaacatgaagggatattgaattttatggaaggctttttctgcatctattgagatgatcacttggtttttgttacttctgttgatgtggtaaatcacatttattgatttgcgtatgttaaaccaaccatgaatcccaggaataaggcctacttgatggtggttaattaacattttcatgtgcttctgaattctgtttgctagtattttttgaggatttttgcatctatgttcatcagggatatgagcctgttgttttcttttattgttgtgtctctgccaggctttgatatcaggatgatgctggctttgtagaatgagttagggaggagtaccttctccttgtatttttggaataattttaataggactgatactagctcttctttgaacatctggtagaatttggctttgattctattgggcccaggacattttttggctggtaggctttttatttctgattcaatttcacaatttgttatttatctgttcagaatttttatttcttcctggttcaattttgagaggctgggtgttttcagaaatttacctatttctcctaggttttcttgtttgtgtgcacagtgatgctgacaatagtctctgaggatattttgtatgtccgtggggtcagttgtaatgtccctttgtcatttctaattgtgtttatttggatcttctctttctttctttattaacctagctagcagcctatcaatattgtttaatctttcaaaaaaccaacttttgttttcattgatgttttgtatggattttcacatctcaatttcaatcatttcagttctgattttgattatttcttatcttctgctagctttgatgttgtttggcttttgtttttctagttcttcttcctttcctgggtgtgatgttaggttgttaatttgagatgattccaactttttgatgtaggcatttagtgctataaactttcctcctaatactgctttagctatgtcccacagattttggtatgttatgcctttgttttcattagtttcaaagaatttatttatttatttatttattatttttttttattatactttaagttttagggtacatgtgcacattgtgcaggttagttacatatgtatacatgtgccatgctggtgcactgcacccactaactcgtcatctagcattaggtatatctcccgatgctatccctcccccctccccccatcccaccacagtccccagagtgtgatattccccttcctgtgtccatgtgatctctttgttcaattcccacctatgagtgagaatatgtggtgtttggttttttgttcctgcgatagtttactgagaatgatgatttccaatttcatccatgtccctacaaaggacatgaacccatcattttttatggctgcatagtattccatggtgtatatgtgccacattttcttaatccagtctatcattgttggacatttgggttggttccaagtctttgctattgtgaataatgccgcaataaacatacatgtgcatgtgtctttatagcagcatgatttatagccctttgggtatatacccagtaatgggatggctgggtcaaatggtatttctagttctagatccctgaggagtagccacactgacttccacaatggttgaactagtttacactcccaccaacagtgtaaaagtgttcctatttctccacatcctctccagcacctgttgtttcctgactttttaatgattgccattctaactggtgtgagatggtatctcattgtggttttgatttgcatttctctgatggccagtgatggtgagcatttcttcatgtgttttttggctgcataaatgtcttcttttgagaagtgtctgttcatgtccttcgcccacttttaaaaatatggaacgcttcacaaatttgcgtgtcatccttgcgcaggggccatgctaatcttctctgtatcgttccaattttagtatatgtgctgccaaagcaagcactcaaagaattttttgatttctgctttaatttcatttttttatcccaaagtcattcaggagcacattgtttaatttccatgtaactgtacggttttgatagattttcttagtaatgatttttaatttgtattgtgctgtggtctgagggtgtgttgggtatgatgtcaatttctttgaatttgcttggacttgctttattcctgagcacgtgctcatcttagaattatgtgccatgtgcagacgagaagaatgtatattctgttgtttttggatggattgttctgtagatgtgtaattagctccaattggtcaagtcttgagtttaagtccagaatatcttcattagttttatgccctgatgatacgtctgacattgtcagtcaggtgttgaagttccccaagattattgtgtagcttcctaaatctcttcatagatctctagaaacctgttttatgaatctgggtgctccaatgttggatacatatacatttaggatagttgagtcttcttgtttgtattgtaacttttaccattatacaatgctcttctttgtcttttaaaaaattatcgttggtttataagaaaagctacccctgcagttttttgttttccatttgcctgatagatctttctccatgtctttagttttagactgtgggtgctgttacttgtgagataggtctcctgaagttagcagacagttgggtcttgcttctttatccaacttgccattttatgccttttaagtggggacattagcccatttacactcaggatataaattgatatgtgagaatttgatcctgttattgtgctattagctgctaaccatttttaaaggatccaagaacacttccttcatgaagaccaccatgattgcagatattaaaattaagttgcactttgaactctggatcattttctctagacctctctctgacactctatataccttattatagaattgtgggaatacttcaggggagcagagtttgaaacatccatttcccaggtcagtcttataacctacctttccctatttaacatgctaagtaaagaagaggttactcacacgatccagaagattgggtattcagtgacaatctctgaggccacacttatgtgctttaccttgaccctaagccatgttctgcaactctgcctcccaaccactatcagagttcagcagtacatgtttttctggctgttataaaaggtgggtttgagtctcattcttttatttttctctcttttgaacagggtatggagatctatgtttgaatcctgttatgtgtcttcctggctctgtggcttggacaggttacttcaattacttaacattcagtttaatcatctgctaaatgatgacccttcttttacaaggataatatgagaattaaatgttatagaaaagtcataggtacatcacacagagcctggcacaagatgcttcctaagtagtaactgtgtcaaaatgtaaatcataataacctttagtcactatatatttctggtcaagactttagagtataaaagtaagtgaaaggtctcacctgatgggatgcccattagactctcaggcagtcactatttagcttttttttctgattttgatttatgcctggtccacaatagacagcaactggtgcaaaggcaattttgagcctttttaatttgtaaattaaatcacagtgtgtagggcatgcttactacactgtttattgcattgaatggggacaatattgacaatttgcatttgcttggcacttttcaacataattttgcatgtatctgatatgtgcctaagcactacaagatagacctgcacagcagaaactatccacactgtatatataaagaaactaagctgtagacaagtgaagtcgattttccgtggtcactcaggcggtaaaaatcaaaagtagacagaaacttgtaatgtcatgactagttttcttgttacactatattgctattcattggaaagaagaaatccctgt

SEQ ID NO: 1884649 - DNA, 4001 bp, Homo sapiens
agtgctgggattacaggcatttgtcagggcacctggccttgcctctgcactttgggttttgtttttgagacatgcatcacccaggctggagtgcagtggtgcaatatcagctcactgcaacctccacctccctggctcaagcgattctcctgcctcagcctcccaagcagctgggattacaggtgtatgccaccacacccggctaatttttgcatttttaatagcgacagggtttcgccatgttggccaggctggtcttgaactcctggcctcatgtcatctgcccgcctcagcctcccaaagtgctgggattacaggcatgagccactgtgcccggcgttgcttctgcattttatgttcattttttcagctcctatgcaggctgcctttttcaccatgctaactcctgcttcctggcttccagttaatgataccacttactttattcagtgaatatttattagcctctactgtgtgttaggaactattgtagacaccagtatgaacgaggtggatagagtttcttgtcacaaagctgacttctggagggaaaaaacagacaataaacaggcacttaattagaaactattgtgtaagtgtcacggtgaaaataaaaccatgatgtgctaggaagatatgtggggtggcactactcaggatgccttcgctggtcaccccaagcctgtgtctcctctgtgcccagcaacacctgtgtcagccctgccccacatggtgggtctccatcaagactaggggccacctgagggcagagcctgtgttggttcaccactgtttccaaccagacactcagaatgtttataaactgcaggaggctgaacagtattgaactaggtagaaggcacatgagaaagggggtgtgggaccagcccctgggccaggtcttaatggtacaatctcattccaggtttacaataatgtcatgaaatagatgctattattatttcaattattttattttgagacagtgtcttgctctgtcgcctaggctggagtgaagtgtcacgaccacacctcactgcagcctcgacctcccaggctcaagtgatcctcttgcttcagtttcccgagtagttggggactacaggcacacaccaccatacctggctttttattttttgtagaggcagggtcccactatgttgcccaggctagtcttgaactcctgggctcaagcaatcctcccactgtggcctctcaaaatgctgggattacaggcgggagccactgcgcctgccctatttcgaattttttacaaatgaggaaataggcctgaagagtcaggtgacttgatcaagatcatgaagctacaaggctgccttgccaggattacagggcagttctgttgcctccaaaagccatgcttttagccaccacacatgctgctgcagaggtggacttcccagaagttccagttttgacattgaggttaataacatcaaaggctgtggcagggggtggcgatgggatggcaagagattgagaaacaggagctttggaagagaaacctcagcccatggtttctcttccatggtggtggggcgggggggtggtgtcacagcaaggttgcaatgaactcgcggtgccctagaaggggagctgtgtctgagcttcctctggagggatgtgttcccaggccccaagctcatccctcttcatcgctccctcaccttccccaccccattctagttttttgtttgtttgcttttggcttacaacaacacaaattcattttcttacagttctaaagatcagaaatataaaatcaagatgtcagaaggccagtatttcttgtcacggctccagggcagaatccattaccttttattttctaatttctagaagccacttgtatctcttggtttgtaatcccttcaaaaatatggaacgcttcacgaatttgcgtgtcatccttgcacaagggccatgctaatcttctctgtatcgttccaattttagtacatgtgctgccaaagcgagcacttttttttttagacagagtctcgctctgtagcccaggctggtgagccgtggtaccatctcagctcactgcaaactctgcctcctgggttcaagtgattctcctgcctcagcctccccagtagctgggattacaggcgcacgccaccacgcctggataatttttgtatttttagtagagacagggtttcgccatgttggccaggctggtctcaaaactcctgacctcaagtgatccacctgcctcggcctcccaaagtgctgtgattacgggcgtgagccaccgtgcccggccccattcttagcaatctcagcccaaccccacccacaaccaccaggtccctgttcttgccctgcactgagccctagcaaacagcccaggacagatgcttctaaactcccttcccgatccctaggggcacagggttaagaggcccaggccccagctggctgccactgggagaaggaaggggcaaggacctccctgctgccctcctgggcttgtctggcactgggaaacaaaggaataactccccaattagagcacagtcaggtgtaggcaagaggaaaacggcttccctccacacctctaggttctttggctggactatgaactaaattgacaagacagatcaacaggtgagaaaccatttctaattagatgcatactatgatggttaatactgagtgtcaatttgattggattgaaggatacgaagtattgatcctgggtgagtctgtgagggtgctgccaaaggagattaacatttgagtctgggctgggaaagggagacccacccttaacctgggtgggtgccatctaatcagctgctagtggggctagaagataaagcaggcagaaaaatatgaaaagacaagactggcctcacctcccagcctacaactttctcccatgctagatgcttcctgccctcaaacatcaaattccaagttcttcagttgtgggactcggactggctctccttgctcctcagcttgcaggcagcctattgtgggaccttgtgatcatgtaagtcaatacttaataaactcccctttatatacatatatcctattagttctgtccctctagagaaccctaatacacatacacaagggagtaccaaaaaacatgtagctcgaagggtcagatgactgaagcttatatagcatcctgagctacagaaagaaacaggggatgggagttctcaggggttatgagggtgaggggaggatgtgtatggtgaataaaggccgtcttgttacacagatgaagtctccggtgatcaaagttgtctgggccaggcttggcttacgcctgtaaccccagcactttgggaggccgagatgggcaaatcacgaagtccagagattgagaccatcctggccaacatggtgaaaccccgtctctactaaaaatacaaaaaattagctgggtgtggtggcacgtgcctatagtccctactcgggaggccaaggcaggagaatcacgtgaaactgggaggtggaggttgcagtgagctgagatcgcaccactgcactccagcctggcaacagagcatgactctgtctcaaaaaaaaaaagaaaaaaaaaaaaggttgtctggagcagccctcttcctgatataagatactcttaccaatgtaagcgtaatataatttccattatgcatgtaaattacaaaatagcaacctaaaaggaagaagctgaaacaaaattaacataagcagagagcttatttgggccaagtttgatgattataacctgggagcatagaatccagttatcctgaatatacactctggttagcagcagttgtaactggatttttttttttttaagacggactctggctccgtcgcccaggctggagtgcagtggcaccatctcgactcattgcaacctccacctcctgggtttaagcgattctcctgcttcagcctcccgagtagtttggattacaggccccctccaccacgcccggctaatttttgtattttta

SEQ ID NO: 1884650 - DNA, 4001 bp, Homo sapiens
aattgtaagtaattgaattcagttcacagactgaataagcttggaagaagactctgagcatccgatgagaccccagctccaactgacactctggttgccatattgtgaccctgaatagaagacccagttaaaccctgcccagacccttggctcatgaaaacagataataactgggtggagttttaagctgctcattttgcactggtaaatccaccaacaggaaagtaatatagaagttaaatgggccggatgtgatggctcatgcctgtaatcccaacactttgggaggctaaggtgggtggatcacaaggtcaagagatggagaccatcctggccaacatggtgaaaccccgtctctactaaaaatataaaaattaaccaggcgtggtgacatgcacctgaagtcccagctactcaggagtctgaggcagaagaatcacttgaacccaggaggtggaggttgcagtgacccgggaccatgccactgcactccaatctgggcaacagagaaagactccatctcaaaaaaaaaaaagaaaaattaaatgaatacttttgaccgttgatggaagttactttcattccctcttacttaatcatctttatcttagccctgaaagagggatgctttaaccccatttgtaacaagtgagtctgaggcccaggaaagtgacagaatttagcaaagtccaccttgccacctggtggccccagctagaactcagccccaggtccatatacctaaagtcattacaacatccactgaaaatttgcccctctctccatgccttcctctttagaagcctgttccttcagggatagatcccaacccagtgttacaaggtactgaactctgattttcacaaaatatagtaactaccccccaaaattaataatagtatttttgagccgggcactgtggttcatgcctgtaatcccaacactttgggaggctgaggtgggcggatcatgaggtcaagagatcgagagcatcctggacaacatggtgaaaccccatctctactaaaaatacaaaaattagctgggagtggtggcaggcatctgtaatcccagctactcaggaggctgaggcaggagaatcgcttgaacccaggaggcagagtttgcagtgagctgagattgcaccactgcactccagcctggcaacagagcaagactctgtttcaaaaaatatatatatatttttgagtccttatgtgtcaaccactgggctatcccaacaccaatagatattatgattatgattagtttttccattttatttttttatttatttatttttattctttctttctttttttttattatactttaagttttagggtacatgtgcacattgtgcaggttagttacatatgtatacatgtgccatgctggtgcgctgcacctactaactcgtcatctagcattaggtatatctcccgatgttctccctccccgctacccccaccccacaacagtccccagagtgtgatattccccttcctgtgtccatgtgatctcattgttcaattcccacctatgagtgagaatatgcggtgtttggttttttgttcttgcgatagtttactgagaatgatgatttccaatttcatccatgtccctacaaaggacatgaactcatcattttttatggctgcatagtattccatggtgtatatgtgccacattttcttaatccagtctatcattgttggacatttgggttggttccaagtctttgctattgtgaataatgccgcaataaacatacgcgtgcatgtgtctttatagcagcatgatttagagtcctttgggtatatatccagtaatgggatggctgggtcaaatggtatttccagttctagatccctgaggaatcaccacactgactaaaaatatggaacgcttcacgaatttgcgtgtcatccttgtgcaggggccatgctaatcttctctgtatcattctaattttagtatatgtgcagccgaagcaagcactagtttttccattttattgatgaggaaaccaacacatagaaacgtaaaggaacttgccaaaggtgacgatcacacagccaaagaactgtagaagcagcacaggcatcccagcaaactcacagccaagctctgcttttcaccttcacatcatactgtcctcagactaaaaccctaactctgaccttcccaatcaaaaatcatactcaaggatgggtgtggcagctcccgcctatcatctcagcactttgggaggccgaggcaggtgggtcacctgaggtcaggagttccagaccagccaggccaacatggtgaaaccctatctctattaaaaatacaaaacttagccaggcgcagtggtgggtgtctgtagtcacagcattttgggaggctgaggcacgaaaatcacttgaacccaggaggcataagttgcagtgatccatgatcatgccactgcactccagcctgggcaagagagtgagactctgcctcaaaaaaaaaaaaaaaaaattgtgcttaataataacttggaagtgcacatatcttctgtgaagtttgatggacaacaattggcttcaaaacacaaataagtaactgtgtttaaatgaggccttctgtgtaaaagctaaggaaaatcaatgtagctattcatattttgattccccttccaggcacagagaagttgcccatgtctctgtgatctgctttgtccaatgaaccatgagcaagagcaacttgagtcacctccaggtggaagtgttaaaaggctgtgtgatccaccacattccctttcccctgaagtggtgatcaaggacacattcagagatggggcttttgtcagcctggatccctgagtgaacacaatgaacagaccaccccacaatgccctaacacagcccagacatgcaacgtgaccaagaataagcctcactgtggccaggcatggtggctcatgcctgtcatcccagcactttgggaggccaaggcgggtggatcatttcaggtcaggagttcaagatcagcctggctaacatggtgatatcctgtctctactaaagtacaaaaattagtgagacagtagtggcacaggcctgtaatcccagctactcaggaggcaggagaatcgcttgagtctgggaggcagaggttgcagtgagctgaggttgcaccattgcactctagtctgggtgacagagtgagaccctgtctgaaaaaacaaacaaacaaacaaatacctcactatatgaatccactgagatttggggattgttgttactgcaccagaacccaaatcatcctgactgctagactgtcctaactagggtttcttaccaaaagcaaaggcatttttaaagttcatgacatttaaacaaaagagcaaatactaatgtctgccactttgtcaggctaacaaacccaaacaaagccaacagccagaagttaaaagaaacagatcattaggttgaaaacagaactgtcaaaacaggcacaattgacttcatttagtgattgcaaagaacatcaggcaacacacaggtgtggtcatcatatcatttatcacatgcttaattgcacatgtttgactaagaaaaacacaaagtatttaaactcatctgtagctcaaagtgcctatccatgtatttatccattcatcctgatttatttattgagcaactcttttgtgccaggcactgtgcttggtggtggtaatgcaatgatgaagatggcagacacagctctgccctccaggagtttctagggtatggagggagacaaaaaataagtaaatccatgtaagaactattgatggaacctgcccccaatatttcaacataggttctttccattttccataagtgtcagccagctgagaaataaagagagacactacaaagagaggaattttacagctgggccgctggaggtgacagtacatatcagtaagtctgtgctgcctgctgagtctcagaccagcaagtttttattaagggtttcaaaatggg

SEQ ID NO: 1884651 - DNA, 4001 bp, Homo sapiens
attttttccatatttctaggctatgtggttcatctgcaagttttttcaaattgttgcaaatctccaaaaaaattttcaagtgaactcgtgcagttcaaacttgtgctgtgcaagagtcaactgtatttgcttattttctcaaaaaggaatgcctaaaggataatcaagaaactaatgaaactgccagatgtggtggtgcacacctgtagtcctagctactcaggaggctgaggtaagaggatagcttgagcccaggagtttgaggccatcctgggcagtgtatcaagaccccatctctaaaaagaaatacgaatttttttttagagaagttaatgaaattgatcacatggccatgctcagtggctgacacctgtaatcccagcactttgggaggccgaggtgggaggatcatttgaggtcaggagttcgagaccagcttggtcaacatggtgaaaccccatccctactaaaaatacaaaaaatagctgggcgtgttggtttgtgcctgtaatcccagctactcgggagggtgaggcaggaaaatcgcttgagcccaggaggcagagattgtactgagccaagatcatgccattgcactgcagcctgggcaacaagagcaaaactctgtctcaaaaaaaaaaaaaaaaaaaaaaaagaaactgatcacatatcagttagtgtaaccagttggtgtgacccagtttgtgggtcagtaaaaatgtttagagttgataggaatagaaaaaagatttttttttttttttttggacagtctcactctgttgcccaggctggagtgcagtggcacaatctcagctcactgcaacctccacctcccaggttcaagcagttctcccatctcagcttccagagtaggtggaattacaggcttgtgccactacgcctgactaatttttgtattttagtaaagatggggtttcaccatgttggccaggctggtcttgaactcctgacctcaagtgatccacctgactcggcttcccaaagtgctaggattacaggcatgagccaccacacccggcctagaaacaagatttctatgtatacttttaaaaataagctgttggtttttttttttttttctgatggtacatttgggaattatactgtaacaggcataagaagtaagatttctcccatgcgaaattttgtattcagaatccaatagaaatatttcaggttttttttcaagatggagtctcgctctgttgtccaggctggagggcagctgcgtgatctcggctcactgcaacctccgcctcacaggttcaagcaattctcctgcctcagcctcctgagtagctggtattacaggcatgcgccaccatgccttgataattttttttttaatggtgaaaagatatacatatatttagaattagccaactggactcagttgagatgatccctattttgttggcaacatccaaagcattgtaatcaggagccagtcgaacatgttccttctctccatcaggccgaatcagggtgttgaccttggccacatcagtgtcatagagcttctctggtgctgtggcttaacattcacagtgaacacaagtgcgtgtgtcttctgtcttcttcatggagactcagtggtcagaggaaacttgatgatgcatagtggtcaagcttgtttctcctgggggtgctcttaagatatttgcactgcctccggagtcgcaatgtcttgggccgccagaaggctagtgatacgcggatcttcttttttttgtggctgtggacacctttcaacactgccttcttggccttcagagccttgctttggctttaggaggggcaggagcttccttcttagcttttggtgccatcttgtgaaaaggggctgatttttgtatttttcgtagagatagggtgtcaccatgttggccaaactggtctcgaactcctgacctcaaatgatctacccaccttggcttcccaaagtgctgggattacaggcgtgagccactgcacccggccaataattagaaatatttctctctcttttttttttttttttttgggagacagagtcttgttctgttgcccaggctggagtggcatgatcttggctcactgcaacctccacctcctgagttcaagcgattctcctgcctcagccttccgagtagctggaactacaggtgcatgccaccacacctggctaatttttgtaattgtagtagagatggggttttaccatattggtcaggctggtctcgaactcccgacctcaggtgatccgcctgccttggcctcccaaagtgctgggattataggcgtgagccaccgagcccggcccaaattagaaatatttctaatcagatatttccatggttatagatatttggttgcttggttcatatgcatagaaacagttgtcataactgtaaaaagcagtacttagcaagtatttctaagtgattggaatagctttcctttaatgttacaatactgcctattgatttggaaattagatcacgctctatgatgtttcgattttactcaaaggcatcatgagtactctgctcattctttcattctttatagttttctagttgagttaggaactattttatcagaaatcattttagcattataataagggtagatgacataccataatgattttcagattttttttttttgagacagagtcttgctctgttgcccaggctggagtgcagtggcacgatctcagcttactgcaacctccgcctcctgggttcaagtgattcttctgcctcagcctcccgagtagctgggactataggcatgcgccaccatgcccagctaatttttgtatttttagtagagatggggtttcaccatattggccatgctggtctcgaactcctgacctcatgatccacccaccttgtcctcccaaagtgctgcaattacaggtgtgagccactggtcccagcctgattttcagatttttaataaaaagggtatctggattagctgggcatatagtcctacctactctggaggctagcctatagtcctacttactctggaggctaaggcagggggatcacctgagcctgagggatcacttgagcccaggaggttgaacctgcagtgagctgtgatcccaccactacactccagctgggcagcatagcaagaatgtctctttaaaaaaaaaaaggcaattcagttgcagtggctcatgactgtaattccagcacttttggaggctgagacagaggatcatttgagcccaggagtttaagaccagcctgaacaacatagtgaaaccccatctctaaaaaaaaaaaattatattagccaagcatggtgacatttgcctgtagtgctagctactggggaggctgaggcaggaggattgcttaagctcacaaggttgaggcaggagtgagctgtgatcacaccactgcactctagcctgggcaacagagcaaaataccctgtctcaaaaacagcaagaaaaaaaaagccaatacctggaaactttgaacagggtgaaaagaagaaaacacggaggagtctgctaaagcacaaaacttctctctggtcctcaaataaataaaaatttttggccgggcacgatggctcatgcctgtaatcccagcactttgggaggccaaggccagcagatcacgaggtcaggagatcgagaccatcctggctaacacggtgaaaccccgtctctactaaatatacaaaaaattacccagacgaggtggtgggtgtgtgtagtcccagctacttgggaggctgaggcaggagaatggcgtgaacccaggaggtggagcttgcagtgagccgagatcatgccactgcactccagcctggcgacatagagtgagaccccgtctcaaaaaaaaaaaaaattttttttttttacaattccacattgtcattttcttttcctctggtctcaaactcctggtctcaggcaatcctcccacctcagcctcccaaagtgctgggactacagacaagcc

SEQ ID NO: 1884652 - DNA, 4001 bp, Homo sapiens
acacctggctaatttttgtatttttagtagacacgggtttcaccatgttggtcaggctggtctccaactcctgacctcaggtgatccacccgccttggcctcccaaagtgctgggattacaggcatgaaccactgcccccggcaaaatggaaacaagttaaatgtccatcaactgatggatatatccatacagtgcaatattacttggcaataaaaaggaatgaagtactgatacatgctacaagatgaacgaaccttaaaagccttattctaagtgaaagaagccagacacatttgatataattccattgatatgaaatgtccagaatcaacaaattcataggaacagaaaggaaatgagtaattttcagggcttgggtgtgggagggaatggggagtgactgctattgggtgcggggtttcttttgggggtgatgtaaatgttctgaaatagatactagtgatgaatgcatgactttgtgaatatgttaaaaaccactgaagcatatacttcagaagggggagctaaggctcccataaattacatgtgaattatatatacatatatatcaataaagctgttattaaaaaaactcccagacttgtctctaatatttgcaagaacacaaatgaagacccacataccatatgcctaaatatttcaaaatcaagcgaacaagctgttaaataaaatatgttctcttctcttaccttgacaaatatacattcatagtggcacagttgaaaagcatgtgtaaagctctggtttttatatgcttgaaagctggtgtgtttgggtattctgttgaagggccggctgtgtttagacaagtgatcaaataaagacatacataattcacaaattcttatcgttttaatccataaaaatgttcaggcctttatttcaccaaaattgctaatttgtgttttagtgacaatacccatccaaaaagattaaagaaataaaatatagtttttgtccaaaaggaaaattatagtaaaggtaaaattttaaatgctttttaaaaaggtatttttttctaaaatatccaaaattatttattgaaattaaaaggtaaaatacaaattataatgagtgtaactgttttttgagagagagtcttgctctgtcactgaggctggagtgcaatggtgtgatctttgctcactgcaacctccacctcccaggctcaagcaattctcacgcctcagcctcccaagtagctaggattacaggcacatgccaccgtgcccagataatttttgtagtttttgcaaagacagggtttcaccatgttagccaggctggtcttgaactcctggcctcaagttatttgcccgccttggcctcccaaagtgcgggattacaagtgtgagccactgcacccagcctagtgtaacattttaaattaaatctggggctgggcatggtggctcacacctataatcccagtgctttgggaggccaaggtgggaggtttgcttgaggtcaggcattctagactgcttgggccacatagcaagaccttatctccacaaaaagtttaaaaattaggcagacatggtgtcgcacacttgtgatcccagctactcaggaggctgaggtgggagaatcacttaagcccaagaattcaaggctgcagcgacccatgatcgtgccactacactctagcctgggctacagagtgagaccttatctctaaaaaaaaataataattttaaaaatatattaaatctgaatttttattaatcttttgaaattgtaataacattttattaaacatttttagaaaaatgacatattagcaattccagtgtttaacactatactgatttgttttcacactgctaataaagacatacccaagattgggcaatttacaaaacaaagaggtttattggacttacagttccatgtggctggggaggcctcacaatcatggcagaaggtgaaagacacgtcttacatggcggtagacaagacaagagagagagaatgagagcaagtgaaatgggtttccccttatgaaaccatcagatctcgtgagacttactcattaccacgagagcagtatgggagaaaccatccacatgattcaattctctcccaccgggttcttcccacaacacgtgggaattatgggaatacaattcaagatgagatttgggtaggaacacagccaaaccacatcaaacacccatctagttcctactgtaaataatcagtatcacacttcatgcatgttatatctaaatttatatatataaatatcagaggaaatgaacagtttaaacattgcaaaagttcctcagctgctataggcgtcattgtggatattgcattaatccacaagaacctctggaaccaagaattggtacatgaagaaaagcaagaaaatggacagttgaccctgccgagaaaaggcttcggtttgcaataatctactgcattcgtgctctctgagagtgaaaatttaacaagttcatcttaggcttttctcacacataagcactgctgcctctcaagtctgccctgtcctcagaagcagaatctgtctctcaggtcagcagctgcacaacccctaaaccttcatacattccagacttagatcacctttcgtatccaggacctagagcaagagaagaggagaagcagtcccccgggacctggatggtgccaggcacaggagtgggtgttcagggctgtccttgcaggggggccagtgctgagctgagggcaagggtgcctcttcccctggtctgccagtgggactgaaggaaagtacagcccttccatgcgtcacacatcccaatggatgaatgctcatgagaattgcctctttgggcccctgaccctactgtcttctctcgcttatccacctgcctaccagctggccccaacaaccccttcctcactggctgtcctgccacccccatctgccaagcgtcagcctcagcagtgggtagagaggggccgccccctctccccagctgacgggcagattatatagctgactctcccggaagagggggtgacaaggctaattacccacccaccagctagccacccagaggagcgggctctgccccgagaggttaaaacaacaggggaaggcttccttcacctcccgttatggccaatgcctccccgcctcctgaaggcttctgggtgctggagctttgaagatgcccagccccctagtcctctaaagggggcttgtcaaccaagcagccatatcacgttgcagggctgtagaaagagctctggctacagccttaggaggcctgggttaaagtcctgcccctgtgttgctgtgtgaccctgggcaagtcatttcccctctctatactctggtgccctgatatataaatgggcctggctaggggatgaccagctccaagccccctccattgtgtaacagtgcagaccctgttggctgcccaccgaattccttttccctccctccctgcttgctgaccagattccaattttgtacagggttgccacattcccccacctcacatctgtataaacagaagttgactgtgtggggtttcaggagagttttcacttttaaaaataaggggcagactgggctcgtagcgtttcttttggtcctaacttccatttttcttgccaggaatctgaacgtgaaatctggaggtacggtagccattgtggcaccatacggttgaaagtcaacatctaaagctgtgggagcaggaagctggcatcctgaagtcagcacactggttctgggcagctcacctccagagtccttgtaatgtgagaagagaaagccctgaagtgtttaagccacagtttttgggtttcctttgtcttgggaccaaatgtcttcctcatagacacagattagaatctgtctgtggggtgtgctgggtgcggtggctcacgcctgtaatccgagcactttgggaggccgaggaaggtggatcacttgaggtcaggagttcaagaccaccagcctggccaacatggg

SEQ ID NO: 1884653 - DNA, 4001 bp, Homo sapiens; identical to SEQ ID NO: 915472

SEQ ID NO: 1884654 - DNA, 4001 bp, Homo sapiens
ttagaaaattaactgattacggaaaagggggaactcaaatatagagttataatcatggtttatataatttctctattagataactcatcttcattttatgcatttattactcctggtgttaaattgattgcttttattgagagtttatgacatttttactctacttattcctctgagttactgacttaaatggctccttgatgttcagattggcttaataagtacttccaaaattcctggcacattttatcactttcagcagcaaaacaagaggtagtggttctcaacctttgctgtgcataaaaatctaccgaggtgcttagcaaaggcaagatttctaggctctgtcccaagagactgtggctgctgggggcagggggtagggtatggacccgggaatcttcatttcatttcacaaagcatcccagaatccaggtgattctcacgcaagtggtcccagaacaaccctttgaaaaatattaacctaaggaatgaaagatatttgtagttgagtgtgtgaacatgtaaataggattaaaagcaaatccttaaaaccatttttcagagactcagaaaaataataatacctgaaatttaaaatactgcattctgaaaacaaaattttgccactttattatggctagtggggtatatttctccctctctctctctctctgtctctctagatggagtcttgctctgtctcctaggctggagtgcagtggtgtgatcacagctcactgcaacctctgcctcctgagttcaagcaattcttctccctcagcctcccgagaggctgggattataggcgcatgccaccacacccggctaatttctgtatttttagtagagacaggatttcgccatgttggccaggctggtctcgaactcttgacctcaggtgatctgcccacctcagcctcccaaagtgctgggattacaggtgtgagccactgtgcccagccctcggggtatatttctcttgctagcagtttcctggccatatataagccccagtagaaccaccatcaaggtaattcactgtaggttttactgggataagtggagctagacttaccttccaaaggcaccacatcctatttgccatttcttagataaaggatgagctatgtgttcacaaatccgaaactcttgttttgaaagcagcagagtaccttgattaagagcaagttctgcagagcaagactgcctgggttaatcctgctctgctttggaacttctttacgtatcttggggtttgtgtgtgtgtgtgtgtgtgtgtgtgtgttagtgtgtgtgtgtgtgtgtgtgtgttagcttctctgttaagggataatgctgcttgcatcataggactaaatgatggaaaccaattcattagtacatttaaacagtgcctagtacgtattaaaatctcagctaagcttggttgtttttatggggacggttggctccgttcagcttccccatggactcgcctcacacttttgatccacctgcttcctggcttcccaggagacatagacatgaactgtcccagatttcccactagggggcagtagagccccaccggtattatgggaacatgcacccctcaactccacatctctctcatggtcctgctgaaaagaggcagctcacaccttatgcgacctcggctggaggatcctcatagaagagtgtcaaagctgtccagaaaagcatgaggaaccacgcttatgaaaaaccatgccccttctctatccatctgtggcatcactagcacctttgcccagtggggatgtggcctctgctcagctgcatcctgggggcagccagaagcagcctcctgccccctatcctgtggacctcaccttggccagctgccttgaggaatgttaaccatccttggctgctgacacccaggaccagggagcagaaaatgatgccagtggagagcttcatcctgctgcagggccaaggaaacacaaccaaggataatacacattctgtttcaagtttttattttttgtaatgttagtccattctttcattccaagaaaaaaacccactcggttttacacacgcacacacacacacacacacacacacacaggtgtatgtgtatagataaaagatagaaggtcagagggtctacgtctccatttccatttgtctcattggaatcccagtatctgacagaagaggagcagtgacccaggataaagcaaatagacaaaagtcacaccatgtttgagaatcattattttagattagagcctgccaaaattaggaattatgcctctttctgggttctgagcatattttaggcacagtaaaatgaaagttataaggcagatagctgtcagaggatttccctgtccctttggttcttatctaaggcaatgctaagcaacatttgaatattccctacacaacttccattccttggaaaaggtgggattccctgtggtcagtgtagtatctgagctggcgtggctcacttggtcccaggagtagacagtagaagagggggaagaggaggggagttgtcaaccatccacagccactggtcatggtgtacttggaggagctgcttcataaagcagggcatgtgatgtccagacctcctttttcctactcttcttcaggcagaaattgagggccaatgatcacatcctgtcacaattattttactccctttggaaccattcaatgctggaaatctactttctcgttttattcaagtcattctcttctttgatagaagttgatatggtttggatctgtgtccccacccaaatttcatgttcaattgtaattcccaatgttgggagtggagcctagagggcggtgattgaatcaggaaggctgtttctcatgaaaggtttaacagcatcccccttggtactgtcgtcgtgatagtgagtgaattcttttgagatctggttatttaaaagtgtgcagtacctcccccctcactctcttttgtccttgctcccaccatatgagatgcctcactcccgctctgcctttgccatattgaaagtttcctgaggcttccccagaagcagaagccactatgcttcctgtacagactaaagaaccatgaaccaatataacctcttttctttataaagtacccagtttcagtcatttctttatggcagtatgagaacggactaatacagaagtattagaaagcaagtggcgtggagacactggctcatgcttataataccagcactttgggaggctgaggcagaaggatcactcgaggccaggaactcaagaccaacctgggaaacatagcaagaccccatctccactatatatctgtatatatattttttaaattagcggggtgtggtagtatgcacctgtggtcccagctactcaggaggctgaggcaggaggactgcttgagcccaggagttggaggctatggtgagccataatcacaccactgcactctagcctgggtgacaaagtgacacactgactcacaggaaaaagagcaagaaagcgagtatgatttctagataccaagaggaactcctcacagggactttgacaagccttgcctgttttcttcctttgttacttaatgtattctgccttccgggaaggtacacgcagtttcttatggtgccaagctgagaataatagacaataacggcagtcagttcttttcacttgtttctcctgaaaaagaaagatttcctgtcatgatatcagagtccccaggccttaaagggattttccaacagtctcttacaagtgactacgtgtgctggtttgcatgagatcagtgtctattgtccaagcttaatagtggcacatcttttcattgtctacaatggcctggattgaacagtaaatcagatggtagcactactctgataaccttgtgtgaccaggctgattgagaggcccaagacacctccattcttttaagttacaattaatttaagtagaagaggagaatactaaggcttaattctattaggaattagaaaaac

SEQ ID NO: 1884655 - DNA, 4001 bp, Homo sapiens
ctggctccctgcccgcccacagaggatatatttggagcaagacaactccttctggacacagagcttgggacccaccccgcagggctgccccaaccaattttactgagtatccacgcagtgtggttgtcactcacgttttcacttgttagttcattcatttgtttactcattcattcattccacaaacatttattgatctgctggtatgatgcagcaggtacaacaggatgtgtggtgggcacatatctgtatatgtgtgtatatgggtatctctaagcaaggatggcagaacacactctgggtgccctccctcagggttcagtggtgatgatgactcacactcaggtgtatatggcatctgtggggacctgtgtgcaagtacatgcaggcacgtgctctctgaggaggtagctatgactcagtggcacgcggcatctgtgggtatctgtgtggatatgtgtctgagtgcaggcatgagcataggcgcttgctccccagggggtgggggaagtggttgtgactcagctgcacatggtgactgggagcctacaggccagctgtgactttatggctttgcttatttgccaagccaaacagttagtgttgggcgtaaatattctatcagagtgtgcatggaataagtcctgagctagggacctccagcaggcaggagagactcagtagtcttggcccagcagcatctgtcccccgcctgccccctccaccgtaggtatacaggtcctaccctccctccctcgccctctccactcctgcctcctggagactcagcgagctcgtccctcattgactctacatcacccctcacccaccggtcccaggtgcacacacgagaccaggcccagaggtacagggctgtggccttcgagctgccagcccaatccatttttctaccataccaaaaaccccttctttttcagccctcatgaccgcgtcttcctccaacatcccagccccggtcgtaggctcggcaagcccgctccagggcccacttcccatctcggcggccgcagacccgctgcctccccatcggcgcggccccatcttcacctctgagctccttgcccctctctccctggctgtctctgtccttatctgtcccaagtctatctttgtctcttctcgagccgggctgtctgcagcagaggcttcaccagagtggaggtgctgacagagtgcggggtgtggggaggacaatctgtgtcccttcttgagccttatcgggaaaacttaagtcactgctcagggctcagactggaatttcgccctagatgaccttgctgggtctgctggggcctccgcagggacagccagggtcaaacgagtcaggaaacaggcccctgcttgtgggccgcctgcccgccctcatcccaaccaggccgcctgcagcgccctcggcgggagacgccggggaggggagagaagggaggagacgggaggggcggccccgtcttgggcactcgcagggactggcgggaggccgtgtggggctggaatcgtgaccacggatgccgcaaggccacagggccctcctcggggtcccggccggaaatcctcaggggcccgaggaggagccggggcggccacccgaccacctccccgcgggccgcaggcaggcggcgcgccgtacccgccgagaacgcgggaagaggccatcgcgtctggacacctgggcttcgtcccagagccgtcactgctgtgtccccttgggcaactgcctagctccctgagcctcacttttcacacctggaacataggaaaattgcgcccaccttctgggtcgtggcagataaaatgagttcacgtcagggctggctctcaggaggcgctcagtgctcgtggctttcctccccggtggacagaaccccggggcagctccccgcgccctgacgcccagagcggagcggcccggagcggagcgaccaccgcacactggacccgaccctagtcggccccgcgcgcccgggtcggggctggaacctgcgggcgtggcgcacgcctgccacctggcggcgaagcccccaggccgcccgtcccgcccacggctgcgcgcgtgcgcaggcctgcaccacccagtcgcccccaccacgccgcgccccgcctccctcgcccagggacttcctaggccacgccacgccgctccaccagctcagggaacccccttggccgtgcagacctgcgccacagggtcgtttcctcccctccttccctcgaaagcgtatgcatttcgttgcccctggaactggggtcatttcaggacctcccaaggagggtcaggatggtggtattggccttaggggacgcgggctcaggttggcggttgaaccgcatgttcctgtttcaaacaaacctaaatgtaggcctggaaggctgtgcactgaaatcctagtattaggttggtgcaaaattaattgcgatttttgccattgtaggttgtctgcagagtgagattatggcgaagcattttattctttttacaaacctgctttttctcagttttccacattgggtatgtattggtgataaggaaaaaaaaactacaaaagatattttttgaaaaaaaaaaatcacatggagagagagaaaaggggacgaattggcctatcaagggggtttccggaagttaactttctagtatctctgtttgcatgtagactcccagggtgccctgggagaaatggagaaatgaagcccaggacatgaggcattgggatggatggtccatctttcacatgtgctgggattaacttcctttaagaaaaaaggaaggcaaaagggttcccagccttagggttgggtggggtagaggctccaaataaaccagaaactcttgagtagaggtggtcagtcattgctgtctggttcaagcgctgattggacccaaggggaccagatccaggatatatttgagaacaaggaatttatttcagaaaggggccactcaacagtcagcatttactaagaacctgcttggtacagggtgctggaactaccacaacgaggctgccccttcccttaaggagttctgggctgacttttgggaaagttcatcagcggtgacgggtagtgagtgaggcagatcagcaggaacattacaagccgcaggaaccgtcagctgctgatagaggccctgggaggtagagtggagaacagctctggccaccacagctaatggccaccaagggagcgacaggacccttgaggggagagcagaggctggaggtccttggggtctactgggaggtggcagtcacaggcccttgggtcctctccacagccttgctggaaccttccaaagagcaggtgtgactggggaagtgtgttgctgggctgtcaccctcacctgggacctcctctgtgcactcatccattcacagatttgccagctacctgcctttgcaggacacctcagaagttacagacttgcctgtggaaatgcagagagcacctgaggtatttcccggactctccagtagtagccttgaatggctgaccaaccgcagtcacctgccagatcttctcagaaccggccagcccaccagcgacaggcccattaagtggcctggcccagcccagatggaaaaccccctccacgtgactttctaaagaacatgcatgaagacaaaacaccaggtgcctcaggtgtgacaccctgaggacacatcacctgtacagtatcctaacccacccaagatgacacagtaaggtaaaaccacagtagagcccaggcctgtttgactctgaagtccaggctcctttccaacttagtgccctaaaggcctgattggggtgggggtaggcaggaagattcaagcactgattgtttgtagcccaggctgggagggcaacagctctagaaaaaaagtcactcactgctttaaccatcttccagctaactgcagtgaggtgtacagggccatggggctctgggatgaactcttccacctctacaccttgtaaacaaggattccagacacaccctc

SEQ ID NO: 1884656 - DNA, 4001 bp, Homo sapiens
aggaagatttgctaattaatctcctataaatgtgcctcagtgagtctaattggttccagatcccctttctcactaaatgccctcaatatattctgtggtaaaacggtgttgtagcaggccataagaacatgaagctcaaacaatcactgcataaaatttaaaatgatgaaaggtgaaaatttaaaacttaatttacataaaagtattgctttaaaataattttaccttgcaaatctgttttttcaggtatcaaatttgcttcattaatgtacttgtctatcatttgctgaaagtgtgtgtgaccacatgtagtttcatccactgcaggcaacagagatttatgaacgtctgaagagttctgccgctgataaatatcttgtgttgaaggaactatggaacttataatatttgtttcctcttctttactggtggtagattcttgcttgctatcatccatgtgctctgaaaatgactctgaaaattgagtttaatgaaaatatgtaaataggccaggcgtgatggctcacgcctgtaataccagcactttgggaggccgaggtgggtggatcacgaggtcaagagatggagaccatctcgccaacatggtgaaaccccatctctactaaaaatacaaaaatcagctgggcgtggtggcgcacacctgtagtcccagctactcgggagagccgagattgcaccattgcactccagcctggcaacagagcaagactccatctcaaaagaaaaaaaaatgtaattgacagcgacactatattccttttaatggaatattccttacagacatactgtactgggtacttccttacagacatattttagtggagaagcatggtaatacatattgttaagagatcagtgcaaccatgaaatttgctcggataggtttccactgaatggaaaaatatatcagcaactgcttctcaaaagtattgttggggatctacagagcatccctgttacttccagtaatatttagaataccatatgcgccaatgttttgctgggtgtgaatattttactttttttttttttgagacagggtttcactatgttgctcaggctggagtgcagtggcgtgattgtggctcattgcagccttgacctcccaggctcaagcgatcccctcacctcagcctcctgagtagctgggactacaggcacttaccaccacacctggctaacttttgtatttttttgtagagatagggttctaccacgttgcccaggatggtctcaaacttttgggctcaagcgatcctcccacctcaaggtgctgggattacaggcgtgaggcaccacgcctggccatactttacttgtgagatttagagaaatagttccccatggtgtatcatgaaaacccaatgcttccttccatcactgtattgcaactcaactggtgccggtctttcaacttatttataaacattttgaccttattacctggatctgtaaggctcaaatctgtgttttcataacttaaaaggctcccagtggaaacagttgctgaagataatggttcataagacagtgttttagcctagaaattaaggggaatatcataccacaatgtagcaagtagtatgtaagaaaaccccaaatcaccaaccccagcagttgtcacttctgagctcaggtcaagtgtagaaaccatcatagttacaaagatcagtagtaaaaccttttcatcattgcccagaaatgattaggctttcatagacatacatacgcacccccccaccctcaatctcattcattcctacagctgttatctttataaacacatgtgcgtacacacacacacacacacacacacacacacacacaccagacatatgcccttattgttttacattgttttatagttttgcttctcagaactgtagagatcatgcatcaggtagactggaaagacttctgatgctcagatttggctagtttcatcattgatccacttcactaaaagcagatctcagaaagcactgactttaatgttataacatagcttctgtaaactaaacaaaagagaatacgaagccaaacagctctaaaaatcgagtgaacattaagacattactaaccttatcatctggcttcacagttggacccaaatatgcatgttcttcctccacagcataacttaacactgcatgattttcaacaacagattccttcagcttaactgaaaaatggattttggagttcaagatgggagaaaaatatagttgggataagacaaatcaaattcttagcaccacaggacaccattccctgctttcctacaatctactttctcattttgcttcttaaagttgtcttgtcttagatcaaagaaaaaattcaccgtatttgttaaaaacattcactagtcagcacaatatactttttcctggaaaactgtagctattgttattttatgaataaaatgctttaagaaatttgaatattaggtctaaaacctagaaaagaaccagtgtgatgagaaatgcttttgccactgttttaagtggaaaagcaagaatattaaatcataaacacagtgtggtcctaaagatgcgaaaacatgcatataaaagagacaataaagaaaacaccagggccaggtgcggtggcttacacctgtaatcatagcactttgggaggctgaggcaggtggatcgcttgagtgcaggagttcgagaccagcctaggcaacacagtgaaacctcatctctacaaaaattacaaacattagcctggggcagtggcaggcacctgtagtcgcagctactcaggagactgaggtgggagggtggcttgcttgagcctgggaggcggaggttgtaatgaaccgagaatgtgccaccacactccagcctctgcaacagagccagaccccgtctcaaaaaaccacaccaaaatgtaaccagtggttgtttattaatggtagcacaaggagtaatttttacttgtactgtaccttttagtgccttctattattttatttcatttttttagagacagtttttttttttttttttgaggcagactctcgctctgtcacccaggctggaatgcagtggcgcaatctcgactcactgcaacctccacctcccaggttcaggcaattctccctgcctcagcctcctgagtagctgggattacaggcacacaccaccatgcctggctaatttttctatttttagtagagacggagtttcaccatgttggccaggctggtctcgaactcgtgacctcaggtgatccgcccacctcggcctcccaaagtgctgggattacaggtgtgagccaccacgcctggcgagacagagtcttgttatgtttcccagactggtcttgaactgctagcctgaagtgatcctcctgccttagcctcctgagtagctgggattataggcatgagccactacgcccagcttttttttttttttacagctttctaaattcataatgagcatatattacttttatgatgaattatcattcctaattatatttgagatattaaaacattaaaattatactttgtgtctcatattaacaatcatgtattctgagcttattttccttcttattccaagtgaccaactgacacttgtgagaaagctcaccaagacatattgtagtctatggctctgaaaaatacaattaaaactgcttcactgaatataaacaaaattctgcttcataatctcagtgatattagaaggtatgcacattaaaggtatatttcttaaatgtttatgtaacaattattaattattcattttatttttttttaagactagtcaagtgcagtagtgagaacagggaaaagaatagaacaaagagtccgatctgtaactgactgtaaataatcaattgagataactcattacattcggaccaggagaattatttttcaaatgtagacctagtaaacaagcaggtaggcatggtggctcacccctctagtcccagcaactcaggaagttgaggtg

SEQ ID NO: 1884657 - DNA, 4001 bp, Homo sapiens; identical to SEQ ID NO: 915494

SEQ ID NO: 1884658 - DNA, 4001 bp, Homo sapiens; identical to SEQ ID NO: 915499

SEQ ID NO: 1884659 - DNA, 4001 bp, Homo sapiens
ccggccacgtggtcacatgcgagccctgcacgccttctcctttgcagatcagaggcaattccaccatgctgtagtcacggccccactgccagactttgtctatgagctgcacattgttcccacctggagaggtggggcccctagggagtcctttttgggtggctgtggcgacctcttggagtgatagatgttaaagacaatgtcccctttgtacatgtcaaaattccaagtggtgactgaagaggcatccacaatctgaatgagaatcttgtgtggggctcctttgaagatgcttgcagagtggtagatggtctcagtccagagcttgaggtcttcattctccagctcctccatggtccagtagagagatttggggaccagtccaccctctggcactttgcacatgcactctccactcaggaaatctgaaataatctatcaatgtaatccagcaggcctccaggaccctggtagtcatttcctgcataaatgaggaatttccttctggtgttgtcatcaataaatggactaaccagcgtccagagcacaggaaataccctgggtgaccgcaggatgagaagtcggcccagtctcttagggtaactggccttcaccacctcgatgatccaccgcagcactttgacatcaggtctccataagtggcgcatgttcaccccttccaagtccgccaggcaggtccatgagctgataggccaaacaaagacttttgtattctcttcacatcgccttagctcttcttcatttatggagagaacgtatctcagcagggcttcctccccgagtgctctcaccaagccgttggtgtccatctgccccagcctgagcatacagaggggccacccatctttgtcgtgatgatgccagcctcccgtgtagtaattctgaaggacctgtggaacggcccaggtagcaagaatgtagtctacctggtgctgcttcctccacgccaaagattgacaaatgatctctctggctttgtcaatattaaaatcccatgcacataggaactgaagaatatgctcatcttttggaatttcacccttgtgggtctcctggagccacccgtgaagtctaatgagacagctctcctgcagcggagtcaaatcgcccaggtatctcttgatgtagtcagcatctagtttgttatcagggatgcccaccacgggctcaggtgcactggggctgctgagggcatcgccactcagcccctccttgaggacagcatctgggatgacaacagccatggacgctgcttgtttcttgcaggatgacgaagatgtctctgaagagggcgtgatggaaggtggagtccaatggggcacaaaggttatgcctccttctaaatggcgaaggtagtattcaataattttctttcctttttttaatattgctggtatattgtttcattgcaattttttccatggtactttcaaaaccaaagaaagatttaatatctaaacttgcagactgttcaaaacgggtccaatcttcattttcagggtgaacggtatagcaattggaaaatgtttcattatgaccctcaatgtgcaaagtacgttcccgagaattcagtgagttcttctggacaaaataaacgtaatcaactcctgcaatcttcttcagcagtcttggtgcatctacatccagcttgcagcgcctttcaatgacatgaacagccccatcttcactcttgaattcattcacagtgtcactgcccatgaatgtcggaatcaaaggacacgtagggaacctcctttcataggcagccataattaatttgaaggggtatttgtataccctcactggtgactggtatttttgcaccatgattgtaatacaacagcaatcctttcacacctgtcttgccaaggataatcattaagtatggtattttaagctgaatatggtgagaggatattaaaacttacaaaactgaatattctcaaggagcccaaagtctagttcttgtcagaatggctgggcctgggatgtggggtggcgacgggcgctcataccagcagctctgcggagcagtcgcggttccactaacaggtgctgacttcttaaaggttagttgcaatatggaatctgaaaccatgtcaaacttttcatattattttatatataaagccactgtcagccagggcaataaactgagacccctctctataaaaaataagccaggcacagtggcacgtttgttgtcccagctacttaggaggctgaggcaggaggatcgcttgagcccaggagttcaaggctgcagtgatctaggattgagccactgtgctcactctagcctgggcaacagagcaagaccctgtgtctctaaaaaaaaaatgctttaaataaaaaaaaataataaagccattggtccagcctacactttgaataaatctttaaccttgtatggttttgtaacatcaaccactggtcatctggaaaatattagttcactaagttacacagatcttctaaatgctgacacatttcattataaaataacaaaaaaaattctcatccaacaatattaccactgatctcagcagaaaagcctaaataatgggaagaagtcaggctcaaagtgactgtgatggttaatactgaatgtcaacttgattggattgaaggatacaaagtattgatcctgggtgtgtctgtgagggtgttgcaaaaagagattaacatttgagtcagtgggctagggaaggcagacccacccttaatctggtgagcacaatctaatcagctgccagtgaatataaagcaggcagaaaaatgtgaaaaggagagacttgtctagcctcccagcctacgtcgttctcccgtgctgggtgcttcctgccctcaaacatcggactccaagttcttcagttttgggactcagactggctctccttgctcctcggcttgcagacagcctattgtgggatcttgtgattgtgtaattaatacttaataaactcccctttatatatatacgtgtgtgtgtgtgtgtgtgtgtgtgtgtgtgtatctatcctattagttctgtccctctagagaaccctaatagtggcagataccagttttctaaaattctaatttttgcttgaaaacctaacttttatcattagtaaaaaaaatcttgtccattgttttccttgaagtgacattcacgtcactcatttatgaggaaatgtctgccaaatactcaagtttgaataaccacagtcggtctgcccgttgtattttaagcaaaaacaatccacaacaaaagtagctagttcagcttacagctcaaacaatcacactttagtttgtagctggagtactttaggtacacttttaatttcattaagaagactattgggaagacacatactcaaagaccaagatttaataaaatgaataatgtttactacttcatcaatagacattcttaaatgaaactggcattttttaaagtttacactggaagcgcatgatgatgacgaacacaatgactactagcagagtttggtgacaatggcttgattcatgctaaggtgctggcagctttatccaccattaccatcagtgcaaacccaacacagtgaaaataccatacagacttagtattattatgaaaatagttttacttgtagattcccaaaaaaggtttcatgaaccctctccagggatctacagattatactctaagaactgttactttagggaactccttgaatgtctattgcattagtctgttctcatgctgctaataaagacatacccaagactgggtaatttaccaacaaaaagaggttcaatggactgacagttccacatagctgcggaggcctcacaatcaaggcagaagacaaaggaggagcaaagtcacatcttacatggcagcaggcaagagcgcatgtgcagggaactcccatttataaaaccatcagatctcatgagacttattcactaccatgagaacagtaagggggaaaatgcccccatga

SEQ ID NO: 1884660 - DNA, 4001 bp, Homo sapiens
gtcacttcccaaaattagctgaaaaaaaagtttcatccggttaactgtctctttcgctccgctacaacaacaaacgtgcacaggggagtgagggcagggcgctcgcagggggcacgcagggagggcccagggcgccagggaggccgcgccgggctaatccgaaggggctgcgaggtcaggctgtaaccgggtcaatgtgtggaatattggggggctcggctgcagacttggccaaatggacgggactattaaggtaagcggcggggcaacggacgcgggcggcggggaccggccggggaggcgaagcggcgggcgggtaggtgcggggcccgcgtcccggaagacgtggcctctctcccttccctccgcgccccggcttcgcgccggctcctccggcgctcgggtggcgagtcctactcgcgggccagccggccaggcgcccgcattgagggcgaccctcccccgaaatcccagcccccaaagtggagccccggcccccctcccacctcgctgcccgccggggctgcaggaggggacggcgggaaaccgggggaccccagggtacggaacggagtcaagggcgagagacctcggggtccaccactcccaccgacacccggggctcccgtggccccagcgctaggcactgggcttcctctccgcagaggcggaacacggcgggggcgggggctgcagtcgcccgggctcgggtccctgcctggtgggccctggggtgggtaagtggcctcgttgcacgagggtaggggtgcaagtgagtgtgtcgggggatctatctgagcgggctcctccagatggaagcccctgtttacatgtcagcgctttcccttcctctcggcactcagtcgcccggctctaggcgctggagagccgccggctccgcgggactcctgggccggcctcgccgcctctccggcggggaaccttccccagcccccgtccgcacagatccctagcgccccgagcccccgcccttcgcgcctaggcgtgcgccggctccaggaccagggctcctggagctgtcgcctccgaaagggtcctgcgtccttcggagccgcctccgttgcaggggccggctgtgagcccgcgccccgcgcccgcccggccattcccaccccagccgccgccgccaagcctgggtctaggttgcaaagtgcaacccaggcggaaaggtgagggtttgggttcgcgtctcacttcagaaaagttgactgctgtctctgaaagggttcgccaagtagggccaggagcagagaggagggacaccccctaacgtgacgggccttagaggacctaggggaatgaatgggaccaggggttagcttcgaggctgccgcgcaacaccaagcgggagtctgtctggaaaaactattaggctggcgaggtggggactggcagagcccgccattccccagaacccgaaagaatcgactccctgctcagggctcagcaagagaaggctaagatgttgggctcagagaattcaagagatttttatcttctgggtggggtcgtggtttttattttctaagttttttttatgaaagtttgaaatatgctgacttaggtaaaagacaccaaccgaaggaacttgcaaatctggagatgagataactgactgtgatgggttaaagggagctataagagcctataagagcctgggttcctcaaacccaaagtgagtaggtgagaagtaggtgagaggggattcctgcaaagacccgagagtgggggtcattgggccattttatgcctgtttctctgcttcctgttgatgtgttcatgcaagtgtctctgtatttctgggtttagtaatgagatgctcccctctagaaaactccctcgccccaatcaggacagttaccacttactctgaaggcctcttctgatccagaagggtggtaagatggcctcagggtcttgatgtggacaccctaaggaaaagtgaagaaatatctccacactgcttaaactctacgcacaggccctgagcaaaaggaggaagctgtggtctgtgtacccaggatgtgctaacctctttagatacacacagggattggcatggcaggcctcgagaacaggcttagagcaggaacctgacacttcaggccaaggatgggagtgaaagtccttcctttttttgtgggtggtaggagccatgagctcctccaaaccctccctgtgagcaacctgtcattcacctaagttacctggctaggctgagtccccacagagctaccttcagtctccaagcattctgcaagattgagcctttagtgtgtgtgttggtgtttaagttgtgtgaaagccacagttttctgttcgcatgtgacctctggatcttggggtttccagatcctgttcccacaatagttcaaatactgtgcttggagaggacagtggaccaggagagaggccagcattcttctgctctcttggtgagaatgaaccgtccattaagcctgtttgagattcatagtcatcacaaaaatgaaacagtggaactaggttacctctacagtagtatctaaccaatcttctcagtgcctaaaatgtgctcatatgtgtttacaagaacacttgcctgtatgtgcactaaatccagccctacactgatcgaggttgacgacactctagagagaatctaatttgtgtacacaaatccagggtgtccatttccagtttgaactgcctggaaaaatcaggtttgagtgattctaggatgtgattttatgcacctgcatagttcttcctcaaatataagtcatgtctatatttcaaaatacctgtgggtcttggcacttaggtggtatttggtgcaggaagccagggaagtctggatttcttcacagaagccctttattttgtgcataatttgcacaactctatgtgattacaaaatcccaatcttgttgccctccttataagtccctccatattatattctcttctcttttccaagaacggctcctggaaaggctctgaccgtcacattgggagaagcaatatttgctggagccacgctactcttttgtcacagacaggttaacttgcagtattaaacaacacccgacccacgcccctgcttcccacactgatattatcagtgttaaaaagcacatgatactgtttgctgctttaagaaatgacctggtttcaaaaactgcatcttaattttaggctggcttcagttgaatccagttaattttatctatgaatgcctgactcagtgcacgtggtgtcattacagatggggagacagagaagacagacatggtgaatgaaggtgggaaatagagaatgaacagtggatttggagtcagaaagcccgggttcattctcagctctgctacctagtagctgtgtgccttatagcaaggcacttcttgtatctgtttccttatctagaaaatggggccaaagcacctccttgccacaagccataggaagaatttttaaagtctgctaccttagctggatacacattaaattaacttcatgtgccttatagcaaggcacctcttgaatctgtttccttatctagaaaatggggccaaagcacctccttgccacaagtcacaggaataatgttttaaagcctgccaccttagctggatacacattaattgaactttgcttttgggaatgggcataccaggacagattggtcagaaaattagaacacaggtccaaatttaccatcatgcatatttcattaattcaacaaatgtttatgatgcatctattatgttgcaaggctctgcactgtgtattgaggataaaacaggggtcaaaaccctccaggaatgtagacgctagtggagggagctgacacatacagagaacaatctcagttgagtggtgatatatcttctgaagaacaataacgcaggttagggaatggaaagtaatgacgctatatagccaggatggtgaggagaagcgtgtctaacaaagtcacagtcgggcagaggcactctctc

SEQ ID NO: 1884661 - DNA, 4001 bp, Homo sapiens; identical to SEQ ID NO: 915500

SEQ ID NO: 1884662 - DNA, 4001 bp, Homo sapiens; identical to SEQ ID NO: 915508

SEQ ID NO: 1884663 - DNA, 4001 bp, Homo sapiens; identical to SEQ ID NO: 915511

SEQ ID NO: 1884664 - DNA, 4001 bp, Homo sapiens
agacactattctgcatggtgcccaggttgcccatctgtgcccagtggcagccccctcatgcccaggtctggggatcccaggacctctctcctcaatgagcacctgcgcctgtccttgtccccctgccccgtatccatcaacgctccatgcaaggggctcactgggattaaaggggcccaggcttctcagagacccagcttcccaagccctcatcttgctgaatgatgtccttgtcctctgtcctccctctggtcctgtctactcttcccccgagttaccttccagatcaacatgaccttgtttcaaaaaataaaccaattagtatgttcttctgcagcccggatgtaccctcatgcgcccttttctggttggctggccggcagagtcccagcatccaccgagtgctcagggcgggtgggaggtagagcagcatgtggctgtgtgcccacatccctgggagacaaggattgtcaggcagcatcagggaaaatggtatgtggggagatgattctgttgtaaaaggcggttctataaaacaatcacaatttggattgttatcaaggagagaaaggagcctctggttgaaccagagaggtgggtctgactcagaagtgtttcccagactgccttcacacacctgcagctgttcggggcccgtgatggaaccaggagcagggagcgtggatagcatccttaaaagtccgccagttgggaggctgaggcgggcggatcacgaggtcaggagatcgagaccatcctggctaacacggtaaaaccccgtctctactaaaaatacaaaaaaaaaattagccgggcgtgatggtgggcacctgtagtcccagctactcgggaggctgaggcaggagaatggcatgaacccgggaggcagagcttgcagtgagccgagatcgcgccactgcactccagcctgggtgacagagcgagactgtctcaaaaacaaaaacaaaaatgtccgctcagtccactcttccctgattgaaggacaaatcgcattctaatgtttagcgtctaaatgaagcgtttcccagaacagagtgaacctttccattgtcctctgaaagcatttcaaaaataagggggaatctaattagttaatttctgcgtgtgattccaagaaatgtaatatatttgatagaaaattacctgtggcaactgctttccttctctgagacttgtgttttccaagacgggcgcagatgggcgctcagcacgggccgggcgtgatccaattacacagcagatttcagacgcccagacttggagctggggaagcctggcgccctggggagaacactgcctggagagaggccggggaggtcaggggaccccgactgctttgggccaggcttcatcctacaggcttttgtgttcttataaccccagcttgtcatgcaggaagcatcctcacagacacccagccacatcccccactgcgggggcacctacgctgtcctattcccagcgccctctgggtcaccttgccttggaggccctgagctcagcttgtgcctggcccagcactcagtgactcactgtccgctgggactttgccgagtggattaggagctgagacctcctccatgatggagaaggtggataccaagagaaaaggaccagggacatggttttatttggagaaggcaggtgggagggaggttgtgtgggtgtgtgtgtgtgtgtgtgtgtgtgtgtgtgtgtaactccgggaaccctcagaatggcacggcccccagcaggctcctcccagattctagctaaatgtgccacttgtacaattctaagttgtcatgagtctgggagagccttaggctaccctcccctgttttaggcaacctggaccttatttgctttagaaaagtcagctctcctgttcctaaggcctcctggatgggggcccgcctcttccccttggtggtttgctggggtgggagttcgcgtttcgcggtcctctgaagggctctcgctgctgcttctgtcattcctgccggtcttccgtggcttctcctatgaatgccacagccctttgtgggtcagattccggaatgcaggctctgtcatcaccctctgctgccagttgctccctgtccggtccccaggccccggctagtcctgaggatgcgttgggcgccggagggagggaccacaggatgcgcaggtcaccacactggcctcctacatgctcaccctttgtgctggtgtcctggggctgctctcacaaagggttcaaagccaccagctggggcttgaacaacagaagtgtctcccctcacagttctggaggcagagaccaatgtcaaggtgtcggcagggccctctccctccagtgctctaggggaggacccttccttgtctctttcagcttctggggagtccaggtgttctttggcttgtggccacatcccccagtctctgcttccatctgcacgtggccatgtctctgtgtgtctgtattttccctccttataagggcaccaaccagtggacttagggcccacttattccaggatgacctcatcccaagtgattgcatctccagcaaccttacttccaaagaaggtcacactctgaggttctacatagacgtggattttagggggacaaaattcaaccactaccgtctctttgcttgaaatcacacacaatttccagaggcctagagatgccactttgtccgcagatctcttcctggccccgcctctgcctgggcagcctgggtctgattgtccttctgtctgccaccctcacagtcctcagccgtggcctggttcctgtcctgggggctgaccagccttctggggcctgggacctggggcatcgctgctgcctgccgtctggcctcagggcacctgcaaggtcagtgccagcccagcaggatggctgacctttctcttgctctaagcgtgggctctgcagcccacctcaccccactgccatcagggaaccttctagcatagggcaagctgagtgggggccaaagcccacggtagtgcatctcccggaccagggccaggagcaaaagcagtgtgcatgctgtctgcccctctctggaagcccacagacgatgtcctctcctgtctcattgataagcaccctggggtctcctggtcactcctagcagccaggggaaactgagaaaaggggttttgtagctgggtctgttaactgccaagacaatattagggtcctcatagtgaggaaggggactagaatggatgtcagggggccggatctgctgggggtctggatggccaggcccttcattgcacacttggggaaactgaggcccagagataggcttattggagtcagggcattagagggcaccaggatcatccagctctgcagcaggtgctccctggtgtcccgtgcctctggcccaggtggcaccttcctgacggcagcaccccctctccccggcttggagctgatgtcagagtgcacctagcagtagcggctgtggcagcagttcggaggcccttaggggagctggagtccccagtgtttgccagctcatcccgctgcccttcccaccacatgcggcccccagggtcacggtggcccgcagcctgtgatccagacctccctctcccgccaggccggaacctgctggacgtccgtgtgtcccactccatcaggcctggagacccgggaggccagcagcagagccacactctattctgtgtcctcatcaccaagcactaggttaaatgacagagaactgaccaaacccttcagagagttcgaaagaggcggtttcagtctggctcgctgcccctctcccagccttttcggcagcagcctgggtggtgtgttttagttggtggggcaggggacagggtgtggctcagcggagaacacacccaaggctctctagatggaaggaggggccaggctcttccggtgctgggatgtgggggtggcttggaacactgacagaggagggagggtgcccggggcgcgtttccccactgaattcaggc

SEQ ID NO: 1884665 - DNA, 4001 bp, Homo sapiens
gcctcccaaagcactgggattgcaggttcacaccaccatatccaggtcctgggggtcccttttataaggacattaatcctatttatgaaggttctacacttatgacttgcttacctcccaaagaccccacctcataaaaccatcacgttgggagttaggacttcaacatatgaatttggggggttggcacaaacgtttggttcattacaagaatagaggccttcccccaatacggctgcttttacctggagaatcctccaagtcacaaggtgaccttgtgcagggcacttctcatcttcgagcctctgtttcctctctgacagtgggggacctgggctgacattggctggagccaccatgacttaatggggaagtccccgcggccctgggactcatctgaggtcattaagcactgtcagggtcacctgtccgaagctggatttttcctaaacttcatttgcttttctctcctttcttttgccctggatactctcatctccctcaatttttctttcctttttcccttctcactacccacctccaatttcaaaatgtgcaaatagcagagcatcccagtggagttgccacggcaacagaagctggttttccctttccaaatgatgggccccttggaagcctctctcccctttgcctccttggtgaccagagctcaaggaagaaagcaaggtgtgtgggcaccccgaactggagggtccctttcttgtgcttgcaaggtgcccaggtcgtagagactgaggggccaggacaggggaggccatggagccagtttttgtttgctggggctgccataagaaagtatcaaaaactgggtggttttatcagaaacattctctcaccgttgtgggggcggacgcctgtgattagggtgtcccagggctggtttctcctgaggcctctcctcctggcttgcaggtggctgtcgtcatcctcactcggtttcttcctgtctgtccaggtttcctcttcttacaacacacctctcctgttggatgaggacctacctgagtgactccactttaaagactctctgtagctgtaaagatctcatctccaaataaagaggccgaaacggggtgccagtgcctcttccccatacccccagcccaggatgccagagagagtggaccagatgttgactgaaaggaggcaccaggcctagcaaagctccgtttgcaccagcctgagttattttagactctaaattgtaccttcactgggatccagagttaaaatgaggatttgcatgggagcaggtgggcgagtcctagagataaggaaaaccccccacagaatccgtgtcttccaccacatagccgtggccaggagttcacaggcgtcccagggcaccgagcagaggatgcttggggctcgtccagacagggccagcactggatgaaccaggatgaggtcgggctgtgttcggggagccggcatctgggcactgggcagttgtgccatcagctcaggttctggtgcttagatcagctgaaacagagacagccatgtcatggggagaggtgtcacctcatggagcccacaccagtgggccactcaacccaggccaacccctcctgaccagggacctctctcacctgctgtctggcctacaaattatttttgagatttgtccctggaatgtgacagtgttcacggtttctctagacctacccaggtataaaaaccccttgatccctgccatctaagatggatgctacccctgctccgtaagtcctgcggagcagcctctgccctgcccaccagctcacaccttttagcccatgtccctgagtccctgaatcactgaggtaaggcggcttgtctcctgctgagaccaagagccccaagacgggcacttcagcaaaatcagccccacacccatgtctcctcctcccaaattcttacctccagtttactagactctagactgtgtcctgctgcccagttgactactcccgtgggggaatcccaaaggatccaaaatgtgcaatgtgtccaaaaccaagctccccacccccaccccaagcacatagatttccctctttgttcatgatccactcaagccggaagcctgagtatcatccacagtcctgtccatcagccagtccagtctatcagccagtccagtccatcagccagtccagtccagtccatcagccagtccagtccatcagcagtccagtccatcagcccgtccagtccatcagccagtccagtcatgtccatcagccagtccagtctatcagccagtccagtccatcagccagtctagtcctgtccatcagccagtccagtccaggctccaaataccaactgacgtattgcacttctttccatttccattgtctctactcaagcccattccagagactacacagaccagtgtagtagcttcccagccaggctccacattctactcctttcacctacaacccagtctccaccccaggagctcgaagagggatctttcaacaaagaccataaatcagattgtgtcacacaccctccccctgagacacttaatcgcagcaggtttgcagcaggaatctggatgaactgggatgaggtcaggctgtgttcggggagctggcacctgggcactgggcaggtgtgccatcagttcagtgtctggtgcttagatcagctgaaacagagacagccgcatcgtggggagaggtgtcacctcatggagtccatccaggttgggctccacaccagattccccctggcctgggagacccagtgcgacaggatccttcccaggttttcacttttttttttttgcccctgccccctgctctctgcattttggctgcacctgtgtcccactattccgagaccaccctatccaaattgggctctgctcctcttctaactgatcacatctctgctttgttcttttggttctcctcccagttggatcactcatttattcctgtgcttatttattgtctagctctgagctccctgaggtctggcttattccctgcctttcttttgtggcctgaggtcagcatctgctgggattgtctcaaggcacaaaccctgcagcctgcagaggcaactgtaggttgctatatttgcacctgcccagaggagtcaaagaaacaaaccccaggccctgagctacagagttaactggctcgtagaggaggccaactcagtgcaattaactctgacatggatgtttgcatggtttaaaaaaaaaattaacccaaaaagactgctttataccaaataagacttttgatgggaattttgatggaaatcatgttttgatgcaagttcaggtgcaggtagggctggggattttttgtcagaacacacaataattctgcctcttattttagagcttgtatttcaatgccatgtggtgtaggaaaacataaattttcatcttaatacacttttgaggcatcagagccattacagaccttgttttatagtgttttaaaagcattagtccttcacgacccatttttaagaggacagactggaggagcaaaaccattactaggtgtgggactcatttattttcacatggaaacagaggcataatagtaggtcttgctgttaaacatgaccttccaactgcagggttaaaaccctcagggaagtggcaggatttactaacctgggcctgattaaaatgcctgttggtggctgccagcttggactgacagtgcctgcagagggggcaggtcggaatgcttccctcccacaagggggcccggaaaggccagcgctgctccccgtgtgcccagcaggtcgagggatgtcctttccctggctcctgggaagagagtatcccctgagatgcacgcggctcctgcagaaagaatttggaatgaaggggctttgtggtatgattcacatacacattttcttttatttcttttttgtttgtttgtttaaatagagatgggattttgccatgttgcccaggttggtcttgaacacctggtcctgggcccaagtgatcc

SEQ ID NO: 1884666 - DNA, 4001 bp, Homo sapiens; identical to SEQ ID NO: 915522

SEQ ID NO: 1884667 - DNA, 4001 bp, Homo sapiens; identical to SEQ ID NO: 915532

SEQ ID NO: 1884668 - DNA, 4001 bp, Homo sapiens; identical to SEQ ID NO: 915545

SEQ ID NO: 1884669 - DNA, 4001 bp, Homo sapiens
gtaactggcaaggcctaaactggatgatcccggggtcctacccaaatgctgggagtccagaattctatcttagaatcacagctaccagcagtgtcagtatctgcttccatttttgttctacccattctgaacaggtcagtgtcctaggacccagacatcaggagctaggtgacattcaaagccctactcctagcctgctgggtacacatttgaacctatggcaaattatataccttgtatggttatacagagaattagaaaacatctataaaatacttggcatagagtcccagacacataggagtaccccagtgcttataatttcagactgggctctattccaaacacatcaaacaagaactgggaaaccagtcaggacaggattctcacagagaaagggcttcctctcccaaaagaaagaaaaatcaaacttccagactgacttctgagaaggtcccttcctggcactgtctcatcctcagagtcaaggaaataagaaaaataagaggtcagaaaaggaacaagaaaaacaggtgtgctattggcctatcctttggctataggaggaggcattcctccttggtcctaaggagcaaagggaccctcagctggagtcaggctgggtctacagggcttgctgtgaaaggactgtcccagccccagcatctgacttccaccagccatcagctccaacactcaccttcaccttggtggccacagtgtcaacctgagtggagaaccacgagttctcaccccggtagttgggagtaaggtccagaatgacacggatgcctaaaacaacggaggaagacgcaatcatgagacagtctatgagttaagggaaaataaggaaatcacaaatgcaagtcactgagtgtttcctatgtattacttggtacaaaagcttgaatttgaacccgggcaaaattcattccattgaaacagatgtgagcaaggaagggccttaagatatgggaaggcaggccaggcgagttcaaaaccagaccggtcaacatgttgaaaattgtctctactaaaaataaaaaaattatctgggtgtggtggcacacggctgtagtaccagctactcaggaggctgaggcacgagaatcgcttgaaccctgggggaggaggctgcagtaagctgagatcgttccactgcactgcagcctgggtgacaagagtgagactccatctcaaaaaaaaaaaaagatattggaaggcagaaagtttatagtgcagagaagtggcccctgtgttccccactcccaaagtgaacctttttaaacatgtgtctatatcgagtcgtaaaacaatatttgggattccccccccccaaaaaaacctactgttttacaagtttaaaaccactggtttagtaaatatctatattttgcaaataagggcactgaagcccagaagttaaatgacctgctcaagattccacagccaagtagaaagcccccagacgactggacaaatccattttaggctgaagactaacaaatctcccctctacctgccctaggaaaactcagagccagttagcaggaaaccagacaaaagttctagcctacttttcctctggccaagtcctttctagctgtttccttgggaaccccaggatacccactcttttttttagccgattgcaagagactgtcaaaatcttccttggagccaaaattggggtcgatctgcagcaagtcagtctgagcgacatcatccttctggttcttgtgaattggacccagcacaaggcccttcaccttcagagagctcaggtaatcgagacgccccttcagacctgaaatgggggctgggttaacaagtgaggcccctctgagaggcccctgacctccccaccctcccttctcccagcgcctaagggtgggacggggagggggcaaagggggagagagggaggcaaggctgaatcacgagactcagaggagctgatgtaaggagtcctgcacattacttcagaaaccggttgcaactggcttctggcgccgcggggaaggaggacgctgagtcacccaccctcgtgacggagtgaggggcgggtcggctttcttcaaagaaaggagggaaggacaatgtgccggggagggggtgggggaagggggaacagtcgtcggtacgggatggagggaagaaccatctagatccgtctggggacaggggagggggtcggtgcaagccaccagattcaaccggaggtacccgggacgggggcgcgctgcactcacccgccaggttgcccgcgccgtggccctggaaggcctgaaggtcgccgatgcggtagagggcgcccgtgtgccaccacttctgcgccggtagctcgcgacaacgcggcgctcgcacgattatgaccacggcaccagcaagcatgccgagccagccgagccagaagagcagcagcagtgcccagcgggtgcgtacccagccggggctgcctgccaccttcagcagctcctccttggacaggcccgtgaacttagccgcggctgccgcctccgcctcgtcttccgccaccttgatcttcaccagaccattcttctcggctcccgccagggacatggccgccccagacgccgcgttcatcggctgcttctcgggctctaactcattcagctccacctccttcatatccacctcggtgtcctggctcatggtgcctgcagaaccggcgacacgacgcagcttgcggtcagatggtggctcaacccctacctggaccctcggacccagaacgctctccccggcctctgtgcctccgcgcagtttcggctactgcatctgctcagcagcaggcgcggcctctgggaaggggcagcggagccccgccccggcccgccccttaaggtggaacctcggggactgccccagccgtgggcggctcagggtagtaaagtcaggaacacgcctccgacagtacttcctgcatggtccaatttctcatctccaacctgtctaaccctaaagttcttttcaacctgattctgggaaggcctggcacggagccacctttaagtggactaggcctgtgatcctgccccaaatcccgaggcccctccagtgtcctttaggccttaccgcccccaaacgcccctcttcttccattccggcaggctagtgactaccccaacaccatcctccatttgcccctggttcacggctccggccgccgtctggttttcccaactttgcatggctacttgcactctcagaggcagccagtcacaacttctgccttttcccccaccaaggcttgccctctcaggcctctgggacttggcgctagacctctgctagacctctgcttccgtgcacggcttactcccactcgtttttcaagactcatcttgaattcatttcaagaaattcctcatgcagcaactatttattgtgtactcactacaatactttgctttgttaactttattgaatttaacactaatccagccttcttcacagtactttaaaatgaatggtttgggcaggaaggttgaggtagacaccccccttcttatcctaccccacccccagctgctagcacctggatgtttggcagctaggaatcagacatccagaagagactgatagggctgtaatgaacataacagagctaggtctcagaggcatccaccttttttgtggaatagaccagaagatgccatggccagactcttacccaccttgcaggaactcccacagttatccccaaactcccccaaggtcctgtctccctatcacttcactatgttaggccttggaggcagctggtactgcagaggctttgaagaagcctagaattccctccacagggtccttggattgaagtggggcagagacagggttcacagcagggaactaccggacatcaacaccgtggggtgccaacactctcaggaactccttgttcctaaacagtgccagttgggctactttcagagaggagctggaggaaatcggttctttctccctttcccacctag

SEQ ID NO: 1884670 - DNA, 4001 bp, Homo sapiens
tccctgcgttctccagtttctcaggtgttcatgtattttcactgtcggtcatagtgagctagtttgattcatcatagaaactgcctacttggtggcataagctgtaaggaacaaaaaatatcaactaacctctcagctctgaaggcttttcaatggtatatagcaacaagctgctcctgaatcaaaaaatcattcaattagctaattatcccaaacagccaaaactattttagttacggttgctaatggacaaactaagaaaaggtaaccaaatgtctcagacaattccttatggaataagctctcatgccctcttcatgttaaccctggtgagttcacaattactggttcccaggctaaaacaggggtaaggcaggatgtttcctcctcattggagcagaatcctggaaagctacaactgacaagcattcgtctgaccctgggcagatcagtgggcatctatctgagaaaaaaggggcatatatcagtgggcatctatctagaaacatcactacagagaacaagaggaaccagaaaactttatgggttaagcaggctttggtaacaaatatcaaaatggctaagttatctattagataataggcccatagaattcgaaaaacaacttactgtaagatagaggcagactgtcatcaggaatacctggaaaggaaagcaaattagttattttaaggtattaggatggaatgaagcttattcataaacaacaactgccatcagaactctaacatgctattaacttttgtacctcacagaacatcagcttatcaattcaaatcatctgacagtaacgtgatcgatatatggatgagggtaacagcacacccttacaagaactgtagtaccgggttgcgatctccctccccagaaaatcatttcaagaggaacaagatggaaggcgccaaaaaacattgttccgccggccacttgttttcttgaacatttacaaagatgacatacaccaatttggataattacctgtattcaccctgggaggcagctgaattccccaggatagattatgagatgctgtagacaacagaggaaagcattttatgtacctaaaaatagtcattcaaagaccccttaagacctctctctcacttctcagtagtaagatgacatcacttgaaagttcagccatatgcttgtcattttgtgttcatcatggagtggttatctacaaggtctcctctgtaagagcataaaccatgtacacctacctggaacattactgtaacgctggctttgcataaagatgggtcttgtcccattccttcaccagtaagctcttgtgggctgaacatctgaaaaaataacacccttcactaacacctcagacaaatcaatagggccctgacatttgttgcgtacagtacagtgctactcagaattttctgttttctccactaatccatcagaaagagagagttcagttcgtaaaatcatccccgtagcaacttccacacactcaacgaaagagcagagattaagaaatggccgtaagaacttactgcaacaacagagctctcttcggttccaacgtgcgcgtaaatcctgcagacaggagcccaataagacattaggtcaactcagggcatttcgaaaacgctattttctgaacagacggctaagcaagaggcttgcagggcccatctcctcagagttatttatcctcacggagctcagtacaggtctgtgaaaaggtcctcatcataggaagggggacctacacggcccgccatcgccattttgtccttcacaaagccccactgctacttttaagcctcgaggccacgcacaagaccttatccgccagtcgccctggccaggcagctacaacacagaaggcatagtgcgtgctatgctatgttcgcacaatcgctcaaaagaaaataaaagaaaaagacaaagtacaaaagagtaacagctataaagaccacgaagccacttaccacgagcagtagaaaaatgagaacgaatctccccggggagacgattaaataccatgccgcagaggcccacgggatttgggggcggggctacggcgagcgcacgcgcatacgttgaccgcatgcgaccccggggagttgtgggtagagagttccagggaaggagggcgtagacaaagcgccacctgaacttgcggcgcgaaaaaggcgcgcatgcgtcctacgggagcgtgctggctcaccgaccgcattgcggcttggttttctcacccagtgcatgtggcaggagcggtgagatcactgcctcacggcgatcctggactgacggtcacgactgcctaccctctaaccctgttctgagctgccccttgcccacacaccccaaacctgtgtgcaggatccgcctccatggagctacagcctcctgaagcctcgatcgccgtcgtgtcgattccgcgccagttgcctggctcacattcggaggctggtgtccagggtctcagcgcgggggacgactcaggtactggatcccgggctaagctcgggaggaggtcccctttggtggggccatttcgggaaagtatgtcaggacgtaagtgcttcactgaagacaggatctgattttttcctaactggttccctatgtcctgccttctggtgcgttttctttagatcttggactactacgggccaacattagctaacatttatggagcaccgttttaagcacactatatgaatcgattaatccaccaaaatcccaagagctaggtaggatgacaacccccattttattgatggggaaccctaaagagctccggcggtgctgcctgctgcaactcctgcctgatcaatatggttgcagtcagctatagactgttttactgagaccggacaacattagttcagtcgtttgtggtaaacatctacgtgtacaagcacactttataaacatttttttctttctttttttttttttttgagacggagtttcgctcttgttgcccaggctggaatgcaatggcccgatctcagctcactgcattccacctcccgggttcaagcaattctcctgcctcagcctcctgagtagctgggattacaggcatgcgccactgtgaccggctaattttgtatttttagtagagacagggtttctccatgttggtcaggccggtcttgaactcctgacctcgggtgatccgcctgcctcggcctcccaaagtgctgggattacaggcgtgagccaccgcgcccggccaaacatttttttctttcaagacggaggcttgctctgtcgcccaggctggagtgcagtggcgggatgtctgttcactgcaacctccgcttcccaggttcaagcgattctccttcctcagcctcctgagtagctgggattacaggctcccgccatcatcatgccacactaatttttgtgtttttcggagagacggggtttcatcatgttggccaggctgctctcgaactactgacctcaggtgacctcctgcctcagcctcccaaactgctgggattacaggggtgggccaccacacccggcctggctcagcattttgggaggccaaggcgggaggatctcttgagcccaagagttcaagaccagtctaagcaacatagtgagaaacccataccgatctctacaaaaaaaatagaaaaaattagccaggagcggtggtgcatgcctgtagccccagctgcttgggaggctaaggtgggaggattgcttgagcccaggaggttgagactgcaaatgagctgtgatcaagccactgcactgcactccagcctggatgactgagattgaccctgtctcaaaaaaaaaaaaaaaaaaaaaaaaaaaatgtgggacagataaactggaaaatcaagatggcccagagtagacagacaaggctggggaggttgtgtgtgggaatggcagtcgggaaatgctttatagagtgtctgggcctgaaagggtagaaagacttgggaggggaattccagttaaaggaacaactggagcac

SEQ ID NO: 1884671 - DNA, 4001 bp, Homo sapiens
aaagaattccataaggtgagtataactgagggagaaggacttaatttttcaagcatgaagtacacaactgaaactcaaatttttattccttccacagaaaacactagagaaacttcgagccaaaaatacatgctgactttctagaaatagtgtaaaggttttttaattgtgtatatgtagcattagacaaaattatttaaagtcaataaattgttattcgaggaattccatgttgtgatttcttccactgtccatcaaggtcactttagatcctctaaagagctggagtcaaaagatttatcttcaagtttgccctgaagaagagaaattttgattaacctttaaaactctcacatggcaacaatcctggattattacgttttatatctcctcaggaaaacatagcaccaaacattaggagtgctatggcttcctatagagaacttccatctttggtcacagcgttaagagctctgggtttcacagcctcataagccctctttgaaatgacccatacaaatgtcttttctaatgcatacatacctttttaatgaaactgatccagttgtcctgtcagccctacataacaatagtataaaagtaaattttacatttccagagatgagtgtacagtgagtgaacatgaatgagtccctagaacgagcctgagttaactctactacaaactgcttggttattagcaacccacaagggttacaatataaaggcaaagcaaatttgcatgattcaagagatctaggagaattttcaaatctcactgattttaaagaaaaatcacatgtggttcacattttatttgtattgcatttctattacagttaatcaactgttcccaataagctgattgctagcaaagtagcagatagaaaacctactgggaaatttttttatggtcatgtccacagcaaatgagaaactgcattctaaaagccttggtaatgaccattacacccttgagcaaataacttatagttaagataaaaaccattacttgccataattactttggcttctgtcatctcgttttaatatggatatactgatgaagacttcaaaattcacctgtggaaaaatgtgtatttcaaatttatatttactattaagtacataaatctatctttcaagaatgaggttgcttaggttccaaagtatcctgaaacccggcaccccaagtaaggtattgaaaattctatgcttaaaatagctatttaaactaataggtatttttaaaaatcaatgatcccatgcccattcatatccgaatttgctctatgatcatgtttctggtaacttttacctttgagcttttataatcttctgaaatacaatgcaatatttaatgtaaatggatgttcagaaaggccattttcattcagccccttcagagcagttgaacatttcgcccatcatcataacatcgttaataatgaagtttaaacacataataacgtaagcctagtccttttttttactcctaagtggtgatagatgttgcaatagcattgctagataaataaataacctaaaataacatttggagaaaagctagtattcaacaaaataacctgcatggccttttaagtaatgaattaacttaccaagaatctttgggatctaatttcttcaaccaatttactttagggtcctagaagttgaattgtacaaagtacagttacattttgacacctgatccaagacacagtaatgtataccacattacaatgtttcagtcaatatacagcacataaaaaaagtggtcctataagagctgaaaattccttattaaatgttatttctaatattgaaaagtcaacatttttctcctacatttttactcataaacatagcaaaatgttacaggtctcattgtcaccactgcaatatgcatactgtgatggaagcataacctgtctcaatttagccacattaactatttttggacaccatgatcaacagtgcccattctctagaatgaggcattgtaaaagtctttaaagcttagtagtgtatttgtacgaagttcttgttatgctggcagtgctactgatagagggaaacaagcagaatcaatagaaacagagaatcttacctttttactgtaggtggtggggatctacctggttctcaatttgacaccctggaaaaaaaagcattgcttactattttagagtatatcaaactgaacactctgagaaacctacacaaatactgtatcagtagaaataccaggtttaacaagcacaaagccaagaaaaccaacgatgccagatactgaatttctatagcactgacctttgaacaccctagcaggtgtaaactgctgagtgcagataccatgcagtgcaattatgactgaactgtacaactcgtattcccaaatttgcaatattgctgagaaatgctttcacaaacctctcaaattcctttaacaagtacaataatttgagcttttttcctaattgtcactgtaataaggaagctacattaactacattttaagctacaactctagtctttgcctaatctttgcccagtctctctataaaacttaaagatggaatatatacatgtaacttaacagatcagacaacaaacgtcaagctcattgttgctcaaactgccagttacacaaaattctttttatgtaattcatatccctattgattcaacatatccacacaggtttacgtgactttaggatgaaatatgtgtaactgccagttgaataatgatgcaaagaacacaggtagtttcgtttggtaggtatagacatgcagtctcttcattttccttctctatacaaatatatacattgtaatatttttgccagtatcttactaattctgtgttatacctgaaatactgggatggtgtaatttctatttttcatcttttgagtccttgattattataagttaaatattttacttacctctcaacatgaatgagttcaaatcacattcattcctatagaaagtaccaattaaagatttagaaaggatacatttccagttattaaaactaaaacccaagtataaatttaagatccagtttattatacagccatatccagctctgtcagaattaagttttagttcatgcccgttatcattcagcagttgaacagttaaattcatcatctgaactgtaatcattatttcccaaaagattatactgtcaccaattaaaacttacctaagcgatcactcaagaatggtacagatgtgtggagtatgccaatacctaaggtaaaaaagtagattatctggtttttcataacgtttagcaaccgtctttttcaaacttttagcaactgtcttgtaattccttcccacagatctaacaatagtcctgtgagtaaagtaaaaccacagagttactctatgaggcgtttccaacgatgtgcaggctacaggaaaagccccatcgggatagacctcaaccactatttacaaggttttgatttttttttaaagacacaggatctgccatgtcttttaaaaatcgtgtgattcttgctgaatcacttgagcccaggggttcgaggctacagtgagatgtggcaggatcacatctcactgtagcctcaaaccgctgggctcaagtgtttctcctgccttagcctccagagtagctggggaccacaggcaccactgtgtccagctagtatttatacacataaataacaaagtctaacactccataggaaagaaattatgagcagaaactgcaatatgctcttacaatattgccaactgcagaaacttcctactacgttaatcacaaaaacaataatttcacaatcacgttgtgcttaggagccagaggaatgataaataaaaagtaacatcaagtagctcctttacatgaaccaaaggaaaaagatttaaacttaagatttaagtttaaagtctaactgttgttatgaacttcagtattgcaacagaggatgttgttttcccaattcgaagatttcagca

SEQ ID NO: 1884672 - DNA, 4001 bp, Homo sapiens
aataacgtaagcctagtccttttttttactcctaagtggtgatagatgttgcaatagcattgctagataaataaataacctaaaataacatttggagaaaagctagtattcaacaaaataacctgcatggccttttaagtaatgaattaacttaccaagaatctttgggatctaatttcttcaaccaatttactttagggtcctagaagttgaattgtacaaagtacagttacattttgacacctgatccaagacacagtaatgtataccacattacaatgtttcagtcaatatacagcacataaaaaaagtggtcctataagagctgaaaattccttattaaatgttatttctaatattgaaaagtcaacatttttctcctacatttttactcataaacatagcaaaatgttacaggtctcattgtcaccactgcaatatgcatactgtgatggaagcataacctgtctcaatttagccacattaactatttttggacaccatgatcaacagtgcccattctctagaatgaggcattgtaaaagtctttaaagcttagtagtgtatttgtacgaagttcttgttatgctggcagtgctactgatagagggaaacaagcagaatcaatagaaacagagaatcttacctttttactgtaggtggtggggatctacctggttctcaatttgacaccctggaaaaaaaagcattgcttactattttagagtatatcaaactgaacactctgagaaacctacacaaatactgtatcagtagaaataccaggtttaacaagcacaaagccaagaaaaccaacgatgccagatactgaatttctatagcactgacctttgaacaccctagcaggtgtaaactgctgagtgcagataccatgcagtgcaattatgactgaactgtacaactcgtattcccaaatttgcaatattgctgagaaatgctttcacaaacctctcaaattcctttaacaagtacaataatttgagcttttttcctaattgtcactgtaataaggaagctacattaactacattttaagctacaactctagtctttgcctaatctttgcccagtctctctataaaacttaaagatggaatatatacatgtaacttaacagatcagacaacaaacgtcaagctcattgttgctcaaactgccagttacacaaaattctttttatgtaattcatatccctattgattcaacatatccacacaggtttacgtgactttaggatgaaatatgtgtaactgccagttgaataatgatgcaaagaacacaggtagtttcgtttggtaggtatagacatgcagtctcttcattttccttctctatacaaatatatacattgtaatatttttgccagtatcttactaattctgtgttatacctgaaatactgggatggtgtaatttctatttttcatcttttgagtccttgattattataagttaaatattttacttacctctcaacatgaatgagttcaaatcacattcattcctatagaaagtaccaattaaagatttagaaaggatacatttccagttattaaaactaaaacccaagtataaatttaagatccagtttattatacagccatatccagctctgtcagaattaagttttagttcatgcccgttatcattcagcagttgaacagttaaattcatcatctgaactgtaatcattatttcccaaaagattatactgtcaccaattaaaacttacctaagcgatcactcaagaatggtacagatgtgtggagtatgccaatacctaaggtaaaaaagtagattatctggtttttcataacgtttagcaaccgtctttttcaaacttttagcaactgtcttgtaattccttcccacagatctaacaatagtcctgtgagtaaagtaaaaccacagagttactctatgaggcgtttccaacgatgtgcaggctacaggaaaagccccatcgggatagacctcaaccactatttacaaggttttgatttttttttaaagacacaggatctgccatgtcttttaaaaatcgtgtgattcttgctgaatcacttgagcccaggggttcgaggctacagtgagatgtggcaggatcacatctcactgtagcctcaaaccgctgggctcaagtgtttctcctgccttagcctccagagtagctggggaccacaggcaccactgtgtccagctagtatttatacacataaataacaaagtctaacactccataggaaagaaattatgagcagaaactgcaatatgctcttacaatattgccaactgcagaaacttcctactacgttaatcacaaaaacaataatttcacaatcacgttgtgcttaggagccagaggaatgataaataaaaagtaacatcaagtagctcctttacatgaaccaaaggaaaaagatttaaacttaagatttaagtttaaagtctaactgttgttatgaacttcagtattgcaacagaggatgttgttttcccaattcgaagatttcagcaaattttaattcttggctcaaaattaattgtcatccattataaaatacaggaatataatgtgcctgtaagttacgactttggcattatataacttttaatcaaactctacatcattcaaatttatgaattcttatgacctgtgtaatcatcttttattatactatattttgcattaaaccataaaatcctctgcctcattttagattgtgcattaattcaaaataatgctgtaggcttcaagtaggaaatccaaagttctgattattgctacaaactaacaaattcaggaccctctaatgcttgcaactaaaatgaatctgacacatcactataaaatgtgtgaatctaggattcttcttttcagaaatcagtataaatgggaattaaaagcatggtagaaatgtccctgaataaaatgaaacttgctctgacaacatactgtttcctacacataaacaaatatgatgtgaaaactcaaattgagacatacctttaactccagacaccatgttctcaagataaaagcctttaaaacaaaaagccattgtgtatatcatcaacatgaaattggaatgcaaaattaatactgctgaggatttccctcatatcccatgctgtttatctattctacaggcctggaatcaacctttttttcttaagagacagggtctgtctttgttactcaggctggagtacagtggtgccatcaaagctcagtgcagcctccaactctgcctcagcctcccccctttctgagtaactccaactacaggcacatgccccagtacccagctaatttttaaatttttgtggagatgtgtttcttactttcttgcctaggctggtcttgaactcctggtttcaagcaatactcccaccttggtgtggggattgcaggcttgacccattgcacctggcctggaaccaacctttatggctatcaatactcccatcaatcaactgtctcaggtatcataatatcccttcttatatgtatcaaaactcatactgaacaatgagttctgggttgcaaaagaggatttattttttgcacctatctgtaagtctttgtccacgttaaacaaaaacatacataagtgcagtcccaaaatgcactacatagcagagtagtcagctctatcgtggtgatcaaaataatgaacatcggggtaatgactggttctccccaggtatacatgttgaataaatgtgtatgccttttcttgaactaataaaaagtgaaaatggtagttaaaagtagtattaggccaggtgccatggctcacacctataatcccagcattttgggaggccaaggcaggcggatcgcctgaggtcaggagttcgagaccatggtgaaagcctgtctctactaaaaaaacaaaaactagctgggtgtgctggctaacgcctgtaatcccagctactaaggaggctgaggcagaatcgcttgaacccgggaga

SEQ ID NO: 1884673 - DNA, 4001 bp, Homo sapiens
caatgtctccaaattgattaatgataataaagagcttaagctctataatcaaatagtctgctcattgggtgaccttaaacaagctacttgacttctcttgaccttttctgcatgccacttcggggatttcatagacaccgtacgaggactaaatgaggcaaggtataaaaagtacttaatattatgaatagttttcattaatattactggttaacacttgacaatgtccaaataaaagtatatttaatcatcaagggggtcactgatttatcttttgtaaaattcaatcgattattttgagcattccagggcactatgcagatagtcatgctgcagcccgaggtagtagttaagaacaagtaccatgaaggcccatatataaatcccaaccgcaccctgcctagcttaggcaataaaccattttatacctcatattttctccgtaaaacaggaataattctgacacatgattgtgttagaattaagtaagttaagtatctgtcaagggctttacgtgctacacagtaatgtctgtgaaatatctactataaggcaggggtccccagtctccaggcagtggactggtaccggtccatggcctgttaggagcagtagataagtggtaggtgagtgagcattactgccggaaattctcacaggagcgtgaaccctactgtgaaatgtgcattcaaggatctaggttgcacaccccttatgagaaaccattgcctgtctgataagaggtggaacagtttcatcccaaagccatctcccccggaccatctgtggaaaaattatcttccatgaaaccgatcccaggtgccaaaaaggttgactgctataaggtaaggcaagccactggtgacacaacctggaacatactgagagctacattaaaatgcttgcaaatatggtaggttcaaacaacataccaaatgttgtgtcatttctactgcaataggagtaacttcttcactatattcacagatcattttctgaattacattggtaaggtcatcattttctgtttctcttataatgtgaagaagagcctgcattacaggtctgatgaatggtgtgatatattctttagctgtaagagaaagagtaaaaaacttgcgtaaaacccctaaaacttcttaaaacctgatataacaaatatcgatgagttttttaaaaaagtactttcacataaaaaggaagtatgccaagtttctaggattatggctttttacaattaatatatatatatatattttataagaggcagggttttgatctgttgcccaggctggagggtagtggcaatcgtagcacactgcagcctcgaaccgtcgggctctagtgatcctgctgcctcagactcccaagtagctggcactacaggtacatgccactatgtccagttaatttttaaaaattttttttgtagagatgttgcccaggctggtcttgaacacctggcttcaagcgctcttcccacctaagcctaccgaagtgctaagattacaggtgtgacctaccgcacctggccaacattcacttttcttgacatacaaaaatcctttacctttttcttgattgctgatcaatacttgaagggcaatggcagcttccactttcacaggcatttctctatcatcaatcagacatcttcttgttagctctaaggctgtttgaaggttctgatcacttttgaacttcacttcacaaaaatagtgaagtacccagcaagccttttgtaaaaacacagtgagttactgtagataccttaccttaaattcccccaagctaatctctattccctgagttctgtgtgtgggaatttggaggctggccagtggtagatgtgtccagagacaacactagaccagtactatgatcccaagttactctttggccgcatgatgtttgtgtggatagcaagatctgaatgaaaaacacagacagacactgctaccagacacagatgaaacctatgcacacattacagcagccatgtaaagatttacattaaacagaaacctaaaataagacacaggcttcaaagtgaacatttaaaagtttcaatataaaagtccacagagtcattcattacaagacaaaagtatataaataatgcagctttaaaacatacccttgctctcatgtagcctagttcactgctgaagagagggaatacatgattctgcaacatgtattccatctgatctttatagatctttttctgtaaatataaacaacagttattttgatacagttccaaatataatcatctcaatttccaaacagatataacactattaaaaatgactattaatgttacatatatttattctcattctttgaaccccagaatccacaaccaattttcgtattccagaacttcaccaccaaaaaccactaaacacattttcacgtttttatattccttgattagaaagccattatgccaaatcttaccagcaatagtgttcgaatgatgtaagtttggttaattttatctgttactatgaaacttttataaggaaaaaacttgtctgataaagtttctggctgaaaataacataacctgagaaaaatcctgctttcaaacgaataaactggctatctaaaaaggcacactcttttttttttctttttttttgagacggagtcttgctgtgttgcccaggctggagtgcagtggcacaatttcggctcactgcaatgtccacctcccagattcaagtgattctctaaaaaggcactctcagtattcaaagtgagtattttctaagtggaaagaagctttttagaagagttccttaaactgcacattaaatcaacattaaaaacataagacacttatatatcaacacttacataatcagacatgacaacttaatgcaatgtgagaccctagactgggtcatggaacagaaaaaaggacatagtgggaaatcttgtgaaactttaaaaaggtccatggattagttgatagtagcataccaaaatcaacttcatgtttttgataactttgcctacctatgtaaggtattaccactaagtgaagctgagtgaaaggtaagaatagataaacttgaatttgccaagagaactcactaattctcagccttctatgccacaaatgattagaatgtctttaatacatactttataaacaaagagaaggatgggtgaacaggtatagaaaagatgaaagacggccgggtgcagtgattcacgcctgtaatcccagcattttgggaagccgaggcgggtggatcacctgaggtcaggagttcgagaccagccaggccaacatggtgaaaccccatctctactgaaaatacaaaaattagctggtgtggtggcaggtgtctgcagtcccagctactcgggaggctgaggcaggagaatcgcttgaactcaggaggtggaggttgtagtaagcagagatcacgccactgcactccaacctgtataacagaacgaggctccatttccaaaaaacgaaaagataaaagacacaatgactaaatattctgtgagtacttagtgcctggctttagaatgtaaagatttctaacaactcaattataaaaagacaaataacccaattaaaaatgggcaagggccaggcacagtggctcacgcctgtaatcctggcactttgggaggctgaggcaggcggatcacctgaagccaggagtttgagaccagcctggccaacatggcaaaaccccatctctactaaaaatacaaaaattaggctgggggcaggcacctgaggcatgagaatcacttgaacccggaaggtagaggttgcagtgagtcgagattgcgccactgcactccagcatatggcgggggggcggggaggcggaaatctcagctacttgggaggctgaggcaggagaatcactttaatgtgggagactggtggctgcagcgagccaagatctcaccactgcactccagcctgggtgacagagcaagactccatctcaaaaaataaa

SEQ ID NO: 1884674 - DNA, 4001 bp, Homo sapiens
ttgacatggttttccttttaattgtggttcacaggaaacagaaactggccatggtataatggaagaaccagaacttactttaataagcaccactgataccagtattgctgaaatggattttgcaaatttaaccctagaagagaagagcgagaatgaagcaaaatgcttctttcaggtaaatttaagctttccttctattttattctattacaagcaaaccagttgatttgtctcttacaacttatcagaaggtactcattggagggaattatgctatgcatttaactaagccgacacccccaccagctctcaatttgtcttaaaccttcactattctgtcaaccattgtgcattttcttttaatccccactccaatttatgcctgtctccaagactggcagaactaatcttatacacctagtgttatagtgccaagttggaagttttacctaaacttattcccagatattgaaaaatgacttcagaacaactggtaattttactaggggagtagggaggcaataagaataaagctatctaaacagaggcctagaggtgtgagggcagtggagcctaagcccagttcaagaccagcctgggcaacaaggcaaaacccaatccctacaaaaaatacaaaaatcaggcatggtggcgggtctctgtagacccagctaagattgaggctgcagtgaggtgtgatcatgccgctgcactctaatctgacagcagagcaagacccgcttaaagcgtttaaaaagagtaaaacatgcaactttcttgccattaggtgagtgagtttctgcctcttgtatcagcaacagaagcctcagattatccagctgtatcagaactttccatagaaaaaccaaggacagcatctacaggtaagccttggacggcctccacacttctaatggaaagtagatactttgcctatttctgtcataaatttcttttcccccagcagaaacccctcgcaggcttacacctgtaccagggagcttacaagaagcatttataaagaggaaaaaatcatttatggagagatcccaccagaggcagaaagaaataaggaataaaattcatgtctctgaaaattctcaaatcaaaacagttaaagagaaaccatctataagtatgttgaatttttaaaatcttcaaccaactccctgaaatgtttaaagccttgtgtttacaacttgatttcacttttctttcctcaggttcatctgtgagtcgtctaaagggcgtgaataaagtcagagcatcttttcctgaagacagaaagactacacaggctctaaggcaccaaaggggtctaaggtagggttaattttttttttttttttagtgattcactttttgcagtgtttgtctctaattctatataaattctttacaggttatacaatcaactagctgaagtgaaacaacaaaaggaagaaaaaacaaaacaagaagcttatgcccaaaacagagcaagggcaaaagaattccataaggtgagtataactgagggagaaggacttaatttttcaagcatgaagtacacaactgaaactcaaatttttattccttccacagaaaacactagagaaacttcgagccaaaaatacatgctgactttctagaaatagtgtaaaggttttttaattgtgtatatgtagcattagacaaaattatttaaagtcaataaattgttattcgaggaattccatgttgtgatttcttccactgtccatcaaggtcactttagatcctctaaagagctggagtcaaaagatttatcttcaagtttgccctgaagaagagaaattttgattaacctttaaaactctcacatggcaacaatcctggattattacgttttatatctcctcaggaaaacatagcaccaaacattaggagtgctatggcttcctatagagaacttccatctttggtcacagcgttaagagctctgggtttcacagcctcataagccctctttgaaatgacccatacaaatgtcttttctaatgcatacatacctttttaatgaaactgatccagttgtcctgtcagccctacataacaatagtataaaagtaaattttacatttccagagatgagtgtacagtgagtgaacatgaatgagtccctagaacgagcctgagttaactctactacaaactgcttggttattagcaacccacaagggttacaatataaaggcaaagcaaatttgcatgattcaagagatctaggagaattttcaaatctcactgattttaaagaaaaatcacatgtggttcacattttatttgtattgcatttctattacagttaatcaactgttcccaataagctgattgctagcaaagtagcagatagaaaacctactgggaaatttttttatggtcatgtccacagcaaatgagaaactgcattctaaaagccttggtaatgaccattacacccttgagcaaataacttatagttaagataaaaaccattacttgccataattactttggcttctgtcatctcgttttaatatggatatactgatgaagacttcaaaattcacctgtggaaaaatgtgtatttcaaatttatatttactattaagtacataaatctatctttcaagaatgaggttgcttaggttccaaagtatcctgaaacccggcaccccaagtaaggtattgaaaattctatgcttaaaatagctatttaaactaataggtatttttaaaaatcaatgatcccatgcccattcatatccgaatttgctctatgatcatgtttctggtaacttttacctttgagcttttataatcttctgaaatacaatgcaatatttaatgtaaatggatgttcagaaaggccattttcattcagccccttcagagcagttgaacatttcgcccatcatcataacatcgttaataatgaagtttaaacacataataacgtaagcctagtccttttttttactcctaagtggtgatagatgttgcaatagcattgctagataaataaataacctaaaataacatttggagaaaagctagtattcaacaaaataacctgcatggccttttaagtaatgaattaacttaccaagaatctttgggatctaatttcttcaaccaatttactttagggtcctagaagttgaattgtacaaagtacagttacattttgacacctgatccaagacacagtaatgtataccacattacaatgtttcagtcaatatacagcacataaaaaaagtggtcctataagagctgaaaattccttattaaatgttatttctaatattgaaaagtcaacatttttctcctacatttttactcataaacatagcaaaatgttacaggtctcattgtcaccactgcaatatgcatactgtgatggaagcataacctgtctcaatttagccacattaactatttttggacaccatgatcaacagtgcccattctctagaatgaggcattgtaaaagtctttaaagcttagtagtgtatttgtacgaagttcttgttatgctggcagtgctactgatagagggaaacaagcagaatcaatagaaacagagaatcttacctttttactgtaggtggtggggatctacctggttctcaatttgacaccctggaaaaaaaagcattgcttactattttagagtatatcaaactgaacactctgagaaacctacacaaatactgtatcagtagaaataccaggtttaacaagcacaaagccaagaaaaccaacgatgccagatactgaatttctatagcactgacctttgaacaccctagcaggtgtaaactgctgagtgcagataccatgcagtgcaattatgactgaactgtacaactcgtattcccaaatttgcaatattgctgagaaatgctttcacaaacctctcaaattcctttaacaagtacaataatttgagcttttttcctaattgtcactgtaataaggaagctacattaactaca

SEQ ID NO: 1884675 - DNA, 4001 bp, Homo sapiens
acttattcccagatattgaaaaatgacttcagaacaactggtaattttactaggggagtagggaggcaataagaataaagctatctaaacagaggcctagaggtgtgagggcagtggagcctaagcccagttcaagaccagcctgggcaacaaggcaaaacccaatccctacaaaaaatacaaaaatcaggcatggtggcgggtctctgtagacccagctaagattgaggctgcagtgaggtgtgatcatgccgctgcactctaatctgacagcagagcaagacccgcttaaagcgtttaaaaagagtaaaacatgcaactttcttgccattaggtgagtgagtttctgcctcttgtatcagcaacagaagcctcagattatccagctgtatcagaactttccatagaaaaaccaaggacagcatctacaggtaagccttggacggcctccacacttctaatggaaagtagatactttgcctatttctgtcataaatttcttttcccccagcagaaacccctcgcaggcttacacctgtaccagggagcttacaagaagcatttataaagaggaaaaaatcatttatggagagatcccaccagaggcagaaagaaataaggaataaaattcatgtctctgaaaattctcaaatcaaaacagttaaagagaaaccatctataagtatgttgaatttttaaaatcttcaaccaactccctgaaatgtttaaagccttgtgtttacaacttgatttcacttttctttcctcaggttcatctgtgagtcgtctaaagggcgtgaataaagtcagagcatcttttcctgaagacagaaagactacacaggctctaaggcaccaaaggggtctaaggtagggttaattttttttttttttttagtgattcactttttgcagtgtttgtctctaattctatataaattctttacaggttatacaatcaactagctgaagtgaaacaacaaaaggaagaaaaaacaaaacaagaagcttatgcccaaaacagagcaagggcaaaagaattccataaggtgagtataactgagggagaaggacttaatttttcaagcatgaagtacacaactgaaactcaaatttttattccttccacagaaaacactagagaaacttcgagccaaaaatacatgctgactttctagaaatagtgtaaaggttttttaattgtgtatatgtagcattagacaaaattatttaaagtcaataaattgttattcgaggaattccatgttgtgatttcttccactgtccatcaaggtcactttagatcctctaaagagctggagtcaaaagatttatcttcaagtttgccctgaagaagagaaattttgattaacctttaaaactctcacatggcaacaatcctggattattacgttttatatctcctcaggaaaacatagcaccaaacattaggagtgctatggcttcctatagagaacttccatctttggtcacagcgttaagagctctgggtttcacagcctcataagccctctttgaaatgacccatacaaatgtcttttctaatgcatacatacctttttaatgaaactgatccagttgtcctgtcagccctacataacaatagtataaaagtaaattttacatttccagagatgagtgtacagtgagtgaacatgaatgagtccctagaacgagcctgagttaactctactacaaactgcttggttattagcaacccacaagggttacaatataaaggcaaagcaaatttgcatgattcaagagatctaggagaattttcaaatctcactgattttaaagaaaaatcacatgtggttcacattttatttgtattgcatttctattacagttaatcaactgttcccaataagctgattgctagcaaagtagcagatagaaaacctactgggaaatttttttatggtcatgtccacagcaaatgagaaactgcattctaaaagccttggtaatgaccattacacccttgagcaaataacttatagttaagataaaaaccattacttgccataattactttggcttctgtcatctcgttttaatatggatatactgatgaagacttcaaaattcacctgtggaaaaatgtgtatttcaaatttatatttactattaagtacataaatctatctttcaagaatgaggttgcttaggttccaaagtatcctgaaacccggcaccccaagtaaggtattgaaaattctatgcttaaaatagctatttaaactaataggtatttttaaaaatcaatgatcccatgcccattcatatccgaatttgctctatgatcatgtttctggtaacttttacctttgagcttttataatcttctgaaatacaatgcaatatttaatgtaaatggatgttcagaaaggccattttcattcagccccttcagagcagttgaacatttcgcccatcatcataacatcgttaataatgaagtttaaacacataataacgtaagcctagtccttttttttactcctaagtggtgatagatgttgcaatagcattgctagataaataaataacctaaaataacatttggagaaaagctagtattcaacaaaataacctgcatggccttttaagtaatgaattaacttaccaagaatctttgggatctaatttcttcaaccaatttactttagggtcctagaagttgaattgtacaaagtacagttacattttgacacctgatccaagacacagtaatgtataccacattacaatgtttcagtcaatatacagcacataaaaaaagtggtcctataagagctgaaaattccttattaaatgttatttctaatattgaaaagtcaacatttttctcctacatttttactcataaacatagcaaaatgttacaggtctcattgtcaccactgcaatatgcatactgtgatggaagcataacctgtctcaatttagccacattaactatttttggacaccatgatcaacagtgcccattctctagaatgaggcattgtaaaagtctttaaagcttagtagtgtatttgtacgaagttcttgttatgctggcagtgctactgatagagggaaacaagcagaatcaatagaaacagagaatcttacctttttactgtaggtggtggggatctacctggttctcaatttgacaccctggaaaaaaaagcattgcttactattttagagtatatcaaactgaacactctgagaaacctacacaaatactgtatcagtagaaataccaggtttaacaagcacaaagccaagaaaaccaacgatgccagatactgaatttctatagcactgacctttgaacaccctagcaggtgtaaactgctgagtgcagataccatgcagtgcaattatgactgaactgtacaactcgtattcccaaatttgcaatattgctgagaaatgctttcacaaacctctcaaattcctttaacaagtacaataatttgagcttttttcctaattgtcactgtaataaggaagctacattaactacattttaagctacaactctagtctttgcctaatctttgcccagtctctctataaaacttaaagatggaatatatacatgtaacttaacagatcagacaacaaacgtcaagctcattgttgctcaaactgccagttacacaaaattctttttatgtaattcatatccctattgattcaacatatccacacaggtttacgtgactttaggatgaaatatgtgtaactgccagttgaataatgatgcaaagaacacaggtagtttcgtttggtaggtatagacatgcagtctcttcattttccttctctatacaaatatatacattgtaatatttttgccagtatcttactaattctgtgttatacctgaaatactgggatggtgtaatttctatttttcatcttttgagtccttgattattataagttaaatattttacttacctctcaacatgaat

SEQ ID NO: 1884676 - DNA, 4001 bp, Homo sapiens
aattaagttttagttcatgcccgttatcattcagcagttgaacagttaaattcatcatctgaactgtaatcattatttcccaaaagattatactgtcaccaattaaaacttacctaagcgatcactcaagaatggtacagatgtgtggagtatgccaatacctaaggtaaaaaagtagattatctggtttttcataacgtttagcaaccgtctttttcaaacttttagcaactgtcttgtaattccttcccacagatctaacaatagtcctgtgagtaaagtaaaaccacagagttactctatgaggcgtttccaacgatgtgcaggctacaggaaaagccccatcgggatagacctcaaccactatttacaaggttttgatttttttttaaagacacaggatctgccatgtcttttaaaaatcgtgtgattcttgctgaatcacttgagcccaggggttcgaggctacagtgagatgtggcaggatcacatctcactgtagcctcaaaccgctgggctcaagtgtttctcctgccttagcctccagagtagctggggaccacaggcaccactgtgtccagctagtatttatacacataaataacaaagtctaacactccataggaaagaaattatgagcagaaactgcaatatgctcttacaatattgccaactgcagaaacttcctactacgttaatcacaaaaacaataatttcacaatcacgttgtgcttaggagccagaggaatgataaataaaaagtaacatcaagtagctcctttacatgaaccaaaggaaaaagatttaaacttaagatttaagtttaaagtctaactgttgttatgaacttcagtattgcaacagaggatgttgttttcccaattcgaagatttcagcaaattttaattcttggctcaaaattaattgtcatccattataaaatacaggaatataatgtgcctgtaagttacgactttggcattatataacttttaatcaaactctacatcattcaaatttatgaattcttatgacctgtgtaatcatcttttattatactatattttgcattaaaccataaaatcctctgcctcattttagattgtgcattaattcaaaataatgctgtaggcttcaagtaggaaatccaaagttctgattattgctacaaactaacaaattcaggaccctctaatgcttgcaactaaaatgaatctgacacatcactataaaatgtgtgaatctaggattcttcttttcagaaatcagtataaatgggaattaaaagcatggtagaaatgtccctgaataaaatgaaacttgctctgacaacatactgtttcctacacataaacaaatatgatgtgaaaactcaaattgagacatacctttaactccagacaccatgttctcaagataaaagcctttaaaacaaaaagccattgtgtatatcatcaacatgaaattggaatgcaaaattaatactgctgaggatttccctcatatcccatgctgtttatctattctacaggcctggaatcaacctttttttcttaagagacagggtctgtctttgttactcaggctggagtacagtggtgccatcaaagctcagtgcagcctccaactctgcctcagcctcccccctttctgagtaactccaactacaggcacatgccccagtacccagctaatttttaaatttttgtggagatgtgtttcttactttcttgcctaggctggtcttgaactcctggtttcaagcaatactcccaccttggtgtggggattgcaggcttgacccattgcacctggcctggaaccaacctttatggctatcaatactcccatcaatcaactgtctcaggtatcataatatcccttcttatatgtatcaaaactcatactgaacaatgagttctgggttgcaaaagaggatttattttttgcacctatctgtaagtctttgtccacgttaaacaaaaacatacataagtgcagtcccaaaatgcactacatagcagagtagtcagctctatcgtggtgatcaaaataatgaacatcggggtaatgactggttctccccaggtatacatgttgaataaatgtgtatgccttttcttgaactaataaaaagtgaaaatggtagttaaaagtagtattaggccaggtgccatggctcacacctataatcccagcattttgggaggccaaggcaggcggatcgcctgaggtcaggagttcgagaccatggtgaaagcctgtctctactaaaaaaacaaaaactagctgggtgtgctggctaacgcctgtaatcccagctactaaggaggctgaggcagaatcgcttgaacccgggagatggaggttgcagtaagccaagactgcggccattgcactacagcctgggtgacagatcgagactctgtctaaaaaaaatagtattaaagatactctaaatttggaaagggaaatgaggttattacaatactaagcatctgacaggtcacttgtcatggctgaacaaagctgggataaaattacagcatttcaaatcccctcttcaagatggttgggtgtcaagttactttaagattttcttttcaaaattaaaatcactacatttcattgtttcaatactcacaggacacctgtaagctcttattcagaaatcaaatgacaatttctcaaatttttctatgtattttctctggtgttttaatggttttttttctaattattactacttcacaagtttctttcacaaacttcttcacagggttaaaaattttttttcttgttataaagttctgggtttcagaatttcttcaccaccagactggtacatatatccacatttatctttattcatttctatgaagtcgttttttctatatgcttcacctttgacattcatgatcctgtcacattttcaggcctctctgtccagtatttttggcttttgtagctctctttttagacaaagcagcttcttcagtaatatcctcttcttctaagtatacactcagtcttacagggaattcagaacttactatgaaactatccccctgcataaaacaaacaaaaaatcatggattaagcaataactcaaatagtttagtaattacatatagctgaatgccctggattacttcagataacctagagactacatgtagatgttaaaaatccaaattaacattgcttattttttcatttgacatcctaactagcaataatatgtatcagaatgctacttattaaaaatagtactgaaaaccccatgttctttatcaagtctctaaaaaattattttccttcttgcatttcctgcagtaaacttatagagcttttcaaaagttaaatgaagtgtaagagaaaaactaaatataattccttctgtatcaaccaactcctgccttcccaaaatggaataggaaaaaaataagtcacttactgccaatttgatatcacattcgttatcttcaagatgtgttgcatcctcatcctctgctctgtaatattaaaatttatcatcgagatgacagaatcttcgatgacctaattagttgtatattccactctgaaatataactgaaactgcaatactagtcaaaggaaacacaaaatttgagaattttgtgttctggagaattctagatgaacggtgtgccaagcttggctcaactgtaataatcccaattgtcatactctgtatctttgttcattatttaagtataactatattaaaggcaaaatatgaagcaattaacatagaaatttaatttataacctattaccaaagtatttcatatgattccacttacgttgactcctcaataggagaaatggatccatcatcatccaaaaatttgtatctacgactgtcaaaatcttcattttctaaatcttcaccaacattcatttgcttcaatgattctttcaggtggtgttcatacttcagtttttcaatatagttaaaaaatcctcttgcaacagct

SEQ ID NO: 1884677 - DNA, 4001 bp, Homo sapiens
gtggaaaaaccttgggctgagaacttaagtcctaaaggaccatctcattcctatcacactgcccctctttagaatgtgacccatcaaaatggaatctttccttttgagccctgttgaacaattagggtacattctctcattcactgtaaaattcagagtacaatacatgcaggcctttcagtgatcaacaggtattattctgactttataaacagaaatgtttaactggccaacgtctgtgttggtcttacgtttaccatatatttgagggaagtcaggagaggaccccatgtcttcataccctaagtactagaacctgggctcccaatgcacacaggatgtagaggtgccactgaagaacctacactcacaccacaaggaaaaagtagttagcatttaatgaaactccctccatgtggcttcaagccaccaggacacaggcccccccaacactcttaatcttctcctcagctcttctgctgaagaatttggccttcacgatgacaggctgctttgggagctttccctttcccagaactttgtagtagccctagaagaacagagaaaaaagtttacaatacactgtagtaggtaccaactgcgtgatgggcgtgaggaaagactgccaacccactttctaaatccctaggcagggtatgtatgtttctgatctgggcactaacgggggcaccgactgcccccaccagtgaatcaagaccagtagattctcttcgagtactctagcacaccaggacaagagttgtgtcaggatgtgactctagtctcggcaaagcataagcctcctcctgctcaaataccccctgctaagcaaaagaagacaaccaccttcctgaccaccagaactactcaatggacattaaataggctgggaagtgaatttaaagcgtccctagggttctggcctcttaacactacctctatattcatgagagttaagactgacacagggaccagaacccccgcaaggacagacataatacatctgttttgggggaaaatctcttcagataatgcatggcactgagtatcaatggaacatattaggattctattatctggagaacatgaagggccaagagctgtgctcagtgaaaaccagctatagttcaagcacgaaatgcaaacctgatacaacctgggcagtgacagtaggcactgctacggatagggaactacctatgataattctaccacaggaagaatatcaatgtctggtaggtaactgggaagtacagattatataagtggattagattaagccagagttttgtaagggaaggtatggaagtacagaaaaacatccaattaacttaccgatcgcaccacatcaatgatgggagcagccccagtcttgtttttagcagcattcacccgtgtctgttcactgaccaaagtccacaatttgtcaaggttgacagttgggcagaagctctggttcctctttaagtggtaatgcttcataccaactttcccaaagtagcctgggtggctaggaagaggtaacaaccaccttcatacacactccaattaagatgctatgtttatcatctttatagttaccaccccctattagagtgtaaattattcactggtgtagagcagtgtcaggcatatgatacatctgttgacttaaacaactgttttaaaaaccaccaaagactatcatgaggaaaaggctagtcttatttcctggaaccaggataaaccaccgacaatgtcagaggcagggccgagactaaaattcaagtcacataacagcactctatggaaaatctacatactcctataataaacgtcttctgaatagccaaaatttatcatccactagtttgtgggtaggtgaatgtgaagcatgtctctaacctggtgactgactgtgccataaggcccacagccagtgaataaggtcagcagttactcttcgaggactctagcacactcaggcaatagccgatacccaagcgtgactctagcctcgatgacaggttctcagttcacaccaagtgttaacttggtaaaaaacagcaataggcaaggcttgcttctaaactttttgtttaagccagccctctctctgcccctacctcccaagctgtgtcaataaaagcagtccaaggacacttactatttgtcgaagttgatccggtggtgatgcagaccaccagcattaccgcggccgccggggtgcttccggtgcttgcctgcaggaatacaaagctacgtggggccggtgtgatggctcatgcctgtaatcccagcattttaggaggacgagggggggtagatcacctgaggtcaggagttcgagaccagcctggccaacacggagaaacccccgactctactaaaaatagaaaaagaattagccgggcgtcgtggcgcacacctgtaatatcagctactcgggaggctgaggcaggagaatcgcttgagcccggcaggcaggggttgcagtgagccgagatttcgccactgcactccagcctgggcgacagtgatcagtctcacacacacacaaaaaagctacatgcaccacacagccttctcatgcatctcaatacttcctcgcacaaaagcagagtgtttcccagacttctgtgtcccgcttacgctgttcccaccctaccgatgccggttttcagcaatgcgattactttaggattccgggtgaaacatcttttcaggttccacatcacagcattcccacagtactccatgtcttcaactaacccaataccgtgcctgctcaattcctattaccccactgatgtgaaattccttagaactggaatactagaggatcgtcagaaaaaaatcaacagctgtgcaacttgaccacaaaaaggtcttattctaacccacttataggctaccgatctccagactagctaagcacccgaagagagcccaaggcccaccccgaggggaagccggcacttacctatgcggccgtggccgtggctcacgtggcccctaagtttccgggtcttcctcagtctggatggctgtgtggaaaaagcttggtggtaaggcctaaggaattaggggcagggggcgatgcccgccagccgagatggtcctgtaagcctgtgggtcaaagacctaacttctggagcgtttgggaaagctgagggtaccgatccgctcagggccgtgaggtctcaccacggtagcgcaggggcccgcgtgtcctagagatccgaaccgcgggcctaacacacggctccgggagccccgccccgggcccgcgccggccaccctgccccgcaggcggccatgcgcagcctggaagccccgaccatggtagggagtggatgactaggggcaatgggaatacagcttaggggtctccgccggcaaggaagaggaggcaagaaacgaaacacctaccatgttggcagcccagacgaaaaaggaaggccttcgccaagtctcgcgaggtatcggccacgggggcggggcaaaacgcctcacttccggtcacagaggccgggcttcgggcggggcctcctggtctcgcgggattgcgcgcctgctagtcgcttcctctttctgagggtggtgatcccccatcacggagtgtcctggtggcggtgtacggtttcggtgaggctcgttgtgctaggctcggagggcgagaactgttgaagaatcggggctaggtgtgctgtactgcacgccgcccgtgcttgcttgagccaggcccttttctggcgccttggtcagggaaccgcctaagccgaccctaagggcctcgttgtctgagctcctcaccaaatgcgccagccctgagccgccccgcgcacctccacagttcttagtggtctgcccggggctggtgatagtggctactggtttgtctcccggccgcagtgcggaaccgcgaggccctctttaatcctcagtgtgcccacctggtgtctcgctcggtttcctgaagctcgggcggctcccgaaatgccttctcccgctctcacact

SEQ ID NO: 1884678 - DNA, 4001 bp, Homo sapiens
gtcctctatgggccctaatggagagcccttactttttttggggggggtggacagagtttcactcttgttgcccaagctggagtgcaatggcacgatctcggctcacagcaacctccgcctcctggagattctcctggctcagcctccaaagtagctgggattacaggcatgtgccaccacgcctggctaattttgtgtatttagtagagacaaggtttctccaggttggtcaggctggtctggagagcccttatttctaacttctccagcacaacagaagatacaagccaaatgatacatttgtttaaaattgtccagctgaatcgaggtttcactacttgtaattctagcctattcttatgtaagccaattcagtgcttctctgtgccttctatttgatccccaacatcctctaaaggttgtcctgacagatgtgtcccatagacagccatggttctcggcttattatgaccccacagtgcactaaggaaacctccactaactaaaacccaggagtctaagtgccatcttatttgtctatagttttagactgtattattttgggtcaaaaaaagctcaaaatcacaggaagaaccataaaactgtagcaaattataatttaccgagatctatgaggatcttatttgtaaacatgaattggtcaccatcagttttccaatagcaagagacacaaatcctagaaaaacttatttcaatttccagccttcaggatttccaaattttcccgatacatttcagactagaagaaaaattaactatttcaaacccactttgacatacagaaaagccctggcatactgaaatttcagattgctggacccccatctcgagattttgattcatcacattctggatgtaacaataatttggatcaagattaaggagccatggccgggcgcagtggctcacactataatcccagaacttttggaggccgatgtgggcagatcacttgaggttaggagttagagaccagcatggccaacatggtgaaaccccatctctactgaaaatacaaaaattagctgggcatggtggtgggcgcctgtaatcccagttagtcaggaagctgaggcaggagaatcgcttaacctgggaggcggaggctgcagtgagccgagatcgtgccactgcactccagcctggcaagagagactccgtttaaaaaaaaaaaaaagatgagggggccacgtggaaaaaccttgggctgagaacttaagtcctaaaggaccatctcattcctatcacactgcccctctttagaatgtgacccatcaaaatggaatctttccttttgagccctgttgaacaattagggtacattctctcattcactgtaaaattcagagtacaatacatgcaggcctttcagtgatcaacaggtattattctgactttataaacagaaatgtttaactggccaacgtctgtgttggtcttacgtttaccatatatttgagggaagtcaggagaggaccccatgtcttcataccctaagtactagaacctgggctcccaatgcacacaggatgtagaggtgccactgaagaacctacactcacaccacaaggaaaaagtagttagcatttaatgaaactccctccatgtggcttcaagccaccaggacacaggcccccccaacactcttaatcttctcctcagctcttctgctgaagaatttggccttcacgatgacaggctgctttgggagctttccctttcccagaactttgtagtagccctagaagaacagagaaaaaagtttacaatacactgtagtaggtaccaactgcgtgatgggcgtgaggaaagactgccaacccactttctaaatccctaggcagggtatgtatgtttctgatctgggcactaacgggggcaccgactgcccccaccagtgaatcaagaccagtagattctcttcgagtactctagcacaccaggacaagagttgtgtcaggatgtgactctagtctcggcaaagcataagcctcctcctgctcaaataccccctgctaagcaaaagaagacaaccaccttcctgaccaccagaactactcaatggacattaaataggctgggaagtgaatttaaagcgtccctagggttctggcctcttaacactacctctatattcatgagagttaagactgacacagggaccagaacccccgcaaggacagacataatacatctgttttgggggaaaatctcttcagataatgcatggcactgagtatcaatggaacatattaggattctattatctggagaacatgaagggccaagagctgtgctcagtgaaaaccagctatagttcaagcacgaaatgcaaacctgatacaacctgggcagtgacagtaggcactgctacggatagggaactacctatgataattctaccacaggaagaatatcaatgtctggtaggtaactgggaagtacagattatataagtggattagattaagccagagttttgtaagggaaggtatggaagtacagaaaaacatccaattaacttaccgatcgcaccacatcaatgatgggagcagccccagtcttgtttttagcagcattcacccgtgtctgttcactgaccaaagtccacaatttgtcaaggttgacagttgggcagaagctctggttcctctttaagtggtaatgcttcataccaactttcccaaagtagcctgggtggctaggaagaggtaacaaccaccttcatacacactccaattaagatgctatgtttatcatctttatagttaccaccccctattagagtgtaaattattcactggtgtagagcagtgtcaggcatatgatacatctgttgacttaaacaactgttttaaaaaccaccaaagactatcatgaggaaaaggctagtcttatttcctggaaccaggataaaccaccgacaatgtcagaggcagggccgagactaaaattcaagtcacataacagcactctatggaaaatctacatactcctataataaacgtcttctgaatagccaaaatttatcatccactagtttgtgggtaggtgaatgtgaagcatgtctctaacctggtgactgactgtgccataaggcccacagccagtgaataaggtcagcagttactcttcgaggactctagcacactcaggcaatagccgatacccaagcgtgactctagcctcgatgacaggttctcagttcacaccaagtgttaacttggtaaaaaacagcaataggcaaggcttgcttctaaactttttgtttaagccagccctctctctgcccctacctcccaagctgtgtcaataaaagcagtccaaggacacttactatttgtcgaagttgatccggtggtgatgcagaccaccagcattaccgcggccgccggggtgcttccggtgcttgcctgcaggaatacaaagctacgtggggccggtgtgatggctcatgcctgtaatcccagcattttaggaggacgagggggggtagatcacctgaggtcaggagttcgagaccagcctggccaacacggagaaacccccgactctactaaaaatagaaaaagaattagccgggcgtcgtggcgcacacctgtaatatcagctactcgggaggctgaggcaggagaatcgcttgagcccggcaggcaggggttgcagtgagccgagatttcgccactgcactccagcctgggcgacagtgatcagtctcacacacacacaaaaaagctacatgcaccacacagccttctcatgcatctcaatacttcctcgcacaaaagcagagtgtttcccagacttctgtgtcccgcttacgctgttcccaccctaccgatgccggttttcagcaatgcgattactttaggattccgggtgaaacatcttttcaggttccacatcacagcattcccacagtactccatgtcttcaactaacccaataccgtgcctgctcaattcctattaccccactga

SEQ ID NO: 1884679 - DNA, 4001 bp, Homo sapiens
catggccctgtggtcacttcccacaagccctgagcacatctgcccagtaaggcaggggtgggctgtgatcggcaaaaaaacaagcctgaggagtgattgcccaagttgctcagggcattatggcggagccatgacccctgcagggaaacccaggggcgtctgccacccccaagctgggctcacttcctgcatccatttgtagagcccaggggctaccaatcctgtccttgcaagtccaggcaccaagccaccccaaagacagagccctgattacccaaactccattgaaatcagcttctctgctgtccttttttttcaagacagggtttctgctgctcaggatggagtgcagtggcactatcacggcccactgttaacttcaacctcctgggcaagtgatccttccatctcaacttcccatagttgggactacaggtgcacaccacgccttgttaggttgttttttagagatggggtcttgctatttgcccaggctggtctcaaactgctggcctcaagtgatcttccctcctcggcctcccaaagtgctgggataatgggcacgagctactgtgcccagcccgttcgcattcttctggggtgtactcaggagctaggatactgctcaaggccacaggaagggaccccaggcagctgtgatgcccagactcccctcctcatgctcattttgcaccagaaacgcttccccaataccatgttgcccacacttcagctccacacctgccctcttggataagaacctgggcagaggccacccttgacaaagtgctcatggaatacttgagagatgtgtaaaaaggctttatttgcaggggagcaggaatttaatcaaaaaggccaaatcccatgtcatcatctgactcttcagactcctccttcttctcatctttcttctcctctgctgtggaacagaggagaggcatggtgagcactgcccaagtgccaggccagtccccccatgaagaccccactgcagcaacaccgtctgagccccagccccttgcccactcaccaggccaccacttacctgcagcaggggcagaaccagcagcaggggctgcagagcctggggcagcagagacggctacagccccaccagcaggtacactggcaagcttgccaatacctacagaaagcagagaggtgagaccagagcagctgcccagcctgggaggctgttccacagggaagttagatggcaccagagatggcacatggcacccaacatatctggacccaccatatgccagtgtctcccgttcttcctgaacactccctccctgagccactcctcaacggggacttctcttccccacctttcctatccagggacttgccttctaggaattaggcccacactgcctgcctgcccaatttccccacctccaccctcagaggtccactggacagacatgttcataactaggtagggaatgagtgtgctgccccagtatccacatctctggccacaacgctgtgttcatggcttggcccgtttgctgagctggccctgtcgtggtcacatgcatggaagacaagaacagctgccccaacagctcaacttccaaacaagttccaccagctcagctgaagccaacaaaaaaccatctgcccaacaaagaggcaaggagcctatggacatccctggcaccctcagtccctgcccccaaccccctcacagaaagcatgtggtaaggactgctgacgtgaactcagttctccagacaccaagcttcagacaaatcctggggaatggcctcagggctaggagcagtcaggcttaagaggcagggccacctaaacgtctgctgagaacacagggtgccccctgctgccctgctcctgagagtgtctagaagtgcccatgacgtgagcccactggagccctgctcactcctcgggtgaggcttctagggtgctctggtccacaagcgaaacctggcaggccacagatggaccggcagggattaggatggaccatgaaaacaaacgaaagcccgtccacatcaactcaccctgggcaatgacgtcttcaatgttttttccattcagctcactgataacctgaagcagacaatcacagggctgttaccaggaatgtacgattgtatccccggccctctccctcccagagtcacagcaggactgggttccccacatgggaataggccctgaagtttccagaactgcactgcccaaagggagccaccagcctcacttgggaagtgatataaaaataaatggacactagctttcttagacttaggactgacaaaaggacacagggcatctcactacttatgttgactactcataggtatcttcaacactggcaaaataaactggcaatgaaattgactttgacttcaggctggagtgcagtggtaggatctcactgcagccttgacctcccgggctcaagtgactatcccacctcagtctgggactacaggcatgagcaaccaagcctggctaattttttattgtattttagagacgaggcctggttctgttagactgcagtggcacaatcactactcagtgcagccttgacctctaaggctcaaatgattctcccgcatcagcctcatgagtagctgagactacagatgtgcaccactgcctccaaccatttttttttttttttttttttgtggagaccgggtcttgcaatgttttccagaccagtctcgaacttcaaggctccaataatccactcgccatggcctcccaaagccgggtgagccatgcgccaggactgcttttttttttttttaacgcaatcttacgcagctcactggtattaaacttccaaagcttgttaatcacgattttgcctcgtacccaccctgcttttttttttttttttccttttgagacagggtctccttctgccacccagactggagtacagtggcacgatccgtgcaacctccatctcccgggttcgagcgattttcctgcctcagcctcccaagtagggggactacaggcacccaccaccacgcccggctaatttttgtatttttagtagggatggggtttcgacatgtttaccaggctggtctcgaacccctgacctcaggtgatccgcctgcctcgtcctcccaaagtactgggactacaggcgtgagccaccgcgcccgacctccgcccggcttacttctctatccaagaaatcgccaactagactgaaacgagcctctccccgaaccctccagcatgtggccggatcaggcagaagaatcgcctgtatgggacactggggccccacggcggctgcggggcaagggcggccgctaccttgttgagccggtcgtcgtccgcctcgatacccacgctgtccaagatcttcttgatgtccttggcgctgggggaggagttgccccctagggcagccagcaggtaggaggcgacgtagcgcatcctgaggcgggcggagaggacgcgacggcggagttaccccggcggcctcctgccggcccatcccggggccgccgggcgaggccgcgcgtggctcggcccgtaggcctccgtcccaaaaataccccgccgcccaccccgcatccccacggactccgcgtccccagccggcaccccgggcccggtcaccacactcacgcggcggcgtctgcggcggaggcggcggagaagtctcacgcgtgcgacctcggtggcgacagggaggaaaaggaaggcgccgacgcaagaggcggggttaaaccgctacccagaaggctctgggacccgtgcgcggcgccgcatgaggcgcctcagagtgacgtcacgaggcgctcagccaatgacgacggggagggagtcgttgactccttccccctcccccttcccagcccccgtcaggcacttttcgcggcaaaggcgaagggcagcagttccggaagtgactgctcttatagcgtggggcgaagggccaccgaaactcgtgggggcgttggacgaagcgagtccaaagggacggc

SEQ ID NO: 1884680 - DNA, 4001 bp, Homo sapiens
tgttcagtcaagagtaacccaaagacaactgaagatgattcaagaaactgtttagctgcccaaatgaaaagtggcttgaaaataagactgcttcattcacacacgcactacagccaggtaagccataaatatgctaaccatgctcaatcttacaagcaactaaagaaatgcaaaattaggcagggcctgagtggctcatgtctgtaatcccaactgaacgacctttgggccttctaaagcttcatcttctttgactggtaagtacactgaaaggaacctaaactaaggaaaccatcaaacatttaatttaacacaaatttgggttcaagtatgctgatcataatgcaacaatttacaatgggggaggtggggcatgtaggggaatgttaaactgttttatagccaatggctgcagtaacaactattcccccagccaagcctgtgtgatgtggcagcagggtgacactgtgcacacaccatgtggtgtggcaggagccgtgtggcacacgtgtgcactgtgtatccaggtaggcaagcgctcaagggaagggaatgaggcatgctgcaaaaacaccagtcaagactcattttgaagtttcatttatctttataacttaaaatgcattagacgcttcataataattttacaaaggaaaaagagtatggggaaattcactaagctgctgagatttacttttagaagacagatttgtatagtgttctttacacttgcctgtattttctacatatgacttttataatagggaagtaaaaagaaaaaaaaaaattactggtccacagtctaccataaccagagctctagtctatgagtcacaatgagatggagaaaaataagatgacaggctaagaaagaaagaaaattgacctaggaaatcatcaaacaggtgtccaataagaaaaaaagaggccgggtgtggtggctcatgcctgtaatcccagcactttggaaggctgaggcgggtggatcacgaggtcaagagattgagaccatcctggccaacatggtgaaaccacgtctctactaaaaatacaaaaattagctgggcgtggtggtgcgtgcctgtagtcccagctactcgggaggctgaggcaggagaatcgcttgaatccaggaggcagaggttgcagtgagccgagatcatatcactgcactccagcctggtgacacagtgagactcggtctcaaaaaaaaaaaaaaaaagaaaaaagaaaaaaaaggaagaaaagaaaaggagaaaaaagaaaggaaaaaaaaaggaactgacccaaaagggaaaaaaagttaattgcgtctggatgaatcacaggtaagaaagaagtacaaagaaaaaacgcacagaaacttaaagcaccgcacgctcacaccatggggaagagaatgcacaccaacgagggcaaactaggcagacgtgcccaggcggctcctgggggccctgtgataaagtctaaacagaagtgatgcaagcccaggaagaaggacctgctataacccacatggggcaaggaagatggggtatcccctctggagggcagcccccagctggtgagcaggcatcactcccagctcccagggccccacctagagagggacacctgaatgtcaccttccatagtggaaaacagacaggaaaaagtagaagagacagatacaggtacatccactgcccacccctgctgctgccccaggcattacttgcagcacttgcagtgaagaaatcccactcctagtggccctcatccattagcccaggccccagtgctgagatggggaggaaggaagatactggtgactggccccaggcccctaccaccatcacccacacccaagatccctaacccacagcccgtcatgcagcatttgtctccaagacctgaaactgaaagccaccagtcagtcagtcatgtgtcgctggaaatgctattgcaccggaatggaacccattagctacagccaggctaacgggttacgaacagtgctccctgggagaaccaggctgggatgagacagtctggcaaggccatttgaagatgagcatatggttcctcagataaaagtaagggctgacctagtcaagcttatcttaccaactggtaggctgatccatgccactaacattactaatgcaatgatatgccatggcaagcatattgtaaagacgtgtttcaggacaaatcaaagagcaggaaaacatttttcagtcttatttgcgcttttttttttagggtaaaacctagtaggttcagatttctgaataagtgctgatcattatgtgtacatagctcccatctttttaaacgttaaacatatacattagatgcatgcaaacttcagagacacttgggaaaagaatggtatcatctccacccaacagagtaaacaaacaaactacaagaccaaggcctggcacagtggacagcaccactacagcccaggagttgcagcctgactcctgcattggtgcccacctggctgcagggtctggggcatcacatggtctgcatcactgtcaaatcatccagcacagactcacgactacagtgccaagcatgacacagaaaggcaatgggatccccatcgaactcagggagcaaacacacaatgcggtactcagtctaactcttggagagcagtctcgcccagggctgcccagcagatgagtggctgggtgtgggttttgtgggtttcttgcccctggctccaagttcttccatctttgtggactgaccctgtctgatgccaaccagaaggtcaagtcagtactcaccataggctgtccagggtcagaaaatttcactttaatatcctgcaggtgtttcaagattggttcatcatattcctaatcaaaaagagaaaaaaaattccaacaggcttttaaaaaaacaacacatctctcccgaagagtcatggttgcagaggctcccagatgttgcataactagccctattggaattctgtccttgtcaaagtaataactaccaggaagaaacccagacttattcaccaactccctgtcatagagaagcagcaccaaggtgtcccctttccctagtgtggagcaacggtggctgccactgccagcaaagggcagtgccactgacacccgcctgcctgcaatactggggcaagggccttcactgctttcctgccaccagctgccactgcacacagagatcagaaatgctaccaaccaagactgttggtcctcagcctctctgaggagaaagagcagaagcctggaagtcagaagagaaggctagatcggctacggccttggcagccagcttccccacctgtggcaataaagttgtgcatggcttaacaatgggggcacctcctgagaaacacattgttaggcaattcggcgtgtgttcatcagagcatatttacacaaacctcgatagtgcagcctactatccactattgctcctacgctgcaaacctgaacagcatgggactgtactgaatactggaagcagctggtgatggtacttatttgtgtatctaaacacagagaaggtacagtaagaatatggtatcataatcttacaggaccgccatcctatatgcagtctgttgtgaccaaaatgtgttatgtggctcatgactgtatccaaaactcacaatacacacagtcacttctttattttttttgagacggagtctggctctgttgcccagactggagtgcaatggtgtgatcttggtcactgcaagctccgcctcccggattcagcctcccgagcagctgggactacaggcacccgccaaccatgcccggctaattttttgtatttttagtagagacggggtttcaccgtgttagccaggatggtctcgatctcctgaccttgtgatccacccacctcggcctcccaaagtgctgggattacaggcgtgagccaccgcgcccggccacacacggttacttctttaagaacacttacacagagcgtgtctgagatccaacttgcgggcacca

SEQ ID NO: 1884681 - DNA, 4001 bp, Homo sapiens
cttacaggttaggccactagattatacaagtcagtcagcgcaggggttttgattcagttcctgtctgctgcttttaggagctccagttagttgaaactggggaatgacccaattgtaccttctcttttcagcattcattttgtgctaaatattgcgcacatcattgtatgtaatctccgtaactccaagttattctcactctgcagatgagtaaactggggaacagaaacattcagcaatatggcacccagctagtaaatgtggaagccaggactcaaattctcactttgcagccagatagcttgcaaagacagttcttcagccctctccttgcccacagaaatactagggtcaggactactaaaatgtctttaatgagagccttgaatcaagtaagcaaagtaggtgatgcccctgaacgggcctagctcctgcacagtcacagtccagccataggacccttgttccaggcagggcagtcgcacatcagggtcctcatctgagaactgaatcagggtcccctgagggtttagaaccctcaagcattctgatagaagctggtaagccctaggcagacctccccgggcaacagcatcccatgtgcctttgtccagcagtagttggaaagagcctgaagaagccacagcccccaggttctgagcatcggcgtgcatgaagtggaggcttgaggcagggtgtccagggcatagaggtgtttggcctgggccaccctccaggaggctattcatgtgggccacagccacaggagaaaagtccacccccagcacatccactgggtgtggagatttggtgtagaggcctgtacataggctggaagtcccacagcccacatccagcactcgcagaggactggcagcctgtgcctcctgcagcaatggcagtaggagcccctggacttcgtcgtatccaaagaaccagtcgaaggtggggacagtgcccaaacgaggctgggcatgcagccgatcccagagacagcggtccgccaggcaactatcagccagtgagcctgtgggcacggttggagggtgtcacttggtctatgtcgccactgcaaaaacgtcgtatatacacactggcgtcttttttttttttgagacagggtctcactctgtgacccagggttgagtacagtagcacaatgatggctcactgaagcctccacctcagcctcctgagtagctaggactataggcgccatcgtgcccggttaattttttttgtagacagggtctcgctatgttgccctaggttggtctcgaactcctgggccaagcgatctgcccgcctcggcctggcaaagtgttagcattacagccgtgagccaccacgcacggcccaccgtagggtttgagaatcacaatttcagggactacactcctgactcacgaggaacccaccttaccctccccactctgcccccaccttgccctctccactctgcccccacctccctacccgcaaaggggcggcacgtccccatcatcaggctcggcaagtggagcattcgacgcagcgcggccatctggagattcgggtaagttcgaccagagaagcttatgtgaagcgtccaccctactccagccggagaggcctgaggtccaggggaagatctgcaaattccgcgtagcgaaaggcggcgtacagcttccccgaactctgcagtcccggaaaaaagaacgcggacacagactatggtaggaacggcctttattggctgcagcgggaagtggaggagggtatacagcgtccgcagacctgaaatcaaatgagaaagtgtgagcaccccgatggaggagccagctggatctcggttgtccttctccgagattcccggtgtcccggcgtttgaggatagaaccagcggatgggaagccgccagcaccgaagacatgacgccgagggggccagagccctttccctcttcctccgtacattacggggagcggcaccacaagcccgatccccgccaagaaaaggagggtcctgagaccccgcccagagccttccacccggcacccccaccactcccggccgcccaatctggctactacagctaaaaccacacttactagctcaccaccctccgaaaggcctcccgcaccgcggagctcctttatatagcccgaggacccgcccccgagttgcgattggcccgcggaaggccggggcggagccccgcggatccggcgctgagcggaagtacggaccgtgaactggagtggaatcgcgactatgggagctccggggggaaagatcaaccggccccgaacggtgactgtgtgggggccgcgactttgtttcctcaagcgttcctgagcccttttatctcgcacgagatgggatcagtgaggggccggggctgcctggtggaggggccccgggtcgcggcgagcccactccatctgattcgcatctttctccccggcaggagctgaagaagaagctgttcaaacgccggcgggtgttgaatcgggagcggcgtctgaggcaccgggtggtcggggctgtgatagaccaagggctgatcacgcggcaccacctcaagaagcgggcgtaagtactagaccctcttcctgttggtcgtccccaccgagtcttccttcctccctgcagagctccggagcagcttcacctctcagctcaccttgtgcactgacgcttatgcggggaatgtctgtcggctgttagttcctaagctctgatagcctctcacaatacctgtagcagacaacctttctttgggttttggattctgttaagaatctcaggaaagccggggatggtggctcatacctgtaatcccagcactttggggggctgaggtgggcggatcacctgaggtcgggagttcgagaccagcctgaccaacatggtgaaaccccgtttttgctaaaaatacaaaaattagccaggcgttgtggccggcacctgtagtcccagctacacgggaggctgaggcaggagaattgcttgaacctgggaggcggaggttgcagtgagccgagatcacgccactgcactccagcctgggccacagagtgagactccgtctcaaaaaaaaaaaaaaaaaaaaaagaatatcaggaaatctgttggctctccattctccaagtaatgttatacattcacacagatttttataagtaaacttatttttacatacagaaaagtgcacacataggcgcataaaactcgaagaattttcccaaaggcactcataggatttcacttgtaagtttcaaggcctcctgtgtcttgaggaagagttcccatcccattaattactttctgtgtcctttttttttttttttttttttttcctcttttttgagacagagtctccctctgttgcccaggctggagtgaagtggcatgatctcggctcactgcaacccctgcctcctgggtttaagctattctcttgcctcagcctcccgagtagctgggattacaggtgctccccactgcacccggctaatttttgtatttttagtagagacggggtttcaccatgttggccaggctggtcttgaactcctgacctcaggtgatccgcccacctcagcctcccaaagtgttgggattacaggcataagccaccgcccccgatctatgtcctttcattagcttcttcaatgtaaatatttagggtttctattactatttatattatatttatttaatacttttccttttttttttttttttgagacggagtctcgctttgtcgcccaggctggagtgcagtggcgcgatctcggctcactgcaagctccgccttctgggttcacgccattctcctgccgcagcctcccgagtagctgggactacaggcgcccgccactgcgcccagctaatgttttgtatttttagtagagacagggtttcaccgtggtctcgatctcctgacctcgtgatccagccgcctcggcctcccaaagtgctgggattacaggcgtgagccactgcgcccagcctat

SEQ ID NO: 1884682 - DNA, 4001 bp, Homo sapiens
agcctggaatgttgaggcttcagctagccgagatcacgccactgtactccagcctggggaagtcaaaattcttggggaagtcaaaactcttagaggagagctctgagcagtaggcagataaccaagagcacacaacaatggaagctgagaaaggaggcggtctcaaagaaaagatgagtaagacttccacaggaagcagaaatcaaaaagaaaaaaggctgaaaaaatggccgacttaataagtaggagtttgtcaatggacttctctggaactgtggggaaagaaaccaagtttcaaagggcaactggatgaatgggttaaagaggaagaggaggcagtcttttaaaaagtttggcagtaaaaggagggaaagggtaagaaaagtaagtagtctgatgaggagaagcagcaagactgttaataagagtataaggtgaggagcaggagccaaaagaaaaggaaaagttgaagacagaagatacatggagaagatgtaagaaagaaacaggaggaccagactccagcacgtcaagagggaataggatacaacacacaagtgaaaggctacccttgggaaataagtcaccttctgctctaagacagaaatgaaagaaaagagattttgacaaatggacatggtgaaaagttactctgaatcaaccttgaatacagtacagagagtgatcacattgaataacactattttgggctgggtgcagtggctcgggcctgtaatcccagcactttgggaggccgagttgggtggatcacctgatgaggtcaggagttcgagactagcctgaccaacatggagaaagcccatctctactaaaaatacaaaattagctgggtgtggcggtggacacctgtaattccagctactcaggaggctgaggcaggagaattgcttgaacctgggaggcggaggttgcagtgagccgagagtgtgccattggcactccagcctgggcaacaagagcgaaactctgtctcaaaaaaaaaaaaaaaaaattgaataacactattttgaacttaaaataatattgattttcttggatcactcctaacttggcattgaaaaggacaaccaccatttggatgtaagttctatacagttaaaaatcagaatcttctttttctggacaggaagtaggatttattggtgggcattaggagggagcagcacagtggaagccttcgtgaatgcagggcctgccacttgcccagactggagatgtatttgaccccacagccatctgggatgagccacttctcataccagagccaccacgtcttcaaattcatctgcactggctgggcacggtggctcacacctgtaatcccagtactttgggaggccaaagtgggcaaatgacttgacgccaggagtttgagacgaccctggccagcatggtgaaaccgcatctctaccaaaaaaatacaaaaattagctgggcgtggttgcatgtgcctgtagtcccagctactcaggaggctgaggcaggagtattgcttgaacccaggaggtggaggttgcagtgagctgagatcacaccactgtactccagcctgggagacagagtgaaactctgtctcaaaaaaaaaaaaatcatctgcatcgaactttgaaacgccccacttctttcagatgtggatcttctggtgaccagggaacttgaacttggccctgtggagggcctcaatcacatgctcctggttctatagcttgatgtggatagacaagacaacttggccagtatgaaccctgatcaaggctccttgaggctttccaaaggcacctccactgtctggagcctacactggggacagtacaaggtcagagacataaacatatattagaaagggctgtctccaaggtcctttagagcaacccatacaagaaacaggctgcatacactaccaaggaagctgctgtttgcagctattgaacaccaggccccaaagaggaaaggaactaggtcggcttaattggttgcagaaaaatcagtcttactgagatgttggttacgttctgtttcttaatctggatactggttaccctgatgtgttcagtttgtgaactttattaagctaaaaaaaaaaaaagtttttataaactttttaactttaaaactttttttaaaaagtttttaacctaggccatgtgcagtggctcatgcctataatcccagcactttaggaggctgagctgggtagatttcacttgaggctagaagtgtgagaccagcctggccaacatggtgaaacactgtctctagtaaaaatacaaaaattagacaggtgtggtggcacatgcctgtaatctcagctactcaggaggctgaggcaggagaatcgcttgaacccgggaggtggaggttgcagtgaccactgcactccagcctgggcaacagagtgagactctgtctcaaaaaaaaaaaaaaaaaaattagtttttaacttagaatcaccactcctctactatttgttcagtttttaaagagtaactcaagaaaactatatattccttcaggcagggaacacgccttaccattcttttagatccccatagcactaaatcagactagatatacaataggtatctaatgaatatatgttgatgtgattggaaggatgctaacaccaaatgtcgagacttaaaacaaatctaggccagttgcagtggctcatgcctgtaatcctagcactttgggaggccaaggtgggtggattgcctgagctcaggagttcaagaccagcctgggcaatacggtgaaaccccatctctactaaaaaaaatacaaaaaattagctgggtgtggcggcacacacctgtaatcctagctactcgggaggctgaggcagaattgtttgaacccaggaggcagaggttgcagtgagccaagatgcaccactgcactccagcctgggcaacagagcgagactccatctccaaaaaaaacaaaaacaaaaaaacccacaaatctttctctaggaaatggcaacttcatgactacaaaatctggcagcccccactttaggcagtgattccacttagcatcactaatgatctggacaaactaaaattatgtgcctccttttgtgatgatatgggaaatatacaacctcagctttagaattcttgcccaaaatatttaacctgtatataatcatgtagaaataattatacaaattcagattgtgagatattgttaagaaaacagatctggaatcttaaaaatatcataaaacacaaataagcagggagactcctatagatttagagactaaagaggtaaaacaactacatttaatgtgtaatcttgtttggatcctggattaaaaacgaaccaacagttataatgattaacattacaacattaacattattattaacggtatttggacaatatgggtatgatagattgcaaaaatggctgtgattgttcatgcccctgtatccatgcccttgagcaatatgactttgcagttattcccatcaagaggagcatgtgacttgctttgaccaaaagattgcagaagtgatgctgtgccaattccaagcctaggccttaaaaggctttgcactcttccactctcttagaaccttcccataagccatggaaacaagcctgttctagcctgttctagacccctctagagcaaagaaaagccatccaaactgaggccgacttagaccagccagctcctagtcagtccagcagctgactccagaggtataaaggagcccagttgatcagctgagcctaatccacattagaagaaccacccaactggcccgtggaattatgagcactaataaactgtggtggttttaagccactaagttttgacatgatttgtttatcagctagctgatcaaaggcaaaatttaaatgtggactctattagatgacataatggaatcaatattaaatttctaaggcatgataatggtattgtgaagaagaatatcccccttacacttaggagaatactg

SEQ ID NO: 1884683 - DNA, 4001 bp, Homo sapiens
ctggattattacgttttatatctcctcaggaaaacatagcaccaaacattaggagtgctatggcttcctatagagaacttccatctttggtcacagcgttaagagctctgggtttcacagcctcataagccctctttgaaatgacccatacaaatgtcttttctaatgcatacatacctttttaatgaaactgatccagttgtcctgtcagccctacataacaatagtataaaagtaaattttacatttccagagatgagtgtacagtgagtgaacatgaatgagtccctagaacgagcctgagttaactctactacaaactgcttggttattagcaacccacaagggttacaatataaaggcaaagcaaatttgcatgattcaagagatctaggagaattttcaaatctcactgattttaaagaaaaatcacatgtggttcacattttatttgtattgcatttctattacagttaatcaactgttcccaataagctgattgctagcaaagtagcagatagaaaacctactgggaaatttttttatggtcatgtccacagcaaatgagaaactgcattctaaaagccttggtaatgaccattacacccttgagcaaataacttatagttaagataaaaaccattacttgccataattactttggcttctgtcatctcgttttaatatggatatactgatgaagacttcaaaattcacctgtggaaaaatgtgtatttcaaatttatatttactattaagtacataaatctatctttcaagaatgaggttgcttaggttccaaagtatcctgaaacccggcaccccaagtaaggtattgaaaattctatgcttaaaatagctatttaaactaataggtatttttaaaaatcaatgatcccatgcccattcatatccgaatttgctctatgatcatgtttctggtaacttttacctttgagcttttataatcttctgaaatacaatgcaatatttaatgtaaatggatgttcagaaaggccattttcattcagccccttcagagcagttgaacatttcgcccatcatcataacatcgttaataatgaagtttaaacacataataacgtaagcctagtccttttttttactcctaagtggtgatagatgttgcaatagcattgctagataaataaataacctaaaataacatttggagaaaagctagtattcaacaaaataacctgcatggccttttaagtaatgaattaacttaccaagaatctttgggatctaatttcttcaaccaatttactttagggtcctagaagttgaattgtacaaagtacagttacattttgacacctgatccaagacacagtaatgtataccacattacaatgtttcagtcaatatacagcacataaaaaaagtggtcctataagagctgaaaattccttattaaatgttatttctaatattgaaaagtcaacatttttctcctacatttttactcataaacatagcaaaatgttacaggtctcattgtcaccactgcaatatgcatactgtgatggaagcataacctgtctcaatttagccacattaactatttttggacaccatgatcaacagtgcccattctctagaatgaggcattgtaaaagtctttaaagcttagtagtgtatttgtacgaagttcttgttatgctggcagtgctactgatagagggaaacaagcagaatcaatagaaacagagaatcttacctttttactgtaggtggtggggatctacctggttctcaatttgacaccctggaaaaaaaagcattgcttactattttagagtatatcaaactgaacactctgagaaacctacacaaatactgtatcagtagaaataccaggtttaacaagcacaaagccaagaaaaccaacgatgccagatactgaatttctatagcactgacctttgaacaccctagcaggtgtaaactgctgagtgcagataccatgcagtgcaattatgactgaactgtacaactcgtattcccaaatttgcaatattgctgagaaatgctttcacaaacctctcaaattcctttaacaagtacaataatttgagcttttttcctaattgtcactgtaataaggaagctacattaactacattttaagctacaactctagtctttgcctaatctttgcccagtctctctataaaacttaaagatggaatatatacatgtaacttaacagatcagacaacaaacgtcaagctcattgttgctcaaactgccagttacacaaaattctttttatgtaattcatatccctattgattcaacatatccacacaggtttacgtgactttaggatgaaatatgtgtaactgccagttgaataatgatgcaaagaacacaggtagtttcgtttggtaggtatagacatgcagtctcttcattttccttctctatacaaatatatacattgtaatatttttgccagtatcttactaattctgtgttatacctgaaatactgggatggtgtaatttctatttttcatcttttgagtccttgattattataagttaaatattttacttacctctcaacatgaatgagttcaaatcacattcattcctatagaaagtaccaattaaagatttagaaaggatacatttccagttattaaaactaaaacccaagtataaatttaagatccagtttattatacagccatatccagctctgtcagaattaagttttagttcatgcccgttatcattcagcagttgaacagttaaattcatcatctgaactgtaatcattatttcccaaaagattatactgtcaccaattaaaacttacctaagcgatcactcaagaatggtacagatgtgtggagtatgccaatacctaaggtaaaaaagtagattatctggtttttcataacgtttagcaaccgtctttttcaaacttttagcaactgtcttgtaattccttcccacagatctaacaatagtcctgtgagtaaagtaaaaccacagagttactctatgaggcgtttccaacgatgtgcaggctacaggaaaagccccatcgggatagacctcaaccactatttacaaggttttgatttttttttaaagacacaggatctgccatgtcttttaaaaatcgtgtgattcttgctgaatcacttgagcccaggggttcgaggctacagtgagatgtggcaggatcacatctcactgtagcctcaaaccgctgggctcaagtgtttctcctgccttagcctccagagtagctggggaccacaggcaccactgtgtccagctagtatttatacacataaataacaaagtctaacactccataggaaagaaattatgagcagaaactgcaatatgctcttacaatattgccaactgcagaaacttcctactacgttaatcacaaaaacaataatttcacaatcacgttgtgcttaggagccagaggaatgataaataaaaagtaacatcaagtagctcctttacatgaaccaaaggaaaaagatttaaacttaagatttaagtttaaagtctaactgttgttatgaacttcagtattgcaacagaggatgttgttttcccaattcgaagatttcagcaaattttaattcttggctcaaaattaattgtcatccattataaaatacaggaatataatgtgcctgtaagttacgactttggcattatataacttttaatcaaactctacatcattcaaatttatgaattcttatgacctgtgtaatcatcttttattatactatattttgcattaaaccataaaatcctctgcctcattttagattgtgcattaattcaaaataatgctgtaggcttcaagtaggaaatccaaagttctgattattgctacaaactaacaaattcaggaccctctaatgcttgcaactaaaatgaatctgacacatcactataaaatgtgtgaatctaggattcttcttttcagaa

SEQ ID NO: 1884684 - DNA, 4001 bp, Homo sapiens
agtagaatcacctgaacgcgggatgcagaggttgcagttgaagagattgcgccattggactccagcctgggcaacaagagtgaaactccatctcaaaaaaaaaaaaaaaaaaaaaaaaatcggctgggcgcagtggctcacgcctgtaatcctagcactttgggaggccaaggtgggtggatcacgaagtcaggagatcgagaccatcctggctaacacggtgaaaccccgtctctactaaaaatacaaaaaattagccgggcatgatggcaggtgcctgtagtcccagctacacaggaggctgaggcaggagaatggcattaacccggcaggtagagcttgcagtgagctgagatcacgccactgcactccagcccgggcgacagagcgatactgtaagatggacacctaccacttgaaaagatgatttttcaaggaagaaaacagttgttgcaggaaacctacaaattctaggtgctcacacggatagattaggaaaaataatgtgcatatgctatttccaactgggtcaaagtagatgttagggaaaaaaaaaaaagcatatagatgctttttttttgttttttggacggagtctcactgtcacccaggctggagtgcagtgatgtgatctcagctcactgcaacttccacctcctgggttacaggtgcctgccaccatgcccagcttatttttgtatttttagtaatgacagggtttcaccatgttggccaggctagtcttgaacttctgacctcaggtgatccacccaccttggcctcccaaagtgcggggattacaggcgtgagccaacacgtgcagccatttctgaattctgaaggatcatggctctgtcaacaaacaccagccagacatgcagcttaaccatttctaagtcttataaccttgaaccactccctagggttgtctgagattttactcattcaagcagcaatacccatgtaccccattaggttaagaattaaattaaaacacaataccagaacaagtaaatcttactttaacccatccaaagattttcaaaggccaggaacccaagcccacttcagatattcttcctaaacccccaatgctccagacgaactgtgcctgtttactgtcccctagattccttcatctttaaccctcaccacaagatccaatgtctctccatatcagattcccctccctccagtgacacttttatgtattaggttagtgcaaaagtaaatgtggtttttgcattaaagtaatggcaaaaaccacaattacttttgcaccaacctaatattactatttctgatgctacaagtggttaacatctgccagggatctgtctcagtcttttaacattaaatgtatcaaaaatacttagaaacatttttgccatgacaccaaaacaaacacaaaggcattatttcctagtgtcttccagttctccatgtttaaagcaaccacctatgaggttataagctgctcaactggtttaaggggccaatcaagggatgtgatggacagtatcttactgctccctggaatcctaacatcaatcacccaaaacacttccccatcaaacaagatcaacacatatgaaccactgatatatataatttttcttctaggaaaataaatatgaaacatgcttttagttaaacaatcattttattgcttgagtacacagacaaatttatgcgaccagggcagaggctgtagatgattcactgaaaaagaaaaaaggggaaagaaagaaaatcaggattaatactagtccctccacattcattaacagaatctccccactaatggtgctattctcaaacagttaataaatccaaactatataaagtgcaccaaacttctgaatacctgaaccaactcattgtgttcaagcacaatgaatgaagatgctcactcagacatccaaggaagaactggccaacataaggaaaaacatttctggtggaaactgcgaatgtctggcaaccaatcatcatagtgagcaattcatgtgaaaattaattcaaactcctgggagtagaggtatgaaaggaaaatctacctactatctaaaagagagtcaaagggcttattcatggtctaaatctggggtctgcaactatggccctctgcttgtctttattaaagacaagcagccacacccattcgattatgtattgcctgtggctgctttcccactaccaggccagagctcaaagagcagttaacaaaatagcccccaaggctgaacatatttactactagcccccaaggctgaacatatttactactaggacttttactactggctgactcctattcttgataacaacgacaaaagagttgatacttactatttccaattgggagggaggactcgcttggtcttataatatcgagccaaacggtgaatccggctctctattagaatcagacggaatttagcatccttatcctaaaaataaaatttggtgcaattcaagaaaaccacccaaaatgacctaacattatcaaacattaataagagaatgtagagctaccatgcactttctataatgaaaatctctttggatagaatttgaacttcaaagcagcactacactggtttgtgtactaagccttggataattcaaaccagatgcattacattttaccgaaaaaatttagtacaagcagtcctacttagcaccaggttttatttattagcttacctttctgttcctctcaagatgctttcgaacagcaactgctttcttaattaaatggtagagatcttcaggaagatcaggagcaagtcccttagacttaagaattcttaaaattttattgcctgtcacaaaacgtacttgtgcaacaccatgtgaatctctcaggattacacctgaaaagggaatcacgttttaactttcaacacgaaacacaaactggagaatgtgatgatgtcaaggctcagaaatcagggcatagtttcctatctgtaagatgggggtatacttttatacatcacagaaaccaacgtgagaatgcacataaagctcactcagacatccaaggaaggtttacccaacactaaggaaaacctttctggtggaaactgcgaatgttggaaaaccatcatcacagtgagcttgctggaatacagatgaccaaagggattaatgagattccacagctaacatttactgagaactctggtcagatattcttctaaaaactttacacgttatttcttttaaacctctaatgagctctgactacttacaatctatgacatattttcttttgatgtgtcatacctccaattagactacaagctccaggagtacagatattttgcacccccctcccccttttaagaggtgggatcaggtggtgtggctcacgcctgtaatcccagcactttgggaggccgaggcagtggatcatctgaggtcaggagtctgagaccagcctggccaacatggtgaaacctcgtctctactaaaaatacaaaaattagccgggcgtggtggtgcggcctgtagtctcagctactccagaggcagaggcaggagaattgcttgcttgaacccaggaggcggaggttgcagtgagccgagatcataccactgcactccagcctgggtgacaaagtgagaatcggtctcaaacaaaaacacacaaattagctgggcctgctggcgggcgcctgtaatcccacctattcgggaggctgaggcaggagaatcgcttgaatccaggaggtggaggttgcagtgagctgagatcgcgccactgcactccagactgggcgacaagagcaagactgtctcaaaaaaaaaaaaaaaaagaggtggggtctctctgtcacccaggagtgcagtggcttcatcatagctcactgcagcctgggacttctaggctctggtgatcctctcacctctgcatcccaagtatctgggactacaggcacattgcggctggcttttttgggcgggggagtcggagagtagtatgttctcag

SEQ ID NO: 1884685 - DNA, 4001 bp, Homo sapiens
cctagattccttcatctttaaccctcaccacaagatccaatgtctctccatatcagattcccctccctccagtgacacttttatgtattaggttagtgcaaaagtaaatgtggtttttgcattaaagtaatggcaaaaaccacaattacttttgcaccaacctaatattactatttctgatgctacaagtggttaacatctgccagggatctgtctcagtcttttaacattaaatgtatcaaaaatacttagaaacatttttgccatgacaccaaaacaaacacaaaggcattatttcctagtgtcttccagttctccatgtttaaagcaaccacctatgaggttataagctgctcaactggtttaaggggccaatcaagggatgtgatggacagtatcttactgctccctggaatcctaacatcaatcacccaaaacacttccccatcaaacaagatcaacacatatgaaccactgatatatataatttttcttctaggaaaataaatatgaaacatgcttttagttaaacaatcattttattgcttgagtacacagacaaatttatgcgaccagggcagaggctgtagatgattcactgaaaaagaaaaaaggggaaagaaagaaaatcaggattaatactagtccctccacattcattaacagaatctccccactaatggtgctattctcaaacagttaataaatccaaactatataaagtgcaccaaacttctgaatacctgaaccaactcattgtgttcaagcacaatgaatgaagatgctcactcagacatccaaggaagaactggccaacataaggaaaaacatttctggtggaaactgcgaatgtctggcaaccaatcatcatagtgagcaattcatgtgaaaattaattcaaactcctgggagtagaggtatgaaaggaaaatctacctactatctaaaagagagtcaaagggcttattcatggtctaaatctggggtctgcaactatggccctctgcttgtctttattaaagacaagcagccacacccattcgattatgtattgcctgtggctgctttcccactaccaggccagagctcaaagagcagttaacaaaatagcccccaaggctgaacatatttactactagcccccaaggctgaacatatttactactaggacttttactactggctgactcctattcttgataacaacgacaaaagagttgatacttactatttccaattgggagggaggactcgcttggtcttataatatcgagccaaacggtgaatccggctctctattagaatcagacggaatttagcatccttatcctaaaaataaaatttggtgcaattcaagaaaaccacccaaaatgacctaacattatcaaacattaataagagaatgtagagctaccatgcactttctataatgaaaatctctttggatagaatttgaacttcaaagcagcactacactggtttgtgtactaagccttggataattcaaaccagatgcattacattttaccgaaaaaatttagtacaagcagtcctacttagcaccaggttttatttattagcttacctttctgttcctctcaagatgctttcgaacagcaactgctttcttaattaaatggtagagatcttcaggaagatcaggagcaagtcccttagacttaagaattcttaaaattttattgcctgtcacaaaacgtacttgtgcaacaccatgtgaatctctcaggattacacctgaaaagggaatcacgttttaactttcaacacgaaacacaaactggagaatgtgatgatgtcaaggctcagaaatcagggcatagtttcctatctgtaagatgggggtatacttttatacatcacagaaaccaacgtgagaatgcacataaagctcactcagacatccaaggaaggtttacccaacactaaggaaaacctttctggtggaaactgcgaatgttggaaaaccatcatcacagtgagcttgctggaatacagatgaccaaagggattaatgagattccacagctaacatttactgagaactctggtcagatattcttctaaaaactttacacgttatttcttttaaacctctaatgagctctgactacttacaatctatgacatattttcttttgatgtgtcatacctccaattagactacaagctccaggagtacagatattttgcacccccctcccccttttaagaggtgggatcaggtggtgtggctcacgcctgtaatcccagcactttgggaggccgaggcagtggatcatctgaggtcaggagtctgagaccagcctggccaacatggtgaaacctcgtctctactaaaaatacaaaaattagccgggcgtggtggtgcggcctgtagtctcagctactccagaggcagaggcaggagaattgcttgcttgaacccaggaggcggaggttgcagtgagccgagatcataccactgcactccagcctgggtgacaaagtgagaatcggtctcaaacaaaaacacacaaattagctgggcctgctggcgggcgcctgtaatcccacctattcgggaggctgaggcaggagaatcgcttgaatccaggaggtggaggttgcagtgagctgagatcgcgccactgcactccagactgggcgacaagagcaagactgtctcaaaaaaaaaaaaaaaaagaggtggggtctctctgtcacccaggagtgcagtggcttcatcatagctcactgcagcctgggacttctaggctctggtgatcctctcacctctgcatcccaagtatctgggactacaggcacattgcggctggcttttttgggcgggggagtcggagagtagtatgttctcaggccccagaaccatgttcagcacatagaaggtaaacatttgctgaatgaagccacttgcacgaagtcacacgcagctgagattcaaaccacacctaactgtgaggaactgtgtcaggcactctgcttagccaattccaactcctccacttgacagctgtgtgatttggggctggttagtatccagcggcagtgtgcctctgcttcctcaactgtaaactggggtgaaagccatgaagatttatttcaaagtattgtggtcagaattaaacgaaatcagtacatgtgaagtgcttacaatgatgcctctagcacggtggcgagaccagagttttggctatttttaaaataactttaccacctactagatcctacaagtcacacgaggacaggcgaaataggctatgttagacacaaacactcaccgatctgtgaaggagtaaggcccttcttggccagtttgtaaatctgctccttcacgtcgtcagatgtcaacttcaaccactgttatggaatagaaagcagccttaggatgagaacccaggaatggcgccgcagaacagcggtctctccttccgcaaaaccgcgctcctcatacacgcaagttcctcaccctggcgtcgcttcacccgagacaaatgccaaccccctccccggattctccccggtcccagcgcgctacttacagtggggacgctgcgtcgatagggtaaagccgactgggacaggcccttcctggggagagaagcagtctcgaggtgaggtggcggctagtgccagagcagcccagaacatcatcccctcggcccgctgcccacactccctgtcttcctcccaccccccgcccagcaatccggcttgatgccccgagctcacccgggagcatgcatgcgacccatgatggcggcgatcaggcaacgaaaggagagcgagagtggaaacgccgcaggaagccacccaacacgcaggaagtgacctcacacgtccccgcttcctctcacgcaggaggcggagctacgctgcgcagccaccgcccgtctgtgtgactacatctcccgaaatgcatttcagcgtcgcaagagatcgtcaatccagcctcatcccggcatgcatcggtctttggtcag

SEQ ID NO: 1884686 - DNA, 4001 bp, Homo sapiens
acataatcacctaagcctacttctcccaccagctggcctgggagattatttaaagactcaaagcaattgtatggtgccaattttaaatagttttatttaagacattgcattttccacttacaatacagtgtttataaagtgcaatgttatttccttcccctgtgcatatgttccatattcaagtattgagaatgcccagtaacttactatagcagcttaactttttaaaactgccacagaatttgctacgaatttaggtccttcaaatgttttaaatgtgtggaacaatgctacatctacacttggttggcttaatcaacctcttcaatggtgggccctgaggaagcaccaccagagggaggagctccaccaccaggaaatcccccaggcattcctcctggcatgcctcctgcactctggtacagcttggtgatgatggggttgcaaactttctccagctctttctgttgatgttcaaattcttccttctcagcagtctgaggaagagaaaaaggaattactgcaagttcttttaatgttaataacccttctttctccctgacgcaatctgatactaaaagtctggcgcaaactcttacaagagggccactaccaacattaaaatagggccttattcttccttaacatcttgggtcactcagacatccaaggaaggtagttgccaacaccttgaattctggtggaaaccgcgaatgttttggaccattcatcattgtgaccctacactgaaatccagctcaagcttggtttaccatccccttcccctccattgagtgggggaggaaaaaaaaaaaaaaaaaacacaaacctgattcttatcaagccagttgataatttcattacacttgtccagaatcttctgtttgtcctcatcgttaatcttgccttgaagtttctcatcttcaacagttgctttcatgttgaaggcataggactcaagtgaattcttggatgacaccttgtccctctgcttctcatcttcagctttgtacttctcagcttcctggaccatacgttcaatgtcttccttgctcaaacggcctaggaaagaaattaactctaagtaaaagccttaaattacctgtgtatgtgtaactctagtttctcttagctagacgcccttaggcaccagtaactcaattgaaataccattatccctgtcaagaccagatgacagtgcctccttacccttgtcattagtgatagtaatcttgttctcttttcccgtactcttgtccacagcagagacattgagtataccattggcatcaatgtcaaaagtgacttcaatctgaggaacacctcggggtgcaggaggtatgcctgtgagttcaaacttgccaagcaggttgttatcctttgtcatggcacgctcgccttcataaaccttggtaggaaataaaacaaattactacaatggactccaggtctgtgacagtgctagggtcctgctaaggaagaatggtcgctcaaacatccaaggaaggaactggccaacataagactttctggtggaaactacgaatggttttggaatccatcatcatagcgagtcagtcaagacttccctttatctgttatcagtaagccaaacaagagaagtacagaaacatacctgaataagcacaccaggctggttgtcagaataggtagtgaaggtctgtgtctgcttggtaggaatggtggtattacgcttgatgaggacagtcatgactccaccagcagtttcaataccaagggaaagaggagtgacatccaagagcagcaaatcttgaacattctcagacttgtctccagacaagatggctgcctggacagctagcaaacaaaaagttaacgttaaaagaagttaaaagaaaacccagtacatagctcctgttttaactatcactcgctcagacatccaaggaaggtgttgccatcattagccaagcttttggtggaaactacgaatgtttaacaatcactcatcacagcgagtcaccttgggcctgcctgcctttagggttaattgagataccattgttacctgcaccataagcaacagcttcatcagggttgatgctcttattcagttcttttccattgaagaagtcttggagaagcttctgaatcttggggatacgagtagaaccaccaaccaggacaatatcatgaatctgtgacttgtctagtttggcatctcgaagggctttctctactgggtccagggtgccacggaacaggtcagcattcagttcttcaaatcgggcacgggtaatggaggtatagaagtcgattccttcatagagagaatcgatctcaatactggcctgggtgctggaagagagggtacgcttagcacgttcacaagcagtacggaggcgtcttacagctctcttgttctcactgatgtccttcttatgcttgcgcttaaactcagcaataaaatggttgaccattcggttgtcaaaatcttctccacccaagtgggtgtctccagctgtagacttgacctcaaagattccatcctcaatagtgaggattgacacatcaaaagtgccacctcccaggtcaaagatgagcacgtttctttctgctccaacctgccgttaaaaacaatctcatttaaatttacgatggatcaaattaatcttaaaataatccgaacttgcatcacaaatggtacatacctttttgtctaagccgtaagcaatagcagcagcagttggctcattaataattctaagtacattgagaccagcaatagttccagcatctttggtagcctgacgctgagagtcattaaagtaagctggcactgtgaccacagcattggtaacagtctaggaataaggaaaagaccacagattggtaactattatacttacatatatgcaaactccagcaaatggattaatgctggtgaaagaacagctggagcaccccccccaccaaaatgtaaattactgtgtaattgtcaagattcactggtttctggtgttgacagacccatctacctagagagcctagggcactgttgggcacgtggtcttaaccctgagctgagccccatctgttcccctccctcgccaggtgccagtgcccccgggagtcatcgggcttttaactactccggaatgcaccccatactgaaaaaccaacctcaccttcccaaggtaggcttctgcaatttccttcatctttgtcagaaccatagaagacacctcctctggatagaagcttttggtctctcccttgtattctacttggaccttgggcctgccagcatcattcaccaccataaagggccaatgtttcatatcagactggacaacagcatcatcaaatctgcgtccaatcagacgtttggcatctgtaaaaggtgtcaaatgaaaacactttcaatttcatagctcttctgataaaactcaagtccatgattactcaaatacctaacagttcataggtaggtgaattcaactaccatataggtagcaaaggttcaaacttcaacctcctacgttatccagatttcagcctgaaaggtttctacaacctgttttataacagacttgataacaagtctctcagctcagtttttctaaaatcaaaaagttccctcctcacgtttcataaacttttgtgcttcctagccctgttatatttgttctgtcatttaaaattaggaactcaccaaaaactgtgttggtggggttcattgcaacttgattctttgcggcatcaccgatcaaccgttcagtgtccgtaaaggcgacatagcttggagtggttcggtttccctgatcattggcaattatctcgacttttccgtgctggaaaacacccacacaagagtaggtggtgccaagatcaataccaactgcaggtcccttggacatggttgctgaaaaaaagaaaaatctggtttaaaaattcaattaatcaaaatatttccctcatcccttaacagaacacttaaccaggaaaaacgtatggcc

SEQ ID NO: 1884687 - DNA, 4001 bp, Homo sapiens
taaccaggtggcagcttagctccatccccgaccttctgaataatcttaactcaggaagaaatggaagcccacagggcagtggctcatataagggattgacattcagatacctctgccatgtagcttaatattcactgcccattatttgattctgatctctaaattcttactcatctagcacaaccctccaggaaagcctctgctcctaggcaggcttacacacagaataagtttagaaaacaccattaagtcagctttctgcctctccagcctaaggactaaggttagtttgatccagatccaatttcttatgctccccttctcaaagctctgaattccaaaatgtaccatccacaatgctctgaagggcaacttgccacccagcccttgttaactcaagcttaagaggaaggagaaagtaagagtcacataatcacctaagcctacttctcccaccagctggcctgggagattatttaaagactcaaagcaattgtatggtgccaattttaaatagttttatttaagacattgcattttccacttacaatacagtgtttataaagtgcaatgttatttccttcccctgtgcatatgttccatattcaagtattgagaatgcccagtaacttactatagcagcttaactttttaaaactgccacagaatttgctacgaatttaggtccttcaaatgttttaaatgtgtggaacaatgctacatctacacttggttggcttaatcaacctcttcaatggtgggccctgaggaagcaccaccagagggaggagctccaccaccaggaaatcccccaggcattcctcctggcatgcctcctgcactctggtacagcttggtgatgatggggttgcaaactttctccagctctttctgttgatgttcaaattcttccttctcagcagtctgaggaagagaaaaaggaattactgcaagttcttttaatgttaataacccttctttctccctgacgcaatctgatactaaaagtctggcgcaaactcttacaagagggccactaccaacattaaaatagggccttattcttccttaacatcttgggtcactcagacatccaaggaaggtagttgccaacaccttgaattctggtggaaaccgcgaatgttttggaccattcatcattgtgaccctacactgaaatccagctcaagcttggtttaccatccccttcccctccattgagtgggggaggaaaaaaaaaaaaaaaaaacacaaacctgattcttatcaagccagttgataatttcattacacttgtccagaatcttctgtttgtcctcatcgttaatcttgccttgaagtttctcatcttcaacagttgctttcatgttgaaggcataggactcaagtgaattcttggatgacaccttgtccctctgcttctcatcttcagctttgtacttctcagcttcctggaccatacgttcaatgtcttccttgctcaaacggcctaggaaagaaattaactctaagtaaaagccttaaattacctgtgtatgtgtaactctagtttctcttagctagacgcccttaggcaccagtaactcaattgaaataccattatccctgtcaagaccagatgacagtgcctccttacccttgtcattagtgatagtaatcttgttctcttttcccgtactcttgtccacagcagagacattgagtataccattggcatcaatgtcaaaagtgacttcaatctgaggaacacctcggggtgcaggaggtatgcctgtgagttcaaacttgccaagcaggttgttatcctttgtcatggcacgctcgccttcataaaccttggtaggaaataaaacaaattactacaatggactccaggtctgtgacagtgctagggtcctgctaaggaagaatggtcgctcaaacatccaaggaaggaactggccaacataagactttctggtggaaactacgaatggttttggaatccatcatcatagcgagtcagtcaagacttccctttatctgttatcagtaagccaaacaagagaagtacagaaacatacctgaataagcacaccaggctggttgtcagaataggtagtgaaggtctgtgtctgcttggtaggaatggtggtattacgcttgatgaggacagtcatgactccaccagcagtttcaataccaagggaaagaggagtgacatccaagagcagcaaatcttgaacattctcagacttgtctccagacaagatggctgcctggacagctagcaaacaaaaagttaacgttaaaagaagttaaaagaaaacccagtacatagctcctgttttaactatcactcgctcagacatccaaggaaggtgttgccatcattagccaagcttttggtggaaactacgaatgtttaacaatcactcatcacagcgagtcaccttgggcctgcctgcctttagggttaattgagataccattgttacctgcaccataagcaacagcttcatcagggttgatgctcttattcagttcttttccattgaagaagtcttggagaagcttctgaatcttggggatacgagtagaaccaccaaccaggacaatatcatgaatctgtgacttgtctagtttggcatctcgaagggctttctctactgggtccagggtgccacggaacaggtcagcattcagttcttcaaatcgggcacgggtaatggaggtatagaagtcgattccttcatagagagaatcgatctcaatactggcctgggtgctggaagagagggtacgcttagcacgttcacaagcagtacggaggcgtcttacagctctcttgttctcactgatgtccttcttatgcttgcgcttaaactcagcaataaaatggttgaccattcggttgtcaaaatcttctccacccaagtgggtgtctccagctgtagacttgacctcaaagattccatcctcaatagtgaggattgacacatcaaaagtgccacctcccaggtcaaagatgagcacgtttctttctgctccaacctgccgttaaaaacaatctcatttaaatttacgatggatcaaattaatcttaaaataatccgaacttgcatcacaaatggtacatacctttttgtctaagccgtaagcaatagcagcagcagttggctcattaataattctaagtacattgagaccagcaatagttccagcatctttggtagcctgacgctgagagtcattaaagtaagctggcactgtgaccacagcattggtaacagtctaggaataaggaaaagaccacagattggtaactattatacttacatatatgcaaactccagcaaatggattaatgctggtgaaagaacagctggagcaccccccccaccaaaatgtaaattactgtgtaattgtcaagattcactggtttctggtgttgacagacccatctacctagagagcctagggcactgttgggcacgtggtcttaaccctgagctgagccccatctgttcccctccctcgccaggtgccagtgcccccgggagtcatcgggcttttaactactccggaatgcaccccatactgaaaaaccaacctcaccttcccaaggtaggcttctgcaatttccttcatctttgtcagaaccatagaagacacctcctctggatagaagcttttggtctctcccttgtattctacttggaccttgggcctgccagcatcattcaccaccataaagggccaatgtttcatatcagactggacaacagcatcatcaaatctgcgtccaatcagacgtttggcatctgtaaaaggtgtcaaatgaaaacactttcaatttcatagctcttctgataaaactcaagtccatgattactcaaatacctaacagttcataggtaggtgaattcaactaccatataggtagcaaaggttcaaacttcaacctcctacgttatccagatttcagcctgaaaggtttctacaacctgttttataacaga

SEQ ID NO: 1884688 - DNA, 4001 bp, Homo sapiens
gaaaaccttccacatatttttaagattccacatgaaacgagatcaaagtatatttaccctttagtctcgttgagtcaaggcatcaaaaaagtttgtagcatctcaaatacatggtatggccatgtgcagtgacatacacctgtagagccagctacttggaactaaggctgggtgaccacttggacccaggagttccagtccagcctgcacaagtgataacacacccctatggaaaactgaagcccaggtaagattctcacccaaacaaaagaaacatgccaaaaacgtgcattgctgtcaggtgcagtgactcacacctgtaatcccagcattttgggaggccgaggcgggtgcaccacctgaggtagggagatcagcctgaccaacatggagaaacctcatctctactaaaaaatacaaattagccaggaatggtggcgcatggctgtaatcccagctacttgggaggctgaggcaggagaatcccttgaacccaggagacagggtttgcaccattgcaatgagatcgtgctattgcactacagcctgggcaacaagagtaaaacccttcaaaaaaagaagtgtgtactacttgtcattttttgtaaccttggagaaaatatggaatgagaagtatatcaaatcgtgctacaaattcccactgagatacccagacattagtagcccttcagtaccaaagagaaaaactgcagctcctccatgaattagctttttggcatatgctaagattagctagtccactgaaatctgtcacgtacgtaatgacaggtaacagcctgctcccctaggctatcacaactcactgttgggaccttaattaaccaggtggcagcttagctccatccccgaccttctgaataatcttaactcaggaagaaatggaagcccacagggcagtggctcatataagggattgacattcagatacctctgccatgtagcttaatattcactgcccattatttgattctgatctctaaattcttactcatctagcacaaccctccaggaaagcctctgctcctaggcaggcttacacacagaataagtttagaaaacaccattaagtcagctttctgcctctccagcctaaggactaaggttagtttgatccagatccaatttcttatgctccccttctcaaagctctgaattccaaaatgtaccatccacaatgctctgaagggcaacttgccacccagcccttgttaactcaagcttaagaggaaggagaaagtaagagtcacataatcacctaagcctacttctcccaccagctggcctgggagattatttaaagactcaaagcaattgtatggtgccaattttaaatagttttatttaagacattgcattttccacttacaatacagtgtttataaagtgcaatgttatttccttcccctgtgcatatgttccatattcaagtattgagaatgcccagtaacttactatagcagcttaactttttaaaactgccacagaatttgctacgaatttaggtccttcaaatgttttaaatgtgtggaacaatgctacatctacacttggttggcttaatcaacctcttcaatggtgggccctgaggaagcaccaccagagggaggagctccaccaccaggaaatcccccaggcattcctcctggcatgcctcctgcactctggtacagcttggtgatgatggggttgcaaactttctccagctctttctgttgatgttcaaattcttccttctcagcagtctgaggaagagaaaaaggaattactgcaagttcttttaatgttaataacccttctttctccctgacgcaatctgatactaaaagtctggcgcaaactcttacaagagggccactaccaacattaaaatagggccttattcttccttaacatcttgggtcactcagacatccaaggaaggtagttgccaacaccttgaattctggtggaaaccgcgaatgttttggaccattcatcattgtgaccctacactgaaatccagctcaagcttggtttaccatccccttcccctccattgagtgggggaggaaaaaaaaaaaaaaaaaacacaaacctgattcttatcaagccagttgataatttcattacacttgtccagaatcttctgtttgtcctcatcgttaatcttgccttgaagtttctcatcttcaacagttgctttcatgttgaaggcataggactcaagtgaattcttggatgacaccttgtccctctgcttctcatcttcagctttgtacttctcagcttcctggaccatacgttcaatgtcttccttgctcaaacggcctaggaaagaaattaactctaagtaaaagccttaaattacctgtgtatgtgtaactctagtttctcttagctagacgcccttaggcaccagtaactcaattgaaataccattatccctgtcaagaccagatgacagtgcctccttacccttgtcattagtgatagtaatcttgttctcttttcccgtactcttgtccacagcagagacattgagtataccattggcatcaatgtcaaaagtgacttcaatctgaggaacacctcggggtgcaggaggtatgcctgtgagttcaaacttgccaagcaggttgttatcctttgtcatggcacgctcgccttcataaaccttggtaggaaataaaacaaattactacaatggactccaggtctgtgacagtgctagggtcctgctaaggaagaatggtcgctcaaacatccaaggaaggaactggccaacataagactttctggtggaaactacgaatggttttggaatccatcatcatagcgagtcagtcaagacttccctttatctgttatcagtaagccaaacaagagaagtacagaaacatacctgaataagcacaccaggctggttgtcagaataggtagtgaaggtctgtgtctgcttggtaggaatggtggtattacgcttgatgaggacagtcatgactccaccagcagtttcaataccaagggaaagaggagtgacatccaagagcagcaaatcttgaacattctcagacttgtctccagacaagatggctgcctggacagctagcaaacaaaaagttaacgttaaaagaagttaaaagaaaacccagtacatagctcctgttttaactatcactcgctcagacatccaaggaaggtgttgccatcattagccaagcttttggtggaaactacgaatgtttaacaatcactcatcacagcgagtcaccttgggcctgcctgcctttagggttaattgagataccattgttacctgcaccataagcaacagcttcatcagggttgatgctcttattcagttcttttccattgaagaagtcttggagaagcttctgaatcttggggatacgagtagaaccaccaaccaggacaatatcatgaatctgtgacttgtctagtttggcatctcgaagggctttctctactgggtccagggtgccacggaacaggtcagcattcagttcttcaaatcgggcacgggtaatggaggtatagaagtcgattccttcatagagagaatcgatctcaatactggcctgggtgctggaagagagggtacgcttagcacgttcacaagcagtacggaggcgtcttacagctctcttgttctcactgatgtccttcttatgcttgcgcttaaactcagcaataaaatggttgaccattcggttgtcaaaatcttctccacccaagtgggtgtctccagctgtagacttgacctcaaagattccatcctcaatagtgaggattgacacatcaaaagtgccacctcccaggtcaaagatgagcacgtttctttctgctccaacctgccgttaaaaacaatctcatttaaatttacgatggatcaaattaatcttaaaataatccgaacttgcatcacaaatggtacatacctttttgtctaagccgtaagcaatagcagcagcagttggctc

SEQ ID NO: 1884689 - DNA, 4001 bp, Homo sapiens
tggcacacagacctctagtggccaccttttcagcataaagctttaaaggaagcaagggatatcctgttaccatcaccattattttcaactgaaagttgaaaatttggcatttgccacacaagtatcactttctacaccaagcttgcccaacccacgggccgcatgctgcccaggagatggctttgattgtggcccaacacaaattcaacatcgtgattttttgcgctaccagtagtagtgtggcccaagacatttcttcttccaacgtagcctacggaggccaaaagatcggacaccaccatcatatacagcatataatttcagtatccctcaattcctaaagcacttctaccacctacacacaatgcaggttccttgccctcccaccctggctcctttggccatgccaagtacaccaatggggacagttaatccatcatatgcatcatttctatacccaagttgaatgtaaaatcctttaaccatcagccattagcagaataggcttacaaagttaagcccattattcattaagagaatttcaacagttataccagtccatttgtaatgaacaaacaattaaagtctccaagttgagagtttttagaagtatcattctgaagagccattacctctggcatatgccagaatcactcacctctacactgccctctggaaagccaaacctcttctgaactacagcagtcagttcccgaatccgccggcccttctcaccaagaacattctgtgttctgggggggaaaagtgacaattcaagattctcacaaatgctagatgtaactttaaatcttgcatatatgtgtggtagcaaaatctctgccacaaagcatataattttcattgacaaaaactaaaatttttaaaacgcagcttttttttttgagacagggtctcactctgtcacccaggctggatcacaccaatggctcactgcagcctgaacctcttgagctcaagccatcgcctgcttcagcctctggaataggtgggaccacatgcatgcaccaccacacccttttttattttttgtagagcgggggtttccccatgttgccccggctgatcttgaattcctgagcttaagtgatcctacgcctggccttaaaatctagcttttaagaagcaattacattcactaagcccagattcactgttccgtctgtccccttaagttcataaaggataaacctgccgggcgcggtggctcacgcctgtaatcccagcactttgggaggctgaggcaggcggatcacgaggtcaggagatccagaccgtcctggctaacacggtgaaaccccaactctactaaaaacacaaaaaattagcaaggtatggtggcgggcgcctatagtcccagctactcgggaggctgacgcaggagaatggcgtgaacccgggaggcggagcttgcagtgagccgagatcgcgccactgcactccagctttggggacagagcaagactccgtctcaaaaaaataaataaataaataaaccaacttagcatttataacaattataggtgatggccagtcaaatgagttttacctggtggctaagataatgatttctgtcctggttggtgtaactcgcacctcaactccagagtagccatcttcagccagctcccgagtaagaaactcattcagttcagctttgaagatgccatcagcgacaaactaatccaaacaaagcaaagttcaaaattaggagatcggtgtaggctcactttcgcctgagccagtctagtcttattagtcaatgcatccctcaccaaaactaaatacctccaaccaatggttccaaacccttgttccaacaggagtgcagcaacccttctcagacaaatgcctctaagtcatctttaggaaattacttcaaccagggctctttaaactgtgccacagaacgcagcacagagtaggccacctgggcaaagagaacatccccaagtcagactcgtcatcatctcttcatcgaagggtttaaaacagttccacatgcaaaacaagaaactgctctaatggcctatttacacttcattcagcacagcaaagacactgtacttgtcactgttaaggaatagatagtagacttaacatataagctctctcacttgtagacacaacctgcaccgtctaaagaatcccagccatgttatttggctttacggtaccaacagagctggcaaatcctaactctcgagaagttgtggatttaattttgacatcgaagtgtatatacgaaatgacaaactgtctatttttaaagctaatgatttttacacagttctatcccatgtaatgacaaggcgttaaatccgaggcagcttcctcccggggtccccagacggagcaagcaaccgtcagcaacccttcaagttgaggtcctggggccagcggactgtacccagaaacgaccagttaaggcaagaatacactgctgccttctcttcccaaaaccacgggataagacatgagggaaatgacacacgccctcaaaataccacgtttactaattccgttgaccgacaaatgctcacaaacgccttctccgggacagaaggggcgcctggtgcccatctctctgcgcttcacttggaacccggccacacagcgccctcctggctggggcctctcactcaatccaccgccatccgcggcccgcaggaacgccaggaagcctaggccgcttccagggcaggccacggagctgcaggcctcgcggtggcaccccgagaagccctcgacccgcgcggcgccgtcgttctccgaacccagtccccagaggctcaccttcctcttcttggatatttgcactgccatcttgccgccgcgctccgctgaaaggaaaggaagtggctcgcgggcggaagtgagtataaagggcgcgagcgacgacggagggctgcgctgcgtgcacgcctgtgggtgctcatgggaaatgtagtttttacgtaagtaaggcgtccagggaaagaagaatgtaggcaggaacaggaaaggggcttcatccagcaggacttctaaacttcaggggaccttagagttcaattctcatagtttcaaaacaagcaatgtgaggtgcagaggtggaaattacaggtataagttcacacagcaagagagattaaccagcgtggaactctggcccctacactttcagggtggacactgtaatgaaaatctgctgaaatccctcagtgaaactcatttaagactcctctttgggaggccaaggcgggcggattacttgaggtcaggagttcgagattagcctggcgaacatggtgaaaccccgtctctactaaaaatagaaaaattagctgggagtggtgtcgggcacctgtaatcccagctactcgggaggctgaggtgggaggattgcttggacctgggagatggaggttgcagtgggccaagatcctaccactgcactctagcctggaccacagagtgagactctgtctcaaacaaacaaacaaacaaacaaacaaaacaactcatgtcccccagtctgtacccatttcctccattccaaatgataataataaaacctgatacttactaagtgtcctagggactgcgttctgtgtcctttatgttgttctcatttaccccaccttactttcatcaagtccattacaatttgtaacagaagtcccagaaggtcccatgggcccgcccttccttccttccttccttccttcctctctctttctctctctctttctctcctttctttcttttctctccggttgcccaagctggagtgcagtagtacgatctcagctccctgcaacctccacttcccaggttcaagtgattcttctgccttggcctcctgagtagctgggattacaggtgcacaccaccacacccagctaatttttgtatttttagtagagatgaagtttcactatgttggccaggctggtcttgaactcctgacctcaagtgatccacctgccttagcctcccag

SEQ ID NO: 1884690 - DNA, 4001 bp, Homo sapiens
aacagctttccctggaagtcccctctgtgatcaaccagcatctgatttaacaacagtctcatgattttcaagccaacctgtccctcactagttttgcctgaaaaaatagtgccgaatttcttgtgaagtacagacactggtagaaaatacttcaaaacattgatagataaaatcagagacaatttaaatgttcttcacagttctccagaacataatagcctgtagtaccaatgactggttccatgatcccctaagagaacacaacttaggaatgtggattctaatgatagctttatactgcttaggcaaatttacttctgagccttatgtgccttcagtggtgcaagcaaatttcctttacactttagagaggttgattaacgagtacatatgtaaagaacacttagagcacagcatgacacaaaatataatggccatttatattcactttctatgtgcaacgtggatcgccttatgcataggaaaaactcaaacatatccctcttctaaacctacaatcctgaactacaggacaacgaatcaaggtgctgccttgcttgctatcagccttctctatcacacaaatattatttctctggttggctctgcttgggtcttactgttctggcccttgcaaataccacaagtatggttaaaaccaagaagatatgtaatgctccagaggccaacatgcccctcagtctgaatactgaacagtctagtcagaccttgtgtctttgtacaaaattttattaaaggtctttagagagcaacatccagactccagaatacagctgccaaggagaccctgaaaccaaataaagcacaaaagtaagaaactttaccagagttattaagttcctgatttaccaaatggatacacactcccacttagggtttgcagcaacattaataaaatgcatacataagggtttgtcctttttcatataaaaaaaaaaaatacaaggcacctggagagacaacacctataaacaaaaaaaccccaagtgttgaccacaggaggcttgttagtgttttacaggggctgctaaaggacagaatagcaaaagtgcctagaaaatcttgagcagccaagcacagtggctcacctgaggtcaggagtctgagaccagcctggccaacaaggtgaaaccccgtctctactaaaaacacaaaaattagctgggcttggtggcaggtgcctataatcccagctactcgggaggctgagacaggagaattgcttgaacatgggaggcagaggttgcactgagccaaaaattttgagcaaataagggaggataagggaaaactatttcatatacacgagtaaaagcaggaacttctttctggaaagaataaaggcaacacctgtcccattggaaccaagggttaaatagaccccaggtttcaacttgtattctcccacataaagcaaataaatgaaatttttattcaccaaacgcttaccagaatgtgggatacaagtattaacagaaagactcggaaggaccctattatgccccaagaggcccctgcccttgcagacatacctgttatgctgtggggactggctggggcatggcaggcggctctggcttcccacccttctgttctgagatgggggtggtgggcagtatctcatctttgggttccacaatgctcacgtggtcaggcaggggcttcttagggccaatcttaccagttgggtcccagggcagcatgatcttcaccttgatgcccagcacacctagaggacaccacagttgttagcacacagctggggtctcaaaggcccccatcacacaagaccaaagagagcaagcagtttactcaagcacccctgggtctggacccttctcagacaaatgcctctaaatcgatcaataaataggacacttctgccaaaggaactcgtgcacagcaccacagaacatggcactgacaaggaccaagagcaggacgtgacctttctgactcgtcatcgtgtcatcactgaagggtacacagatggctaaaacaaggacaaaccaactcttggatctgacagatctcagcaaatcgattcttacagatcaacgtggcaatcgatacaccaaggaatatgaacatgcccagctacttccatgataaactcccccaaatacttaagatgtctgtggaaaaccaaatctgtccacaaatgccctttgccaagcactctcagctgctcaccctgtctgagcaacacgtggcgcacagcagtgtcaacgtagtagttaacagggtctccgctgtggatcatcaggccatccacaaacttcatggatttagccctctgtcctcggagtttcccagacaccacaacctcgcagcctttggccccactctccatgatgaaccgcagcacaccatagcaggccctttaaaagaacagaagagagccactgtgttattgccaaggacctccaccaagtttaaaaaacaaaacaaagacttggttttcaatgttcctttaatggagaataatttgaccagagtccggccccaagaataccaattctcttccacacctatcattccgaaccttagggtaatattcatcaagtatgtcaagctcctaaatatgtactttccaaccctggctgcatactggaatcacctcagaaggctaaaataaaaaacaaaagaaaccctgacatctaggccctactctaggccaattaaatgtgcaaagtccaggaatatctatttaaaaatgctccctgggtgattctcatgtataaccaaaactgagaaccacatttacactccacaattacccactttgtggtcccttgaaatactctgcaacctccgaagtctcattcactaggaaagcttacccacctaggatcctggctatcttgctattagaacgctgataaaacactttaaaatatgacctaccccccaactcattcggcagtttacgctctgcgagatactaactggagagctagccacctccaggccctttcacattatcttacttaatattccacaactgagaggtggtataatggtccaccttagaagataacagatcccaggctgagaggttcattaacttgcttcaatgtgtgcaaacagcatgtggaggggttattaagacagattgctgagtcacacatccagtttcccatttggtgggtctggggctggcattaatcttgagaaccattgttctaagcagcctagctggcactcaaaccaggtaagccgtcttttctatgtccttacctagagccttgcctacactacccatccctaccagtcaaccttcctacagcacagctttcctgtcattcctctaggcaaggcatttcagtgcctttacatacagtcaaactgcacaaagaacttcctgttgaaatcttaccagtagaccctcacattactactatctgcatgcaactcagaggttaagtgtctagattttaagctattttgcatcaggtctatcttatctcttcacaataccatcttaagagtgaacacactaagcagatttgaatgattgctactaaagtttcatggtatcctaactagtactaaggcacttctacctagggatacgtaacacacccagtaacaggcctaattattcctcattgcccactgccccgccccccgcaacagggctctttgtaaagccttctcaagaagaccaacaggagttggtcccctccttggacagttctatttgtgtttaactcccaaagcacccagaacacttctccattacaggactgaccaccctttacagttcttgctgctttagtagtcttgttagcctgccagttcagtgagggcatgacttagtatcttattataaccctgggagactagcagatcctgtaactttgtaacagttcatctgctaaattaacaaatggcagacatgtatgttgatacacacaaaaggtcatgaccattaggtctcaggacacttacctccgcacagcaagccctcctaggag

SEQ ID NO: 1884691 - DNA, 4001 bp, Homo sapiens
ggaggcggaggttgcggtgagcagagatcctgccattgcactccagcctgggaaataacagagaaactccgtttcaaaaaaataaaataaaaagcataatttggctgggtgcagtggttcccacctgtaatcccaacactttgggaggccgaggcaggcggatcatgaggtcagatcgagaccatcctgttaacacggtgaaaccccatctgtactaaaaatacaaaaaagtagccgggtgtggtggcatgcggctgtagttccagctactcaggaggctgaggcagggagaatggcttgaacccaggtggtgaagttacagtgagccaagataatgccactgcattccagcctgggtgacaagaacgagattccacctcagaaaaaaaaaaaaggcacaggtttgggaggcaggcagatcacttgaggtcaggactaagcctggtcaacatagtgaaacctctactaaaatcccaataactaggcttgcttcgtgacaggtatctgcaatcccagctactcggggctgaggcaggacaatcactcaatccaggtggaggctgcagggaggcgagatggcactactgcactccagcttgactccattgtcccttgcttcccccaggaaaaaacagatttgggctgggtgtggtgtctgtagtcccagccccagctgctggttaaagtcaagtaggtttgcttaagcccaaaagcttgaagctgcagtgaggttgtgatcatgtcactgtactctaagactaggcaagagaaaaaaaaaaaagatggatgttctactcaggttactcatttaacacactgcctatcaggcaaactgtcagatgtcccttcaagttccaggtacttcagggagcatgagaggaaagccagtttcccatggaaatttacacactgatgctaagagacacatacacacaaaaaaagtaaacaggactatgtaatcaatcattttattattttcatcaacaaccaacacagcaacacaaattgacagccagtcctcaagggaaccttttttgaagtgaagagcaaggccctgaatgagctacctacatggaacatagtatttgcaatatgcaaatggagacctaaaggctcatgacgggaacagaaggtggctgtatacagaggaacagacacgaagtggagttatgggaagttcaatcaacaattggcaacaagctaggtcagtagtttacgaaagtggtcatctatacagtgcctgagtttgggttctgggcctggatcatgtaagaaaggcagcaaagtctgggtgccatgaatcacacctgcaatcccagcactttggaaatctgtggtgagaggatctcttaaagctatggccttgaaaccagcctgggtaacaaaaccaagcccttgtatctaaaaaacaaaagggcaggtagattccagataaataatgttgcaggaagggggtgataaaatacagaaatgtgatacacagcaaaccctcaactgctgtttcattggctcccagtgtcttaatctgtgtctgctaacactttaaggtacatctgaaataccccccaaacccagaaagcttttcaacagctaggttgtccaagaacttggaaaattcaccttctgatgtcctccaagacagattcctgcagaggtaaaaaaaaaagttcttattggattggaaaatacaaatgaacacaatatttaacactatgtaacctaggagcaaaaggttgctattataaaatcagttaaatatttaaacagatacctaccattttttatacaccttatttgctcagacctggaaaaaataaaaccaatgttttcaacaagtgatgattactccctttctctgtatagaaatctttatcatccctcagacagttccttctggaacaaatcttcctcttctcccccagccagtcccagtgggttcacctttacaggctctgggactaggacagagagtaagacatgtgaaagtttcttcattgggaatttttagcatagtccaccttacatttaggtttactcacctgtaacttcagcctggagtgaacacagacacctagttttcctgcaaaatcaagaaagaaaaatgtagtcttgagagactttcattctatgtcacattttacaatctctcaattgtatctattgcttggcagaaagaagtttcagggcacattttataggaaacactacttagcccaagaacttcctattggctgtaaagcctcctcaaataacttgcaatttttagaacatgtcactggaaggcaggctcacagctcagaaaatacctttcagtcacacattgatcagactggggcggtattcaactcatcactggtgagcagcaattcatcactggtggttcaggagatcaaagactttgggttaagccagttatgtctgtgtacattcacccagaccacagtgctatcacacacaaaaatcacagaaaattttatatagcagccattgatggtaactattgcaaagccatttacctcaaactcctcttgggctttagagagaaggtgctggccctgaaaggaggaagaccaagtcagtagtgcttctcatatcccgcattatgttgttcccacccatcattctcagaaaatcagatttcagagtctcaacagcaagtcatcagccgaacgagattccatgtaagtcatcacaaacacaggcctaaaaaggcactttttcctaccctatatactgagtgcattgaataccgtgaaattactcacctttgagccaagcaggttattggttagtagtacctagagaaaaacaaagctgtgggtgaaagattcctcagacatggttaccccccactccctgcgttctccagtttctcaggtgttcatgtattttcactgtcggtcatagtgagctagtttgattcatcatagaaactgcctacttggtggcataagctgtaaggaacaaaaaatatcaactaacctctcagctctgaaggcttttcaatggtatatagcaacaagctgctcctgaatcaaaaaatcattcaattagctaattatcccaaacagccaaaactattttagttacggttgctaatggacaaactaagaaaaggtaaccaaatgtctcagacaattccttatggaataagctctcatgccctcttcatgttaaccctggtgagttcacaattactggttcccaggctaaaacaggggtaaggcaggatgtttcctcctcattggagcagaatcctggaaagctacaactgacaagcattcgtctgaccctgggcagatcagtgggcatctatctgagaaaaaaggggcatatatcagtgggcatctatctagaaacatcactacagagaacaagaggaaccagaaaactttatgggttaagcaggctttggtaacaaatatcaaaatggctaagttatctattagataataggcccatagaattcgaaaaacaacttactgtaagatagaggcagactgtcatcaggaatacctggaaaggaaagcaaattagttattttaaggtattaggatggaatgaagcttattcataaacaacaactgccatcagaactctaacatgctattaacttttgtacctcacagaacatcagcttatcaattcaaatcatctgacagtaacgtgatcgatatatggatgagggtaacagcacacccttacaagaactgtagtaccgggttgcgatctccctccccagaaaatcatttcaagaggaacaagatggaaggcgccaaaaaacattgttccgccggccacttgttttcttgaacatttacaaagatgacatacaccaatttggataattacctgtattcaccctgggaggcagctgaattccccaggatagattatgagatgctgtagacaacagaggaaagcattttatgtacctaaaaatagtcattcaaagaccccttaagacctctctctcacttctcagtagtaagatgacatca

SEQ ID NO: 1884692 - DNA, 4001 bp, Homo sapiens
cgcattatgttgttcccacccatcattctcagaaaatcagatttcagagtctcaacagcaagtcatcagccgaacgagattccatgtaagtcatcacaaacacaggcctaaaaaggcactttttcctaccctatatactgagtgcattgaataccgtgaaattactcacctttgagccaagcaggttattggttagtagtacctagagaaaaacaaagctgtgggtgaaagattcctcagacatggttaccccccactccctgcgttctccagtttctcaggtgttcatgtattttcactgtcggtcatagtgagctagtttgattcatcatagaaactgcctacttggtggcataagctgtaaggaacaaaaaatatcaactaacctctcagctctgaaggcttttcaatggtatatagcaacaagctgctcctgaatcaaaaaatcattcaattagctaattatcccaaacagccaaaactattttagttacggttgctaatggacaaactaagaaaaggtaaccaaatgtctcagacaattccttatggaataagctctcatgccctcttcatgttaaccctggtgagttcacaattactggttcccaggctaaaacaggggtaaggcaggatgtttcctcctcattggagcagaatcctggaaagctacaactgacaagcattcgtctgaccctgggcagatcagtgggcatctatctgagaaaaaaggggcatatatcagtgggcatctatctagaaacatcactacagagaacaagaggaaccagaaaactttatgggttaagcaggctttggtaacaaatatcaaaatggctaagttatctattagataataggcccatagaattcgaaaaacaacttactgtaagatagaggcagactgtcatcaggaatacctggaaaggaaagcaaattagttattttaaggtattaggatggaatgaagcttattcataaacaacaactgccatcagaactctaacatgctattaacttttgtacctcacagaacatcagcttatcaattcaaatcatctgacagtaacgtgatcgatatatggatgagggtaacagcacacccttacaagaactgtagtaccgggttgcgatctccctccccagaaaatcatttcaagaggaacaagatggaaggcgccaaaaaacattgttccgccggccacttgttttcttgaacatttacaaagatgacatacaccaatttggataattacctgtattcaccctgggaggcagctgaattccccaggatagattatgagatgctgtagacaacagaggaaagcattttatgtacctaaaaatagtcattcaaagaccccttaagacctctctctcacttctcagtagtaagatgacatcacttgaaagttcagccatatgcttgtcattttgtgttcatcatggagtggttatctacaaggtctcctctgtaagagcataaaccatgtacacctacctggaacattactgtaacgctggctttgcataaagatgggtcttgtcccattccttcaccagtaagctcttgtgggctgaacatctgaaaaaataacacccttcactaacacctcagacaaatcaatagggccctgacatttgttgcgtacagtacagtgctactcagaattttctgttttctccactaatccatcagaaagagagagttcagttcgtaaaatcatccccgtagcaacttccacacactcaacgaaagagcagagattaagaaatggccgtaagaacttactgcaacaacagagctctcttcggttccaacgtgcgcgtaaatcctgcagacaggagcccaataagacattaggtcaactcagggcatttcgaaaacgctattttctgaacagacggctaagcaagaggcttgcagggcccatctcctcagagttatttatcctcacggagctcagtacaggtctgtgaaaaggtcctcatcataggaagggggacctacacggcccgccatcgccattttgtccttcacaaagccccactgctacttttaagcctcgaggccacgcacaagaccttatccgccagtcgccctggccaggcagctacaacacagaaggcatagtgcgtgctatgctatgttcgcacaatcgctcaaaagaaaataaaagaaaaagacaaagtacaaaagagtaacagctataaagaccacgaagccacttaccacgagcagtagaaaaatgagaacgaatctccccggggagacgattaaataccatgccgcagaggcccacgggatttgggggcggggctacggcgagcgcacgcgcatacgttgaccgcatgcgaccccggggagttgtgggtagagagttccagggaaggagggcgtagacaaagcgccacctgaacttgcggcgcgaaaaaggcgcgcatgcgtcctacgggagcgtgctggctcaccgaccgcattgcggcttggttttctcacccagtgcatgtggcaggagcggtgagatcactgcctcacggcgatcctggactgacggtcacgactgcctaccctctaaccctgttctgagctgccccttgcccacacaccccaaacctgtgtgcaggatccgcctccatggagctacagcctcctgaagcctcgatcgccgtcgtgtcgattccgcgccagttgcctggctcacattcggaggctggtgtccagggtctcagcgcgggggacgactcaggtactggatcccgggctaagctcgggaggaggtcccctttggtggggccatttcgggaaagtatgtcaggacgtaagtgcttcactgaagacaggatctgattttttcctaactggttccctatgtcctgccttctggtgcgttttctttagatcttggactactacgggccaacattagctaacatttatggagcaccgttttaagcacactatatgaatcgattaatccaccaaaatcccaagagctaggtaggatgacaacccccattttattgatggggaaccctaaagagctccggcggtgctgcctgctgcaactcctgcctgatcaatatggttgcagtcagctatagactgttttactgagaccggacaacattagttcagtcgtttgtggtaaacatctacgtgtacaagcacactttataaacatttttttctttctttttttttttttttgagacggagtttcgctcttgttgcccaggctggaatgcaatggcccgatctcagctcactgcattccacctcccgggttcaagcaattctcctgcctcagcctcctgagtagctgggattacaggcatgcgccactgtgaccggctaattttgtatttttagtagagacagggtttctccatgttggtcaggccggtcttgaactcctgacctcgggtgatccgcctgcctcggcctcccaaagtgctgggattacaggcgtgagccaccgcgcccggccaaacatttttttctttcaagacggaggcttgctctgtcgcccaggctggagtgcagtggcgggatgtctgttcactgcaacctccgcttcccaggttcaagcgattctccttcctcagcctcctgagtagctgggattacaggctcccgccatcatcatgccacactaatttttgtgtttttcggagagacggggtttcatcatgttggccaggctgctctcgaactactgacctcaggtgacctcctgcctcagcctcccaaactgctgggattacaggggtgggccaccacacccggcctggctcagcattttgggaggccaaggcgggaggatctcttgagcccaagagttcaagaccagtctaagcaacatagtgagaaacccataccgatctctacaaaaaaaatagaaaaaattagccaggagcggtggtgcatgcctgtagccccagctgcttgggaggctaaggtgggaggattgcttgagcccaggaggttgagactgcaa

SEQ ID NO: 1884693 - DNA, 4001 bp, Homo sapiens
ggggcggtattcaactcatcactggtgagcagcaattcatcactggtggttcaggagatcaaagactttgggttaagccagttatgtctgtgtacattcacccagaccacagtgctatcacacacaaaaatcacagaaaattttatatagcagccattgatggtaactattgcaaagccatttacctcaaactcctcttgggctttagagagaaggtgctggccctgaaaggaggaagaccaagtcagtagtgcttctcatatcccgcattatgttgttcccacccatcattctcagaaaatcagatttcagagtctcaacagcaagtcatcagccgaacgagattccatgtaagtcatcacaaacacaggcctaaaaaggcactttttcctaccctatatactgagtgcattgaataccgtgaaattactcacctttgagccaagcaggttattggttagtagtacctagagaaaaacaaagctgtgggtgaaagattcctcagacatggttaccccccactccctgcgttctccagtttctcaggtgttcatgtattttcactgtcggtcatagtgagctagtttgattcatcatagaaactgcctacttggtggcataagctgtaaggaacaaaaaatatcaactaacctctcagctctgaaggcttttcaatggtatatagcaacaagctgctcctgaatcaaaaaatcattcaattagctaattatcccaaacagccaaaactattttagttacggttgctaatggacaaactaagaaaaggtaaccaaatgtctcagacaattccttatggaataagctctcatgccctcttcatgttaaccctggtgagttcacaattactggttcccaggctaaaacaggggtaaggcaggatgtttcctcctcattggagcagaatcctggaaagctacaactgacaagcattcgtctgaccctgggcagatcagtgggcatctatctgagaaaaaaggggcatatatcagtgggcatctatctagaaacatcactacagagaacaagaggaaccagaaaactttatgggttaagcaggctttggtaacaaatatcaaaatggctaagttatctattagataataggcccatagaattcgaaaaacaacttactgtaagatagaggcagactgtcatcaggaatacctggaaaggaaagcaaattagttattttaaggtattaggatggaatgaagcttattcataaacaacaactgccatcagaactctaacatgctattaacttttgtacctcacagaacatcagcttatcaattcaaatcatctgacagtaacgtgatcgatatatggatgagggtaacagcacacccttacaagaactgtagtaccgggttgcgatctccctccccagaaaatcatttcaagaggaacaagatggaaggcgccaaaaaacattgttccgccggccacttgttttcttgaacatttacaaagatgacatacaccaatttggataattacctgtattcaccctgggaggcagctgaattccccaggatagattatgagatgctgtagacaacagaggaaagcattttatgtacctaaaaatagtcattcaaagaccccttaagacctctctctcacttctcagtagtaagatgacatcacttgaaagttcagccatatgcttgtcattttgtgttcatcatggagtggttatctacaaggtctcctctgtaagagcataaaccatgtacacctacctggaacattactgtaacgctggctttgcataaagatgggtcttgtcccattccttcaccagtaagctcttgtgggctgaacatctgaaaaaataacacccttcactaacacctcagacaaatcaatagggccctgacatttgttgcgtacagtacagtgctactcagaattttctgttttctccactaatccatcagaaagagagagttcagttcgtaaaatcatccccgtagcaacttccacacactcaacgaaagagcagagattaagaaatggccgtaagaacttactgcaacaacagagctctcttcggttccaacgtgcgcgtaaatcctgcagacaggagcccaataagacattaggtcaactcagggcatttcgaaaacgctattttctgaacagacggctaagcaagaggcttgcagggcccatctcctcagagttatttatcctcacggagctcagtacaggtctgtgaaaaggtcctcatcataggaagggggacctacacggcccgccatcgccattttgtccttcacaaagccccactgctacttttaagcctcgaggccacgcacaagaccttatccgccagtcgccctggccaggcagctacaacacagaaggcatagtgcgtgctatgctatgttcgcacaatcgctcaaaagaaaataaaagaaaaagacaaagtacaaaagagtaacagctataaagaccacgaagccacttaccacgagcagtagaaaaatgagaacgaatctccccggggagacgattaaataccatgccgcagaggcccacgggatttgggggcggggctacggcgagcgcacgcgcatacgttgaccgcatgcgaccccggggagttgtgggtagagagttccagggaaggagggcgtagacaaagcgccacctgaacttgcggcgcgaaaaaggcgcgcatgcgtcctacgggagcgtgctggctcaccgaccgcattgcggcttggttttctcacccagtgcatgtggcaggagcggtgagatcactgcctcacggcgatcctggactgacggtcacgactgcctaccctctaaccctgttctgagctgccccttgcccacacaccccaaacctgtgtgcaggatccgcctccatggagctacagcctcctgaagcctcgatcgccgtcgtgtcgattccgcgccagttgcctggctcacattcggaggctggtgtccagggtctcagcgcgggggacgactcaggtactggatcccgggctaagctcgggaggaggtcccctttggtggggccatttcgggaaagtatgtcaggacgtaagtgcttcactgaagacaggatctgattttttcctaactggttccctatgtcctgccttctggtgcgttttctttagatcttggactactacgggccaacattagctaacatttatggagcaccgttttaagcacactatatgaatcgattaatccaccaaaatcccaagagctaggtaggatgacaacccccattttattgatggggaaccctaaagagctccggcggtgctgcctgctgcaactcctgcctgatcaatatggttgcagtcagctatagactgttttactgagaccggacaacattagttcagtcgtttgtggtaaacatctacgtgtacaagcacactttataaacatttttttctttctttttttttttttttgagacggagtttcgctcttgttgcccaggctggaatgcaatggcccgatctcagctcactgcattccacctcccgggttcaagcaattctcctgcctcagcctcctgagtagctgggattacaggcatgcgccactgtgaccggctaattttgtatttttagtagagacagggtttctccatgttggtcaggccggtcttgaactcctgacctcgggtgatccgcctgcctcggcctcccaaagtgctgggattacaggcgtgagccaccgcgcccggccaaacatttttttctttcaagacggaggcttgctctgtcgcccaggctggagtgcagtggcgggatgtctgttcactgcaacctccgcttcccaggttcaagcgattctccttcctcagcctcctgagtagctgggattacaggctcccgccatcatcatgccacactaatttttgtgtttttcggagagacggggtttcatcatgttggccaggctgctctcgaactactgacctcaggtgacct

SEQ ID NO: 1884694 - DNA, 4001 bp, Homo sapiens
cagcctggagtgaacacagacacctagttttcctgcaaaatcaagaaagaaaaatgtagtcttgagagactttcattctatgtcacattttacaatctctcaattgtatctattgcttggcagaaagaagtttcagggcacattttataggaaacactacttagcccaagaacttcctattggctgtaaagcctcctcaaataacttgcaatttttagaacatgtcactggaaggcaggctcacagctcagaaaatacctttcagtcacacattgatcagactggggcggtattcaactcatcactggtgagcagcaattcatcactggtggttcaggagatcaaagactttgggttaagccagttatgtctgtgtacattcacccagaccacagtgctatcacacacaaaaatcacagaaaattttatatagcagccattgatggtaactattgcaaagccatttacctcaaactcctcttgggctttagagagaaggtgctggccctgaaaggaggaagaccaagtcagtagtgcttctcatatcccgcattatgttgttcccacccatcattctcagaaaatcagatttcagagtctcaacagcaagtcatcagccgaacgagattccatgtaagtcatcacaaacacaggcctaaaaaggcactttttcctaccctatatactgagtgcattgaataccgtgaaattactcacctttgagccaagcaggttattggttagtagtacctagagaaaaacaaagctgtgggtgaaagattcctcagacatggttaccccccactccctgcgttctccagtttctcaggtgttcatgtattttcactgtcggtcatagtgagctagtttgattcatcatagaaactgcctacttggtggcataagctgtaaggaacaaaaaatatcaactaacctctcagctctgaaggcttttcaatggtatatagcaacaagctgctcctgaatcaaaaaatcattcaattagctaattatcccaaacagccaaaactattttagttacggttgctaatggacaaactaagaaaaggtaaccaaatgtctcagacaattccttatggaataagctctcatgccctcttcatgttaaccctggtgagttcacaattactggttcccaggctaaaacaggggtaaggcaggatgtttcctcctcattggagcagaatcctggaaagctacaactgacaagcattcgtctgaccctgggcagatcagtgggcatctatctgagaaaaaaggggcatatatcagtgggcatctatctagaaacatcactacagagaacaagaggaaccagaaaactttatgggttaagcaggctttggtaacaaatatcaaaatggctaagttatctattagataataggcccatagaattcgaaaaacaacttactgtaagatagaggcagactgtcatcaggaatacctggaaaggaaagcaaattagttattttaaggtattaggatggaatgaagcttattcataaacaacaactgccatcagaactctaacatgctattaacttttgtacctcacagaacatcagcttatcaattcaaatcatctgacagtaacgtgatcgatatatggatgagggtaacagcacacccttacaagaactgtagtaccgggttgcgatctccctccccagaaaatcatttcaagaggaacaagatggaaggcgccaaaaaacattgttccgccggccacttgttttcttgaacatttacaaagatgacatacaccaatttggataattacctgtattcaccctgggaggcagctgaattccccaggatagattatgagatgctgtagacaacagaggaaagcattttatgtacctaaaaatagtcattcaaagaccccttaagacctctctctcacttctcagtagtaagatgacatcacttgaaagttcagccatatgcttgtcattttgtgttcatcatggagtggttatctacaaggtctcctctgtaagagcataaaccatgtacacctacctggaacattactgtaacgctggctttgcataaagatgggtcttgtcccattccttcaccagtaagctcttgtgggctgaacatctgaaaaaataacacccttcactaacacctcagacaaatcaatagggccctgacatttgttgcgtacagtacagtgctactcagaattttctgttttctccactaatccatcagaaagagagagttcagttcgtaaaatcatccccgtagcaacttccacacactcaacgaaagagcagagattaagaaatggccgtaagaacttactgcaacaacagagctctcttcggttccaacgtgcgcgtaaatcctgcagacaggagcccaataagacattaggtcaactcagggcatttcgaaaacgctattttctgaacagacggctaagcaagaggcttgcagggcccatctcctcagagttatttatcctcacggagctcagtacaggtctgtgaaaaggtcctcatcataggaagggggacctacacggcccgccatcgccattttgtccttcacaaagccccactgctacttttaagcctcgaggccacgcacaagaccttatccgccagtcgccctggccaggcagctacaacacagaaggcatagtgcgtgctatgctatgttcgcacaatcgctcaaaagaaaataaaagaaaaagacaaagtacaaaagagtaacagctataaagaccacgaagccacttaccacgagcagtagaaaaatgagaacgaatctccccggggagacgattaaataccatgccgcagaggcccacgggatttgggggcggggctacggcgagcgcacgcgcatacgttgaccgcatgcgaccccggggagttgtgggtagagagttccagggaaggagggcgtagacaaagcgccacctgaacttgcggcgcgaaaaaggcgcgcatgcgtcctacgggagcgtgctggctcaccgaccgcattgcggcttggttttctcacccagtgcatgtggcaggagcggtgagatcactgcctcacggcgatcctggactgacggtcacgactgcctaccctctaaccctgttctgagctgccccttgcccacacaccccaaacctgtgtgcaggatccgcctccatggagctacagcctcctgaagcctcgatcgccgtcgtgtcgattccgcgccagttgcctggctcacattcggaggctggtgtccagggtctcagcgcgggggacgactcaggtactggatcccgggctaagctcgggaggaggtcccctttggtggggccatttcgggaaagtatgtcaggacgtaagtgcttcactgaagacaggatctgattttttcctaactggttccctatgtcctgccttctggtgcgttttctttagatcttggactactacgggccaacattagctaacatttatggagcaccgttttaagcacactatatgaatcgattaatccaccaaaatcccaagagctaggtaggatgacaacccccattttattgatggggaaccctaaagagctccggcggtgctgcctgctgcaactcctgcctgatcaatatggttgcagtcagctatagactgttttactgagaccggacaacattagttcagtcgtttgtggtaaacatctacgtgtacaagcacactttataaacatttttttctttctttttttttttttttgagacggagtttcgctcttgttgcccaggctggaatgcaatggcccgatctcagctcactgcattccacctcccgggttcaagcaattctcctgcctcagcctcctgagtagctgggattacaggcatgcgccactgtgaccggctaattttgtatttttagtagagacagggtttctccatgttggtcaggccggtcttgaactcctgacctcgggtgatccgcctgcctcggcctcccaa

SEQ ID NO: 1884695 - DNA, 4001 bp, Homo sapiens
aaaaaagttcttattggattggaaaatacaaatgaacacaatatttaacactatgtaacctaggagcaaaaggttgctattataaaatcagttaaatatttaaacagatacctaccattttttatacaccttatttgctcagacctggaaaaaataaaaccaatgttttcaacaagtgatgattactccctttctctgtatagaaatctttatcatccctcagacagttccttctggaacaaatcttcctcttctcccccagccagtcccagtgggttcacctttacaggctctgggactaggacagagagtaagacatgtgaaagtttcttcattgggaatttttagcatagtccaccttacatttaggtttactcacctgtaacttcagcctggagtgaacacagacacctagttttcctgcaaaatcaagaaagaaaaatgtagtcttgagagactttcattctatgtcacattttacaatctctcaattgtatctattgcttggcagaaagaagtttcagggcacattttataggaaacactacttagcccaagaacttcctattggctgtaaagcctcctcaaataacttgcaatttttagaacatgtcactggaaggcaggctcacagctcagaaaatacctttcagtcacacattgatcagactggggcggtattcaactcatcactggtgagcagcaattcatcactggtggttcaggagatcaaagactttgggttaagccagttatgtctgtgtacattcacccagaccacagtgctatcacacacaaaaatcacagaaaattttatatagcagccattgatggtaactattgcaaagccatttacctcaaactcctcttgggctttagagagaaggtgctggccctgaaaggaggaagaccaagtcagtagtgcttctcatatcccgcattatgttgttcccacccatcattctcagaaaatcagatttcagagtctcaacagcaagtcatcagccgaacgagattccatgtaagtcatcacaaacacaggcctaaaaaggcactttttcctaccctatatactgagtgcattgaataccgtgaaattactcacctttgagccaagcaggttattggttagtagtacctagagaaaaacaaagctgtgggtgaaagattcctcagacatggttaccccccactccctgcgttctccagtttctcaggtgttcatgtattttcactgtcggtcatagtgagctagtttgattcatcatagaaactgcctacttggtggcataagctgtaaggaacaaaaaatatcaactaacctctcagctctgaaggcttttcaatggtatatagcaacaagctgctcctgaatcaaaaaatcattcaattagctaattatcccaaacagccaaaactattttagttacggttgctaatggacaaactaagaaaaggtaaccaaatgtctcagacaattccttatggaataagctctcatgccctcttcatgttaaccctggtgagttcacaattactggttcccaggctaaaacaggggtaaggcaggatgtttcctcctcattggagcagaatcctggaaagctacaactgacaagcattcgtctgaccctgggcagatcagtgggcatctatctgagaaaaaaggggcatatatcagtgggcatctatctagaaacatcactacagagaacaagaggaaccagaaaactttatgggttaagcaggctttggtaacaaatatcaaaatggctaagttatctattagataataggcccatagaattcgaaaaacaacttactgtaagatagaggcagactgtcatcaggaatacctggaaaggaaagcaaattagttattttaaggtattaggatggaatgaagcttattcataaacaacaactgccatcagaactctaacatgctattaacttttgtacctcacagaacatcagcttatcaattcaaatcatctgacagtaacgtgatcgatatatggatgagggtaacagcacacccttacaagaactgtagtaccgggttgcgatctccctccccagaaaatcatttcaagaggaacaagatggaaggcgccaaaaaacattgttccgccggccacttgttttcttgaacatttacaaagatgacatacaccaatttggataattacctgtattcaccctgggaggcagctgaattccccaggatagattatgagatgctgtagacaacagaggaaagcattttatgtacctaaaaatagtcattcaaagaccccttaagacctctctctcacttctcagtagtaagatgacatcacttgaaagttcagccatatgcttgtcattttgtgttcatcatggagtggttatctacaaggtctcctctgtaagagcataaaccatgtacacctacctggaacattactgtaacgctggctttgcataaagatgggtcttgtcccattccttcaccagtaagctcttgtgggctgaacatctgaaaaaataacacccttcactaacacctcagacaaatcaatagggccctgacatttgttgcgtacagtacagtgctactcagaattttctgttttctccactaatccatcagaaagagagagttcagttcgtaaaatcatccccgtagcaacttccacacactcaacgaaagagcagagattaagaaatggccgtaagaacttactgcaacaacagagctctcttcggttccaacgtgcgcgtaaatcctgcagacaggagcccaataagacattaggtcaactcagggcatttcgaaaacgctattttctgaacagacggctaagcaagaggcttgcagggcccatctcctcagagttatttatcctcacggagctcagtacaggtctgtgaaaaggtcctcatcataggaagggggacctacacggcccgccatcgccattttgtccttcacaaagccccactgctacttttaagcctcgaggccacgcacaagaccttatccgccagtcgccctggccaggcagctacaacacagaaggcatagtgcgtgctatgctatgttcgcacaatcgctcaaaagaaaataaaagaaaaagacaaagtacaaaagagtaacagctataaagaccacgaagccacttaccacgagcagtagaaaaatgagaacgaatctccccggggagacgattaaataccatgccgcagaggcccacgggatttgggggcggggctacggcgagcgcacgcgcatacgttgaccgcatgcgaccccggggagttgtgggtagagagttccagggaaggagggcgtagacaaagcgccacctgaacttgcggcgcgaaaaaggcgcgcatgcgtcctacgggagcgtgctggctcaccgaccgcattgcggcttggttttctcacccagtgcatgtggcaggagcggtgagatcactgcctcacggcgatcctggactgacggtcacgactgcctaccctctaaccctgttctgagctgccccttgcccacacaccccaaacctgtgtgcaggatccgcctccatggagctacagcctcctgaagcctcgatcgccgtcgtgtcgattccgcgccagttgcctggctcacattcggaggctggtgtccagggtctcagcgcgggggacgactcaggtactggatcccgggctaagctcgggaggaggtcccctttggtggggccatttcgggaaagtatgtcaggacgtaagtgcttcactgaagacaggatctgattttttcctaactggttccctatgtcctgccttctggtgcgttttctttagatcttggactactacgggccaacattagctaacatttatggagcaccgttttaagcacactatatgaatcgattaatccaccaaaatcccaagagctaggtaggatgacaacccccattttattgatggggaaccctaaagagctccggcggtgctgcctgct

SEQ ID NO: 1884696 - DNA, 4001 bp, Homo sapiens
caaaaaaagtaaacaggactatgtaatcaatcattttattattttcatcaacaaccaacacagcaacacaaattgacagccagtcctcaagggaaccttttttgaagtgaagagcaaggccctgaatgagctacctacatggaacatagtatttgcaatatgcaaatggagacctaaaggctcatgacgggaacagaaggtggctgtatacagaggaacagacacgaagtggagttatgggaagttcaatcaacaattggcaacaagctaggtcagtagtttacgaaagtggtcatctatacagtgcctgagtttgggttctgggcctggatcatgtaagaaaggcagcaaagtctgggtgccatgaatcacacctgcaatcccagcactttggaaatctgtggtgagaggatctcttaaagctatggccttgaaaccagcctgggtaacaaaaccaagcccttgtatctaaaaaacaaaagggcaggtagattccagataaataatgttgcaggaagggggtgataaaatacagaaatgtgatacacagcaaaccctcaactgctgtttcattggctcccagtgtcttaatctgtgtctgctaacactttaaggtacatctgaaataccccccaaacccagaaagcttttcaacagctaggttgtccaagaacttggaaaattcaccttctgatgtcctccaagacagattcctgcagaggtaaaaaaaaaagttcttattggattggaaaatacaaatgaacacaatatttaacactatgtaacctaggagcaaaaggttgctattataaaatcagttaaatatttaaacagatacctaccattttttatacaccttatttgctcagacctggaaaaaataaaaccaatgttttcaacaagtgatgattactccctttctctgtatagaaatctttatcatccctcagacagttccttctggaacaaatcttcctcttctcccccagccagtcccagtgggttcacctttacaggctctgggactaggacagagagtaagacatgtgaaagtttcttcattgggaatttttagcatagtccaccttacatttaggtttactcacctgtaacttcagcctggagtgaacacagacacctagttttcctgcaaaatcaagaaagaaaaatgtagtcttgagagactttcattctatgtcacattttacaatctctcaattgtatctattgcttggcagaaagaagtttcagggcacattttataggaaacactacttagcccaagaacttcctattggctgtaaagcctcctcaaataacttgcaatttttagaacatgtcactggaaggcaggctcacagctcagaaaatacctttcagtcacacattgatcagactggggcggtattcaactcatcactggtgagcagcaattcatcactggtggttcaggagatcaaagactttgggttaagccagttatgtctgtgtacattcacccagaccacagtgctatcacacacaaaaatcacagaaaattttatatagcagccattgatggtaactattgcaaagccatttacctcaaactcctcttgggctttagagagaaggtgctggccctgaaaggaggaagaccaagtcagtagtgcttctcatatcccgcattatgttgttcccacccatcattctcagaaaatcagatttcagagtctcaacagcaagtcatcagccgaacgagattccatgtaagtcatcacaaacacaggcctaaaaaggcactttttcctaccctatatactgagtgcattgaataccgtgaaattactcacctttgagccaagcaggttattggttagtagtacctagagaaaaacaaagctgtgggtgaaagattcctcagacatggttaccccccactccctgcgttctccagtttctcaggtgttcatgtattttcactgtcggtcatagtgagctagtttgattcatcatagaaactgcctacttggtggcataagctgtaaggaacaaaaaatatcaactaacctctcagctctgaaggcttttcaatggtatatagcaacaagctgctcctgaatcaaaaaatcattcaattagctaattatcccaaacagccaaaactattttagttacggttgctaatggacaaactaagaaaaggtaaccaaatgtctcagacaattccttatggaataagctctcatgccctcttcatgttaaccctggtgagttcacaattactggttcccaggctaaaacaggggtaaggcaggatgtttcctcctcattggagcagaatcctggaaagctacaactgacaagcattcgtctgaccctgggcagatcagtgggcatctatctgagaaaaaaggggcatatatcagtgggcatctatctagaaacatcactacagagaacaagaggaaccagaaaactttatgggttaagcaggctttggtaacaaatatcaaaatggctaagttatctattagataataggcccatagaattcgaaaaacaacttactgtaagatagaggcagactgtcatcaggaatacctggaaaggaaagcaaattagttattttaaggtattaggatggaatgaagcttattcataaacaacaactgccatcagaactctaacatgctattaacttttgtacctcacagaacatcagcttatcaattcaaatcatctgacagtaacgtgatcgatatatggatgagggtaacagcacacccttacaagaactgtagtaccgggttgcgatctccctccccagaaaatcatttcaagaggaacaagatggaaggcgccaaaaaacattgttccgccggccacttgttttcttgaacatttacaaagatgacatacaccaatttggataattacctgtattcaccctgggaggcagctgaattccccaggatagattatgagatgctgtagacaacagaggaaagcattttatgtacctaaaaatagtcattcaaagaccccttaagacctctctctcacttctcagtagtaagatgacatcacttgaaagttcagccatatgcttgtcattttgtgttcatcatggagtggttatctacaaggtctcctctgtaagagcataaaccatgtacacctacctggaacattactgtaacgctggctttgcataaagatgggtcttgtcccattccttcaccagtaagctcttgtgggctgaacatctgaaaaaataacacccttcactaacacctcagacaaatcaatagggccctgacatttgttgcgtacagtacagtgctactcagaattttctgttttctccactaatccatcagaaagagagagttcagttcgtaaaatcatccccgtagcaacttccacacactcaacgaaagagcagagattaagaaatggccgtaagaacttactgcaacaacagagctctcttcggttccaacgtgcgcgtaaatcctgcagacaggagcccaataagacattaggtcaactcagggcatttcgaaaacgctattttctgaacagacggctaagcaagaggcttgcagggcccatctcctcagagttatttatcctcacggagctcagtacaggtctgtgaaaaggtcctcatcataggaagggggacctacacggcccgccatcgccattttgtccttcacaaagccccactgctacttttaagcctcgaggccacgcacaagaccttatccgccagtcgccctggccaggcagctacaacacagaaggcatagtgcgtgctatgctatgttcgcacaatcgctcaaaagaaaataaaagaaaaagacaaagtacaaaagagtaacagctataaagaccacgaagccacttaccacgagcagtagaaaaatgagaacgaatctccccggggagacgattaaataccatgccgcagaggcccacgggatttgggggcggggctacggcgagcgcacgcg

SEQ ID NO: 1884697 - DNA, 4001 bp, Homo sapiens
tgcttaagcccaaaagcttgaagctgcagtgaggttgtgatcatgtcactgtactctaagactaggcaagagaaaaaaaaaaaagatggatgttctactcaggttactcatttaacacactgcctatcaggcaaactgtcagatgtcccttcaagttccaggtacttcagggagcatgagaggaaagccagtttcccatggaaatttacacactgatgctaagagacacatacacacaaaaaaagtaaacaggactatgtaatcaatcattttattattttcatcaacaaccaacacagcaacacaaattgacagccagtcctcaagggaaccttttttgaagtgaagagcaaggccctgaatgagctacctacatggaacatagtatttgcaatatgcaaatggagacctaaaggctcatgacgggaacagaaggtggctgtatacagaggaacagacacgaagtggagttatgggaagttcaatcaacaattggcaacaagctaggtcagtagtttacgaaagtggtcatctatacagtgcctgagtttgggttctgggcctggatcatgtaagaaaggcagcaaagtctgggtgccatgaatcacacctgcaatcccagcactttggaaatctgtggtgagaggatctcttaaagctatggccttgaaaccagcctgggtaacaaaaccaagcccttgtatctaaaaaacaaaagggcaggtagattccagataaataatgttgcaggaagggggtgataaaatacagaaatgtgatacacagcaaaccctcaactgctgtttcattggctcccagtgtcttaatctgtgtctgctaacactttaaggtacatctgaaataccccccaaacccagaaagcttttcaacagctaggttgtccaagaacttggaaaattcaccttctgatgtcctccaagacagattcctgcagaggtaaaaaaaaaagttcttattggattggaaaatacaaatgaacacaatatttaacactatgtaacctaggagcaaaaggttgctattataaaatcagttaaatatttaaacagatacctaccattttttatacaccttatttgctcagacctggaaaaaataaaaccaatgttttcaacaagtgatgattactccctttctctgtatagaaatctttatcatccctcagacagttccttctggaacaaatcttcctcttctcccccagccagtcccagtgggttcacctttacaggctctgggactaggacagagagtaagacatgtgaaagtttcttcattgggaatttttagcatagtccaccttacatttaggtttactcacctgtaacttcagcctggagtgaacacagacacctagttttcctgcaaaatcaagaaagaaaaatgtagtcttgagagactttcattctatgtcacattttacaatctctcaattgtatctattgcttggcagaaagaagtttcagggcacattttataggaaacactacttagcccaagaacttcctattggctgtaaagcctcctcaaataacttgcaatttttagaacatgtcactggaaggcaggctcacagctcagaaaatacctttcagtcacacattgatcagactggggcggtattcaactcatcactggtgagcagcaattcatcactggtggttcaggagatcaaagactttgggttaagccagttatgtctgtgtacattcacccagaccacagtgctatcacacacaaaaatcacagaaaattttatatagcagccattgatggtaactattgcaaagccatttacctcaaactcctcttgggctttagagagaaggtgctggccctgaaaggaggaagaccaagtcagtagtgcttctcatatcccgcattatgttgttcccacccatcattctcagaaaatcagatttcagagtctcaacagcaagtcatcagccgaacgagattccatgtaagtcatcacaaacacaggcctaaaaaggcactttttcctaccctatatactgagtgcattgaataccgtgaaattactcacctttgagccaagcaggttattggttagtagtacctagagaaaaacaaagctgtgggtgaaagattcctcagacatggttaccccccactccctgcgttctccagtttctcaggtgttcatgtattttcactgtcggtcatagtgagctagtttgattcatcatagaaactgcctacttggtggcataagctgtaaggaacaaaaaatatcaactaacctctcagctctgaaggcttttcaatggtatatagcaacaagctgctcctgaatcaaaaaatcattcaattagctaattatcccaaacagccaaaactattttagttacggttgctaatggacaaactaagaaaaggtaaccaaatgtctcagacaattccttatggaataagctctcatgccctcttcatgttaaccctggtgagttcacaattactggttcccaggctaaaacaggggtaaggcaggatgtttcctcctcattggagcagaatcctggaaagctacaactgacaagcattcgtctgaccctgggcagatcagtgggcatctatctgagaaaaaaggggcatatatcagtgggcatctatctagaaacatcactacagagaacaagaggaaccagaaaactttatgggttaagcaggctttggtaacaaatatcaaaatggctaagttatctattagataataggcccatagaattcgaaaaacaacttactgtaagatagaggcagactgtcatcaggaatacctggaaaggaaagcaaattagttattttaaggtattaggatggaatgaagcttattcataaacaacaactgccatcagaactctaacatgctattaacttttgtacctcacagaacatcagcttatcaattcaaatcatctgacagtaacgtgatcgatatatggatgagggtaacagcacacccttacaagaactgtagtaccgggttgcgatctccctccccagaaaatcatttcaagaggaacaagatggaaggcgccaaaaaacattgttccgccggccacttgttttcttgaacatttacaaagatgacatacaccaatttggataattacctgtattcaccctgggaggcagctgaattccccaggatagattatgagatgctgtagacaacagaggaaagcattttatgtacctaaaaatagtcattcaaagaccccttaagacctctctctcacttctcagtagtaagatgacatcacttgaaagttcagccatatgcttgtcattttgtgttcatcatggagtggttatctacaaggtctcctctgtaagagcataaaccatgtacacctacctggaacattactgtaacgctggctttgcataaagatgggtcttgtcccattccttcaccagtaagctcttgtgggctgaacatctgaaaaaataacacccttcactaacacctcagacaaatcaatagggccctgacatttgttgcgtacagtacagtgctactcagaattttctgttttctccactaatccatcagaaagagagagttcagttcgtaaaatcatccccgtagcaacttccacacactcaacgaaagagcagagattaagaaatggccgtaagaacttactgcaacaacagagctctcttcggttccaacgtgcgcgtaaatcctgcagacaggagcccaataagacattaggtcaactcagggcatttcgaaaacgctattttctgaacagacggctaagcaagaggcttgcagggcccatctcctcagagttatttatcctcacggagctcagtacaggtctgtgaaaaggtcctcatcataggaagggggacctacacggcccgccatcgccattttgtccttcacaaagccccactgctacttttaagcctcgaggccacgcacaagaccttatccgccagtcgcc

SEQ ID NO: 1884698 - DNA, 4001 bp, Homo sapiens
gacaagaacgagattccacctcagaaaaaaaaaaaaggcacaggtttgggaggcaggcagatcacttgaggtcaggactaagcctggtcaacatagtgaaacctctactaaaatcccaataactaggcttgcttcgtgacaggtatctgcaatcccagctactcggggctgaggcaggacaatcactcaatccaggtggaggctgcagggaggcgagatggcactactgcactccagcttgactccattgtcccttgcttcccccaggaaaaaacagatttgggctgggtgtggtgtctgtagtcccagccccagctgctggttaaagtcaagtaggtttgcttaagcccaaaagcttgaagctgcagtgaggttgtgatcatgtcactgtactctaagactaggcaagagaaaaaaaaaaaagatggatgttctactcaggttactcatttaacacactgcctatcaggcaaactgtcagatgtcccttcaagttccaggtacttcagggagcatgagaggaaagccagtttcccatggaaatttacacactgatgctaagagacacatacacacaaaaaaagtaaacaggactatgtaatcaatcattttattattttcatcaacaaccaacacagcaacacaaattgacagccagtcctcaagggaaccttttttgaagtgaagagcaaggccctgaatgagctacctacatggaacatagtatttgcaatatgcaaatggagacctaaaggctcatgacgggaacagaaggtggctgtatacagaggaacagacacgaagtggagttatgggaagttcaatcaacaattggcaacaagctaggtcagtagtttacgaaagtggtcatctatacagtgcctgagtttgggttctgggcctggatcatgtaagaaaggcagcaaagtctgggtgccatgaatcacacctgcaatcccagcactttggaaatctgtggtgagaggatctcttaaagctatggccttgaaaccagcctgggtaacaaaaccaagcccttgtatctaaaaaacaaaagggcaggtagattccagataaataatgttgcaggaagggggtgataaaatacagaaatgtgatacacagcaaaccctcaactgctgtttcattggctcccagtgtcttaatctgtgtctgctaacactttaaggtacatctgaaataccccccaaacccagaaagcttttcaacagctaggttgtccaagaacttggaaaattcaccttctgatgtcctccaagacagattcctgcagaggtaaaaaaaaaagttcttattggattggaaaatacaaatgaacacaatatttaacactatgtaacctaggagcaaaaggttgctattataaaatcagttaaatatttaaacagatacctaccattttttatacaccttatttgctcagacctggaaaaaataaaaccaatgttttcaacaagtgatgattactccctttctctgtatagaaatctttatcatccctcagacagttccttctggaacaaatcttcctcttctcccccagccagtcccagtgggttcacctttacaggctctgggactaggacagagagtaagacatgtgaaagtttcttcattgggaatttttagcatagtccaccttacatttaggtttactcacctgtaacttcagcctggagtgaacacagacacctagttttcctgcaaaatcaagaaagaaaaatgtagtcttgagagactttcattctatgtcacattttacaatctctcaattgtatctattgcttggcagaaagaagtttcagggcacattttataggaaacactacttagcccaagaacttcctattggctgtaaagcctcctcaaataacttgcaatttttagaacatgtcactggaaggcaggctcacagctcagaaaatacctttcagtcacacattgatcagactggggcggtattcaactcatcactggtgagcagcaattcatcactggtggttcaggagatcaaagactttgggttaagccagttatgtctgtgtacattcacccagaccacagtgctatcacacacaaaaatcacagaaaattttatatagcagccattgatggtaactattgcaaagccatttacctcaaactcctcttgggctttagagagaaggtgctggccctgaaaggaggaagaccaagtcagtagtgcttctcatatcccgcattatgttgttcccacccatcattctcagaaaatcagatttcagagtctcaacagcaagtcatcagccgaacgagattccatgtaagtcatcacaaacacaggcctaaaaaggcactttttcctaccctatatactgagtgcattgaataccgtgaaattactcacctttgagccaagcaggttattggttagtagtacctagagaaaaacaaagctgtgggtgaaagattcctcagacatggttaccccccactccctgcgttctccagtttctcaggtgttcatgtattttcactgtcggtcatagtgagctagtttgattcatcatagaaactgcctacttggtggcataagctgtaaggaacaaaaaatatcaactaacctctcagctctgaaggcttttcaatggtatatagcaacaagctgctcctgaatcaaaaaatcattcaattagctaattatcccaaacagccaaaactattttagttacggttgctaatggacaaactaagaaaaggtaaccaaatgtctcagacaattccttatggaataagctctcatgccctcttcatgttaaccctggtgagttcacaattactggttcccaggctaaaacaggggtaaggcaggatgtttcctcctcattggagcagaatcctggaaagctacaactgacaagcattcgtctgaccctgggcagatcagtgggcatctatctgagaaaaaaggggcatatatcagtgggcatctatctagaaacatcactacagagaacaagaggaaccagaaaactttatgggttaagcaggctttggtaacaaatatcaaaatggctaagttatctattagataataggcccatagaattcgaaaaacaacttactgtaagatagaggcagactgtcatcaggaatacctggaaaggaaagcaaattagttattttaaggtattaggatggaatgaagcttattcataaacaacaactgccatcagaactctaacatgctattaacttttgtacctcacagaacatcagcttatcaattcaaatcatctgacagtaacgtgatcgatatatggatgagggtaacagcacacccttacaagaactgtagtaccgggttgcgatctccctccccagaaaatcatttcaagaggaacaagatggaaggcgccaaaaaacattgttccgccggccacttgttttcttgaacatttacaaagatgacatacaccaatttggataattacctgtattcaccctgggaggcagctgaattccccaggatagattatgagatgctgtagacaacagaggaaagcattttatgtacctaaaaatagtcattcaaagaccccttaagacctctctctcacttctcagtagtaagatgacatcacttgaaagttcagccatatgcttgtcattttgtgttcatcatggagtggttatctacaaggtctcctctgtaagagcataaaccatgtacacctacctggaacattactgtaacgctggctttgcataaagatgggtcttgtcccattccttcaccagtaagctcttgtgggctgaacatctgaaaaaataacacccttcactaacacctcagacaaatcaatagggccctgacatttgttgcgtacagtacagtgctactcagaattttctgttttctccactaatccatcagaaagagagagttcagttcgtaaaatcatccccgtagcaacttccacacactcaacgaaagagca

SEQ ID NO: 1884699 - DNA, 4001 bp, Homo sapiens
aagtatcctgaaacccggcaccccaagtaaggtattgaaaattctatgcttaaaatagctatttaaactaataggtatttttaaaaatcaatgatcccatgcccattcatatccgaatttgctctatgatcatgtttctggtaacttttacctttgagcttttataatcttctgaaatacaatgcaatatttaatgtaaatggatgttcagaaaggccattttcattcagccccttcagagcagttgaacatttcgcccatcatcataacatcgttaataatgaagtttaaacacataataacgtaagcctagtccttttttttactcctaagtggtgatagatgttgcaatagcattgctagataaataaataacctaaaataacatttggagaaaagctagtattcaacaaaataacctgcatggccttttaagtaatgaattaacttaccaagaatctttgggatctaatttcttcaaccaatttactttagggtcctagaagttgaattgtacaaagtacagttacattttgacacctgatccaagacacagtaatgtataccacattacaatgtttcagtcaatatacagcacataaaaaaagtggtcctataagagctgaaaattccttattaaatgttatttctaatattgaaaagtcaacatttttctcctacatttttactcataaacatagcaaaatgttacaggtctcattgtcaccactgcaatatgcatactgtgatggaagcataacctgtctcaatttagccacattaactatttttggacaccatgatcaacagtgcccattctctagaatgaggcattgtaaaagtctttaaagcttagtagtgtatttgtacgaagttcttgttatgctggcagtgctactgatagagggaaacaagcagaatcaatagaaacagagaatcttacctttttactgtaggtggtggggatctacctggttctcaatttgacaccctggaaaaaaaagcattgcttactattttagagtatatcaaactgaacactctgagaaacctacacaaatactgtatcagtagaaataccaggtttaacaagcacaaagccaagaaaaccaacgatgccagatactgaatttctatagcactgacctttgaacaccctagcaggtgtaaactgctgagtgcagataccatgcagtgcaattatgactgaactgtacaactcgtattcccaaatttgcaatattgctgagaaatgctttcacaaacctctcaaattcctttaacaagtacaataatttgagcttttttcctaattgtcactgtaataaggaagctacattaactacattttaagctacaactctagtctttgcctaatctttgcccagtctctctataaaacttaaagatggaatatatacatgtaacttaacagatcagacaacaaacgtcaagctcattgttgctcaaactgccagttacacaaaattctttttatgtaattcatatccctattgattcaacatatccacacaggtttacgtgactttaggatgaaatatgtgtaactgccagttgaataatgatgcaaagaacacaggtagtttcgtttggtaggtatagacatgcagtctcttcattttccttctctatacaaatatatacattgtaatatttttgccagtatcttactaattctgtgttatacctgaaatactgggatggtgtaatttctatttttcatcttttgagtccttgattattataagttaaatattttacttacctctcaacatgaatgagttcaaatcacattcattcctatagaaagtaccaattaaagatttagaaaggatacatttccagttattaaaactaaaacccaagtataaatttaagatccagtttattatacagccatatccagctctgtcagaattaagttttagttcatgcccgttatcattcagcagttgaacagttaaattcatcatctgaactgtaatcattatttcccaaaagattatactgtcaccaattaaaacttacctaagcgatcactcaagaatggtacagatgtgtggagtatgccaatacctaaggtaaaaaagtagattatctggtttttcataacgtttagcaaccgtctttttcaaacttttagcaactgtcttgtaattccttcccacagatctaacaatagtcctgtgagtaaagtaaaaccacagagttactctatgaggcgtttccaacgatgtgcaggctacaggaaaagccccatcgggatagacctcaaccactatttacaaggttttgatttttttttaaagacacaggatctgccatgtcttttaaaaatcgtgtgattcttgctgaatcacttgagcccaggggttcgaggctacagtgagatgtggcaggatcacatctcactgtagcctcaaaccgctgggctcaagtgtttctcctgccttagcctccagagtagctggggaccacaggcaccactgtgtccagctagtatttatacacataaataacaaagtctaacactccataggaaagaaattatgagcagaaactgcaatatgctcttacaatattgccaactgcagaaacttcctactacgttaatcacaaaaacaataatttcacaatcacgttgtgcttaggagccagaggaatgataaataaaaagtaacatcaagtagctcctttacatgaaccaaaggaaaaagatttaaacttaagatttaagtttaaagtctaactgttgttatgaacttcagtattgcaacagaggatgttgttttcccaattcgaagatttcagcaaattttaattcttggctcaaaattaattgtcatccattataaaatacaggaatataatgtgcctgtaagttacgactttggcattatataacttttaatcaaactctacatcattcaaatttatgaattcttatgacctgtgtaatcatcttttattatactatattttgcattaaaccataaaatcctctgcctcattttagattgtgcattaattcaaaataatgctgtaggcttcaagtaggaaatccaaagttctgattattgctacaaactaacaaattcaggaccctctaatgcttgcaactaaaatgaatctgacacatcactataaaatgtgtgaatctaggattcttcttttcagaaatcagtataaatgggaattaaaagcatggtagaaatgtccctgaataaaatgaaacttgctctgacaacatactgtttcctacacataaacaaatatgatgtgaaaactcaaattgagacatacctttaactccagacaccatgttctcaagataaaagcctttaaaacaaaaagccattgtgtatatcatcaacatgaaattggaatgcaaaattaatactgctgaggatttccctcatatcccatgctgtttatctattctacaggcctggaatcaacctttttttcttaagagacagggtctgtctttgttactcaggctggagtacagtggtgccatcaaagctcagtgcagcctccaactctgcctcagcctcccccctttctgagtaactccaactacaggcacatgccccagtacccagctaatttttaaatttttgtggagatgtgtttcttactttcttgcctaggctggtcttgaactcctggtttcaagcaatactcccaccttggtgtggggattgcaggcttgacccattgcacctggcctggaaccaacctttatggctatcaatactcccatcaatcaactgtctcaggtatcataatatcccttcttatatgtatcaaaactcatactgaacaatgagttctgggttgcaaaagaggatttattttttgcacctatctgtaagtctttgtccacgttaaacaaaaacatacataagtgcagtcccaaaatgcactacatagcagagtagtcagctctatcgtggtgatcaaaataatgaacatcg

SEQ ID NO: 1884700 - DNA, 4001 bp, Homo sapiens
ctttgcctatttctgtcataaatttcttttcccccagcagaaacccctcgcaggcttacacctgtaccagggagcttacaagaagcatttataaagaggaaaaaatcatttatggagagatcccaccagaggcagaaagaaataaggaataaaattcatgtctctgaaaattctcaaatcaaaacagttaaagagaaaccatctataagtatgttgaatttttaaaatcttcaaccaactccctgaaatgtttaaagccttgtgtttacaacttgatttcacttttctttcctcaggttcatctgtgagtcgtctaaagggcgtgaataaagtcagagcatcttttcctgaagacagaaagactacacaggctctaaggcaccaaaggggtctaaggtagggttaattttttttttttttttagtgattcactttttgcagtgtttgtctctaattctatataaattctttacaggttatacaatcaactagctgaagtgaaacaacaaaaggaagaaaaaacaaaacaagaagcttatgcccaaaacagagcaagggcaaaagaattccataaggtgagtataactgagggagaaggacttaatttttcaagcatgaagtacacaactgaaactcaaatttttattccttccacagaaaacactagagaaacttcgagccaaaaatacatgctgactttctagaaatagtgtaaaggttttttaattgtgtatatgtagcattagacaaaattatttaaagtcaataaattgttattcgaggaattccatgttgtgatttcttccactgtccatcaaggtcactttagatcctctaaagagctggagtcaaaagatttatcttcaagtttgccctgaagaagagaaattttgattaacctttaaaactctcacatggcaacaatcctggattattacgttttatatctcctcaggaaaacatagcaccaaacattaggagtgctatggcttcctatagagaacttccatctttggtcacagcgttaagagctctgggtttcacagcctcataagccctctttgaaatgacccatacaaatgtcttttctaatgcatacatacctttttaatgaaactgatccagttgtcctgtcagccctacataacaatagtataaaagtaaattttacatttccagagatgagtgtacagtgagtgaacatgaatgagtccctagaacgagcctgagttaactctactacaaactgcttggttattagcaacccacaagggttacaatataaaggcaaagcaaatttgcatgattcaagagatctaggagaattttcaaatctcactgattttaaagaaaaatcacatgtggttcacattttatttgtattgcatttctattacagttaatcaactgttcccaataagctgattgctagcaaagtagcagatagaaaacctactgggaaatttttttatggtcatgtccacagcaaatgagaaactgcattctaaaagccttggtaatgaccattacacccttgagcaaataacttatagttaagataaaaaccattacttgccataattactttggcttctgtcatctcgttttaatatggatatactgatgaagacttcaaaattcacctgtggaaaaatgtgtatttcaaatttatatttactattaagtacataaatctatctttcaagaatgaggttgcttaggttccaaagtatcctgaaacccggcaccccaagtaaggtattgaaaattctatgcttaaaatagctatttaaactaataggtatttttaaaaatcaatgatcccatgcccattcatatccgaatttgctctatgatcatgtttctggtaacttttacctttgagcttttataatcttctgaaatacaatgcaatatttaatgtaaatggatgttcagaaaggccattttcattcagccccttcagagcagttgaacatttcgcccatcatcataacatcgttaataatgaagtttaaacacataataacgtaagcctagtccttttttttactcctaagtggtgatagatgttgcaatagcattgctagataaataaataacctaaaataacatttggagaaaagctagtattcaacaaaataacctgcatggccttttaagtaatgaattaacttaccaagaatctttgggatctaatttcttcaaccaatttactttagggtcctagaagttgaattgtacaaagtacagttacattttgacacctgatccaagacacagtaatgtataccacattacaatgtttcagtcaatatacagcacataaaaaaagtggtcctataagagctgaaaattccttattaaatgttatttctaatattgaaaagtcaacatttttctcctacatttttactcataaacatagcaaaatgttacaggtctcattgtcaccactgcaatatgcatactgtgatggaagcataacctgtctcaatttagccacattaactatttttggacaccatgatcaacagtgcccattctctagaatgaggcattgtaaaagtctttaaagcttagtagtgtatttgtacgaagttcttgttatgctggcagtgctactgatagagggaaacaagcagaatcaatagaaacagagaatcttacctttttactgtaggtggtggggatctacctggttctcaatttgacaccctggaaaaaaaagcattgcttactattttagagtatatcaaactgaacactctgagaaacctacacaaatactgtatcagtagaaataccaggtttaacaagcacaaagccaagaaaaccaacgatgccagatactgaatttctatagcactgacctttgaacaccctagcaggtgtaaactgctgagtgcagataccatgcagtgcaattatgactgaactgtacaactcgtattcccaaatttgcaatattgctgagaaatgctttcacaaacctctcaaattcctttaacaagtacaataatttgagcttttttcctaattgtcactgtaataaggaagctacattaactacattttaagctacaactctagtctttgcctaatctttgcccagtctctctataaaacttaaagatggaatatatacatgtaacttaacagatcagacaacaaacgtcaagctcattgttgctcaaactgccagttacacaaaattctttttatgtaattcatatccctattgattcaacatatccacacaggtttacgtgactttaggatgaaatatgtgtaactgccagttgaataatgatgcaaagaacacaggtagtttcgtttggtaggtatagacatgcagtctcttcattttccttctctatacaaatatatacattgtaatatttttgccagtatcttactaattctgtgttatacctgaaatactgggatggtgtaatttctatttttcatcttttgagtccttgattattataagttaaatattttacttacctctcaacatgaatgagttcaaatcacattcattcctatagaaagtaccaattaaagatttagaaaggatacatttccagttattaaaactaaaacccaagtataaatttaagatccagtttattatacagccatatccagctctgtcagaattaagttttagttcatgcccgttatcattcagcagttgaacagttaaattcatcatctgaactgtaatcattatttcccaaaagattatactgtcaccaattaaaacttacctaagcgatcactcaagaatggtacagatgtgtggagtatgccaatacctaaggtaaaaaagtagattatctggtttttcataacgtttagcaaccgtctttttcaaacttttagcaactgtcttgtaattccttcccacagatctaacaatagtcctgtgagtaaagtaaaaccacagagttactctatgaggcgtttccaacgatgtgcaggctacaggaaaa

SEQ ID NO: 1884701 - DNA, 4001 bp, Homo sapiens
gtcatgcatgataatggctacaagaactcaagattatgttacaggacaggctgtgagcacacaaggcaaaggccatggagatgctctcagacaagtatctctatctacatacttgagtttggaagacatgtcctcagctggtcccttgcgtaacatgttggcattggagcttatgttctgtgcacgctgaggtttctcttccacctgttttattggtgcagcagagggtctctttgctgaccgcttaatcctctcctcgagcatgctcatatccttttcagaaagctgtaaagaggccaaatttagaaacctaactggataacacaataatatctattttcatatcaaaacaaatagaaccttctatgttaggacatgtttactttcaaagcaccacatttcaaaatcaactactattaatacctgcctagctgctataggaagaggagatatgaaagaaggagaggggctgggcacagtggctcatgcatgtaatcccagcactttgggaggccaaagcaggaggatcacttgagcccaggagtttgacaccagcttgggcaacatggtgaaaccccatctatacataaagtataaaaataagctgggtgtggtggcacgcgcctgtagtccttgctactcaggaggctgaagtcagaggatcacttgagcctgggaggtcgaggctgcggtgaaccatgatcacaccactgcactccaacctaggtgacagagcaagaccctgtctcaaaaaaaaaaaaaaaaagaaacgataaaaaaaagaaagccaattagtaactacaaataaaaaggtcaaaaattaaatgaagcttcctcattttttgttttgtcaccactatctagctgtgtgactatgggcaagaaacttcatttttggtcatctgtaaaattcccaactgctttatattcttcactgggtagtagtgagaatttaattagaaaatataagtaaacatatttaagccctgtgtaaatacatggtgacactatgaggtaactgaagacggaggtccagactcactcaaacgaaataagaggtcagaggcagaacctaatgtgagtgaaaaactggctcacggctgtagcgcaagatgtgatctgacagatactagcatccacactatacacaaataagcactttttaaccaaaaactcgatgcagtaaaaattacagagcagactgccaggcagaatttaaacccgggactagctcagatttcttgattcaaaaatagcactcatttctaaagcaaatttgctatgaatagaatgctcagaaaagaaaacttgatttccattaaaacagcctaatcagagacacctcaagggtctatctggattctaggacacattgataggttgagttgactaaaaagtagtaaaaacttagctacagttgagaggacaggaaacctaacacctaggagatcttgcaattcttttcacgacatgctgacagtgttcagagaagtcactcacatttccaatcagtttgaacacctgatccccatgtacattgtacaccgttacaatggtgttgagtgcagcattgcgtacagcattgtcacggtctcctatgtgaacagctatttcctttaaggcttttcctggggttggttggcaaacattcatgccataggactcaaccagacatcccagctcttccaggcactctgatgggggagaaaggctagattaatgagacaacacatatttgggacagagacttatccttactagagaaatttcccttggcatatatgaaggactaaaaccttactctggctctgcctaggattttttgtttactgccttttatcagtgaaaaaatggtatttcagcaagtgctcctgaaaggaagagatgcctgtgagtcagatggcccctgtgcacttgattttgtcaccagggtgatactgagtggtgcctgtatcacctgataccatggctccaccagtgtgcaactcatcactctcacagtctaaatcaggaggttggaatcaactacataggcactggagaaatttatttgttcatctataaactatttcttctataggctactgctgcagagattcacatctcagtttaaactgtttgcttcacctgctctctgcttagagtttttggatttggttccttccatgataaagggaaacatcttgctagctgggtagacaaggcacatccggttcaggatggcacgaacatctttacgaatgacatcctttggttctccaacctagtcgataaggaaaataatgattaagtgaggcatttcctaagtagcaatgattctcccatgcattactatgttttgaaagaatagggaaatagggataagtagggaaggtaccgtgatataatcagtaaaaaagggagaggaaataaaagtacagaaactgaggtcagctgggaacttaagcagtctcccagagagagaacaccacattaccttgacgacaagataggggatgaaggaagatgcttcattctcagtaagatgatattcttcttcacttagcaaggtgaagagcaattttaaatattctagtgctttcatcaggacgcttgtattggtgtcaaaaaacctcagggtaagccactttaagataagatccaggcaaccaataactccttctttttcactctccaagtgcttaaaataaaacaaaacaaaactcccacaaataagaataatcaaaatcttaattctactaggcaagtgtcttttaaattttattggagcccaaaaagaaaatgacagatttttaagccttcaattaagacctaaaaaatatacacacacattcatttattctaccaaataacaagacagctctaaaaatagagaacatagtatattctacttccaagtcatgcaaacttcagattatttcatagggctcggtatttttacatgtctgaaatacatgtatatttatctattgcagacttacatcaaccataacagcaagggctttgttatgatgctgaaagtctgagtgaaacatctcatcttgtaaccatttagccacacagctagacatttgagtctttagttgctcaatgtattcatcccgtggggtagtaaaattccactttagcacctggaaaaaacaaacggtgaaaaggggctacagggtgttcaactgaaatgaggtagagagccttatataatgcagctgcaggaacaataaaatatttaaaaattcaacaatattcatttgtaattaaatatgaatgcaaatttcaaggtgtcatacttcttgaagcttaacaactctgaaaatcttctaggaataaaaatttttggaattgtttgtttttgagacagagtctcacctgttgcctgggcatggcagagtgcagtggcatgatcatagatcactgtagcattaacctcccaggctcaagtgattcttctgccttagccccccaagtagctgggactacagacatgcaccactatgcccagctaattaaaaaatttttttcgtagagatgaagtctcaatatgttgtccaggctggttttgaattcctgggctcaggcaatttgcctgccttagcctcccaaattgttgggatgacaggcatgagccactgtgcctggccttgcaattcttactaaagaaaaaaaaaaaattaatcctacatataactatataacatggtggacactgctgccacatctttgatagagagaaaatttgaaatatctatcaaaattatgcatatcatcattctaggagtttaatatagatacactcacatatgtgtacaaagacctacattcaaagatattcacagcagcagtgtttgtaatagtgaaagaccagaaacaacctaaatgtccaacatagtgggcgaaggataaagaaaggtacatacatacaatgcaccaatacaaacagtgatacacacatatatacacagatacgaatgatctttcagatatttcaaacatcattaaaagaa

SEQ ID NO: 1884702 - DNA, 4001 bp, Homo sapiens
tctttaatccatttatatatggtttgaggggatggatccaactttatttgcttcaacagttccttctccaatttgaggagtgggaataagaaactcagtccctttccttccaaaatctccaacatgcggtccttattctgatcaatttctgaagagacaaagccacctgcatcatctaatagttcattttaccaagttgtcctgtccagagagcagagcttcacaaatgatgtccccaagtatgtaagatccatgtagcagaatagagaaccaacccagcaaatgaaaaaaactcaacatacggatcaaatgaaagtagttaaattataaatctctctttataggtgagatctgtggtaatgtttatcattatctgagcaggacaatcagactgtctgacctacataaatccactcaaggtacctgaaatctctagatataatattaaaaaaacaaaacaaacaagtcagcattctcttacctgggagcattttctgcatattgaccttgctttgttgaaaaagttctgttaaccattctcgatcttgtaatttagctaactgctgaagacaaagtaggaagagaggaaaatgggtgccactttctagtggttgagctagttctgaaatgctcaccagctctgaaatgatggcacgagctgcaaactgtgctaaataggatttcaccaaagggatgtcaacctccagtttgggacactggtccaatacattcaggaaagccttgaaagaaatatacaacagtttatcagttttcgaatttgagtggtaagagttcttaccacacaatcagtaaagtgtcctacctgcatgaagttgtcacttgtggctatcccttcctgtttgagtaaactgatcaaagaacttgctttttctttatcttcatcgcttctatctagtgacaggatgattactttgcttaacatctcaggaagaaagtgtttaggagccctcatttctcttacaccattgacagcctcatttgcatttccactatttagatattcagtcacaacagtttcctgtgaagaacacaagtatctttaatgtattctctatctcaaatacaggctaattacactaaaatgggatatttgaaacttacagttagtttaaggagttcttcctttgacggtggtggctttttgctggtcttggcaggcttttcctggataagcggtggattagttttgagaccaagctgaggtgtctaaaaaacaagcaatgacagactttttttaaaaagaggactatgaaattagggggaagaacacactaaatttagaaaaaagtcttcagatatctttagaaaatgctgtcctactatggtctgtacctgtcccagaggtggtgtttgagtgcgtggtggttgtgcactaggaggaatcatagttatctggggctgaagctttggcacttgatttttattcattaggaacgactgagcaggcctcaggctaatctggaattgaaaacaaaatatatctaaattaacaacatgcagttggcgaacatattaaatacaacattctaaaatcctatacagtgacagaatctagggaaacattaagctttttgaaaaactaaagaaggtactccacattaacaggtttaatttttggcaaaaaatttaaagatctgatgcatacagtagtaagatactattataaatcttacattctcttagaattagcatgactaaaatattcaaataaaaaactgcaaatttaactacagtttagaaaatgccctgttttatccttagttaaatcacccttacaaagaaagaaaccacaatattttgacaaccagttttcttgctctaacagactttaggagacttgccctcatatctcataatcttcgctcacaggacgctggacattcaaagaaagaaaaagaagtatagaaaagagagaaaaacgtcaagaactccagcataaagtcctcttaataacgcgtctttttataatcatcgggcaataaatttctgaatggacaaactatggtatataagtaacataggcaaatgtacctcatctgcattaagctgtcctttcttagaaaaccgaggtggcatatccttcgactgtccttgcagctgggataagagtccctgactctggttatggtagagctggcttagcccctatttcagaaaaggagaaagaaagtctagataaaaaggggtccacaaattatggtaatcaagtaccaaagggatgagccaagccataaagttagtttaactgaatttgcccagagaaagtaaaagatgaaacagggaagaataaaaatctaacctatcaaataaagtgatgtgattttactaatactttactaatcttaaggataaacatttcagtttgaaataaatgttgcagataaggtttagaaaacatgcacactcaaatattacttacctggcttttcataaacttgcctcccatctctccaaactgcgattgtgtgggaggcatgatgtgtcccccatggccattgaagagttgatttgaacgatgacgtcccatggtgggtgaaaatctatcctggataactcctggaccagtaccaattccgctaccttaaaatacatatacggacaactctcaaaactaaagttaactgatttttcagcttaacgcaaccattgttttttcaaaattacctggcatttgtccaaacatatcagcaagtcctccaagtgggtccctatccattttcatcctgggtggcatgaacggtccctccagaaagaagtcacttctcatcccttgagccataggagcaggaataaacacccctagatcctttagaaatgaagtgaatatgcactttttgtctctggacactatttcacttaaaactaaaattcttgcaactagggggggaaacctagaatattaaaccataatttatgttatttctgtaaataacttcttccaaaaatggcagacaaggctgggcatgatggctcacatctgtaatcccccgactttgggaggcccaagccttggtttgcatgaggtcaggagttcaagacaagcctggccaacatggtggaaccctgtctctactaaaaatacaaaaaattagcggggtgtggtggcgcacgcctatagtcccagctactggggaggctgaagcaggagaatcacttgaacctgggaggcagaggctgcagtgaatcgagaatgcgccactgcactccagcctgggtgacagtgcgaaactccgtctcaaaaaataaaaaaataaaagtggaagacgagacactaaaaacattaagctccaccactaagatgagacagacccctcaagcgtttggggtgggtgaggaggaaacccattctattctacacacacagagtctatgtgacaaacaaaacaaaacccaatcttacttttactgcatcttgacgaatttgattgatcgtctttggtccattgtcaagaaaagccttgcgaggaacccaatggtgttctcgcaactctacggtatcctttaattgaaaaataattttattttaatattcctaaaccaaaaactcagcttaccaacaaatttaaagaaaccagtattacctgcagcaggaaacgaatccttgctggcaattccttacttaacatcaaggagcacattcgggcaaagtactgatccattaaggactgataagagaagaatacattcattggaagagctaaagcaaatgtgttcaatttacagctttaagacttctaaaattataacccagttaatggctaaatatggcaatcccttatgatgtcacaaaaatcaatagcttgatttaaagacaaactacttgtactactttcatcagctacacacgtaccttggctcgttcatggtctaatctaggtcccactgtcctcattatctgacagaggcactccaaatcctctcccatatctttgagttggactctcttcttcttttccaaaagctacaagaataaaaggcca

SEQ ID NO: 1884703 - DNA, 4001 bp, Homo sapiens
tagctagaaagtcacaaagttaggacctaaacccaagttcaatgttaactccagtttcagtatctgccaaaagggacgttaaaaatgctggtcctggcaaggcacggtggtttatgcctgcaatcccagcactctgggaggccaaggctgggggaccacttgaggcctggagttcaagacctgcctgggcaacatagtgacaccttgtctctaaaaaaataaaaaaaaaattagccaggcatggtggcatgtgcctgaggatcagctacccaagaagctgagatgggaagactgcttgcacctcactccagcctgggtggcagagcaagacctgtttcagaaaaaaaaaaaaaaaaaagaatgctattaatagtataatatattacagtgttgtgaggagaaaaataatagatgggaacagtcttcaaaacaacacctatgagacatggttattaatagacaactttggcctgctgtcctcagcagtactcaccaaatcatttccccttccacagtttattatattttccagaggaataaacattctccactgagacttcagggtgctaccaagtactttggaaagggaggaatccaacccaccagacctgaccacccacttactgcagcagatcttcacctaaagcccgcctcctcagttgtgttttgctctcctgaacaggccacctctcctgccacttcagagttggaggctgaatcagaaagaaaatttgagggcagagatggctctactcattggcccagtgggtaaccactctgtgtggtgaccagaagggctgctaaaaggtcccaccaatccctaccgtcccccttcctaccaataaccactgatccacttggcctgcaatccgcaagtcaaatacggtctccagcagaccccttgcaaattccatagtgctttgaaacaagtacagctatatatgcaagggagggggaaacaaaaaaagacttaaaaggatgtcctggccgggcgcagtggctcacgcctgtaatcccagcactttggggagccgaggcaggcggatcacgaagttaggagatctagaccatcctggctaacacagtgaaaccccgtctctactaaaaataccaaaaattagccaagcatggtggtgggagcctgtagtcccagctactcgggaggctgaggcaggagaatggcatgaacccaggaggcagagcttgcagtgagccgagatcgcaccactgcattccagcctgggcgacagagcaagactccgtctccaaaaaaaaaaaaaaaaaaaaaaaaaggatgtccccagccaggcgtggtggctcatgcctgtaatcccagcactttgggaggccgaggtgggtggatcacctgaggtcaggactttgagaccagcctgaccaacatggagaaaccctgtttctactaaaaacacaaaattcgccaggcgtggtggtgcatgcctgtaatcccagctgctcaggaggctgaggcaggagaatcgcttgagcctgagaggcggaggttgcagtgagccgagatcgcgccactgcactccagcctgggcaacaagagcaaaactccatctcaaaaaataataataataataaataaaaaataaaaaaggatgtccctagtgggatgggaagtagcccggtagcctgggacactaactttgttcccatcacattctgacttccagttagtggtgagacctcaactatctttcccatttggtcagaaaacccagacaggaagatgagccagcacaggactgaccaccagggatttacaggcagagccattacttaccatcaactctggaaacgtgcccatgtaacacacaagtccaacaaaaaacatccagccaagcacaatcatgatcaaacgtaaaacaatttctaagataaaattgcacagtgaaagactattcaccaagatcttggcaaaggagtgcgctcacgaaaccttcagttggtagaggtctcgcatgtctgttcgagtctttggctccaaaggatccacaactccctagtggagaagctgaaatctagtagggcattgtgacatcattgaccatatggcccagactcaaaacacaccagagacactgcccccagaccagcagctgagcagcaaacagcaacactatgaagtaggcattattgttaaccccatttcactaatcagaaaactaaggcttagactacagcctaagtgacccgcactacagcacatagctgatgctccagatcagggccaagacttaggactcagctgcctcttgggcagctgggctctttacactagaggcagagatttggaaaggtgttttgctgctaggtgtacgacatgtgaacgaaacaaactgaattacaggtaaatgagacagatgtctctatttctgtccctgcaaaacctcctctccccatgtcaaggggatcctcagcatgatggtatatccacatcttcatcaccttggattagttcctctccattgattctcttttcttggccatcatgaagccacaggtacccctgtcctttcctcaaaaaaacttccagatgatactgtggctccttccctgtcttatttcttaatttccttttatgaccaaacttcctaaacaagtggtccatactcaaagctttttccaatctacgcctcttccatgcattacattctgacttctagccccaccccactattagacaccctctcagaggtcaccaaagatattttttgcttttctgctacaacatcatggacatttaatgtatttttcatctctacaatttttttttttttgagacagagtcttgctctgtcgcccaggctggagtgcagtggtgcaatctcagctcactgcaacctccgcctcctgggctcaagtgattctcctgcctcagcctcccaagtagctgggattagaggcacccgccaccacgcctggctaatttttgtatttttagtagagatggtgtttcaccatgttggccaggctggtctcgaactcctgacctcaggtgatccacccgcctcagcctctcaaagtcctgggattacaggcatgagccaccgcgcctggcctgttgtgatatttcctgcttctttaaatgtcttacaacttttgattagatgttgaacatggtaaattttattgccgagtgctggattttgttgtattcaacagtgttaaattttattctaaggtgcacttaagttacttgcgatcagtttgattcttctgaggcttgtttgaagctttatgataggccaggagcagcctttactctagggttaatatccgcactgctgagttaatgaccattttctctgagcaccttctctgaggctgattgtattagagcttttttttttttttttttttttttttggagacagagctttgctcttgttgcccaagctggagtgcaagggcgtgatcttggctcactgcaacctccgcctcctgggttcaagtgattctcctgcctcagcctcctgagtagctgggattacaggcatgcaccaccacgcccggctaattttgtatttttagtagagacagggtttctccacgttggttagtctggtctcgaactcctgacctcaggtgatccgcccgcctcagtctcccaaagtgctgggattacaggtgtgagccactgtgcccggcatagatcttccaaatctgtggaatgttccacaattccctgcccttcaggaactccaagaagtgtttggccgactgcttttgggtggatcttttccaggcctcatcgagttttatcccatatatgtgcagacagaactcagccaaagacttataagggcccctgtggaaatctacagagctttctccatggagatccctcttcttagcactccatcctgcaaattctggcctctgctgtattttgctatctttctcttcaactcagtgaaatgctcagttgggtaactcctttctgtgccacagtctgaaaactgcctcctggctgg

SEQ ID NO: 1884704 - DNA, 4001 bp, Homo sapiens; identical to SEQ ID NO: 915586

SEQ ID NO: 1884705 - DNA, 4001 bp, Homo sapiens
accataacaaggactttggatttttgtctaagtgtgatgggagatgccaaatggctttttttttttttagatagagtctcactctgttgcccaggctggagtgcagtggtgtgatctcggctcactgcaacttctgcctcccggttcaagcaattctcctggttcagcctcccgagtagctgggattacgggcgcccgccaccacacctggctaatttttgtatttttagtagagaaggggtttcactatgttggccaggctggtcttgaactcctgatctcaagacatctgcccgcctcggcctcccaatgtgctggggttacaggcgtgagccacagtatcgggcagccagatggtttttagtacaagaacgacactgtattttaaaataattattcagtttcctgcttatgtggggatatgtaaggttgtcatgaggagtaaattggagagattaagtgagaggactcatgtaaggctctttgtaggtgcgaggcagaatagacagttgagtggatattggccatgatggtgacatagtcggcgcactgaggaattcagggtagggctgggagctggagacggtaataacctgggggtctgtgcatacaggctggagtccaagagatggttcagagacagttcctctagtcagcctcaggctaggtgctgtggctcttcgctgtaatcccagcactttgggaggctgaggtgtgaggatcacttgagtccaggagttggagaccagcctgggcaacatgacgaaaccccatctctacaaaaaatacaaaccaaaccaaacaaacacacaaaaaacggtggctctattcagcctgatagaaacgacttgtggtacaggccctaagtcaggtacgctgctgcccaagagcctgactggtagatggagatgtgaaagggacacagggctctccacgtaagcaggaggcagcaagaatgacagttccaggggttctacgtggaaggaagagggggccaggaggaagggacttcaggtcagattgagggggcatgtgccatccggaagaggagaatgtcgatgtaactgtgaaagtccaagtcctagctgcttttccactgccctggtgtacaacctcaggccctgcagactgcacatctgaggacccctgcctgccctgtctggcttctctgaatctaataagggagaagatgcgtttgaaaaagaacacggaagagggagagagaaaaaaagcaccaaggtccatgttcagagagccctggtaattttaacttgcaactcacccaagaagagcctaatggtcgcaagagtatgtaggaaggccccaacccgacccggcccagcacgcagcacccaagggcggctggaagcgcaatgcgcgtgcccagtacagcgctattcagtctgcaggctttttgaggatttcaacttcaaagaacggtcggcttcggggcgaactttgcttcagttccaggcctcgggaggcagcgaggagacagactgggacaccgagcatgcagaaggggagtggtcttgaaatacgcggaaagggagaatgcacccctcctggccagccttgccgggcgaagtgagaagtactgaggcctgagaaggctccacgcgtgcgcaaagggccgctcgctgtgattactggggtggcgatggttgtgatgacgccgctgccccgcctgcgccgaaagggaaaccccaggggaggcggaggccagcggggatttctgaagccaagtggtccccttcatccacgacggacaggaagggcgaccccctgaggccacttccaggtcttgcgaccggaggagagttaccaaggagacgctcctcccgaggcctcgcgcgtcggaagcttctgtcccctggattccggttgacggacgcgtcccccgagcaggttctcggtagcagccgacacgccccaccccgggcacagcgaggtctgaggaccacgctaaggcgtcacgtccgccctgatccgcggcagctatggaacgggcggagccgcagcggagggcgctccgctttgacgtcacttcctgtgagcccggcggtgacaacggcaacatggccctgaacggagctggtgaggacctgggcggcaggggtttgtggctgtgaggtacgggaggcagcccactccggcaagacccccagtccctatgcctctcttccccagaagtcgacgacttctcctgggagcccccgactgaggcggagacgaaggtgctgcaggcgcgacgggagcggcaagatcgcatctcccggctcatgggcgactatctgctgcgcggttaccgcatgctgggcgagacgtgtgcggactgcggggtgaggcgagactcgggcgagtgaccggggatgggtccgcgggccaggccactcagcccttccccggccctcccctctggaccccattgccggcgtctcattccggccccgtgtgctttttggtccgtagacgatcctcctccaagacaaacagcggaaaatctactgcgtggcttgtcaggaactcgactcagacgtggataaagataatcccggtaagagtaaaaaataatccgggagaggggccggatatgcttaggggggaagcgtggttaagtggtgatagaggcccgagaacagtagggctgagaggtgacagtggagtctctgggtggggtagaagtaaaattatttctcctttaggctctaaagaggacccttaactcaataagagcaccaagcacctcctgtgtgccagccactgcgcgagagtctgagctcaaccaggcccagtactgatggagaattgaagctagggcataaatgtgatacaaagtagaaagtggatgagttgccttatagagggacagggaaaacacctcaagcacagaaagagcagagcagaaaaggagatggctcagggctgaggtgggccaggcatcctgaccattccacccactttctcctctttttagctctgaatgcccaggctgccctctcccaagctcgggagcaccagctggcctcagcctcagagctccccctgggctctcgacctgcgccccagcccccagtacctcgtccggagcactgtgagggagctgcagcaggactcaaggcagcccaggggccacctgctcctgctgtgcctccaaatacagatgtcatggcctgcacacagacagccctcttgcagaagctgacctgggcctctgctgaactgggctctagcacctccctggagactagcatccagctgtgtggccttatccgcgcatgtgcggaggccctgcgcagcctgcagcagctacagcactaagagaagcccctgagaaaaaccctctagaaaaacagctgttcctctgtgtggtttgtttttttcctggttccaagtgtgcatgccagccccagctccactcacctttttccagcttttggcctcttcacctctccactctgctctccttgacgccctgagatgagttgagcttgtttcttctcagtttccccagtcaggatgagggagtaggtagaggactatgtgatgccccttttctaaggaagaagccatagccttttcaaaggtagcagccagaggggtggaccctagccttgtctctggcagcacctctgcagcctcttccgccatctggtgtccattccccacctggaagtgaggttttgtgttccgatccccttgatagattcccctccttcccctgagcatcctgaccctatcagcctatcccatctcatgcccaccccaggtactcagacaccgacaggagtttgtggtgaccccagcgtcaggtggcacgttaggcaccaagtgtggacttgccagtctcctgactccactgttagatcattttccttgggtgtgggggcggggcggggcgcggcggggagacggggtagcaaaaagaaccgtgaagaaaccacgcctgcccccttcagccttttcccccctccgccgcatttttccatctccccttgagt

SEQ ID NO: 1884706 - DNA, 4001 bp, Homo sapiens
aggcctgaatacagcttataggttagaaaaggcacgccacctgcatagtaacagcacacacttatatatagcaggttatgctttcagaccaaattcgcatccattgcctgatttaatgccaacaatagccctttgaataagcagttatttcctttcccctccccccaccccagtaagaaaactaaagctatttagtggcagagacaagagttggaactcaggtctccaggaacaaatgctggttcttaagttccattttctggtagagtgacatttacgtgattcacggcaagaactgcaaactgtgcttagatctagttcatcaaatggccaagtttagaggctgggctgacgcttggatcagttctgtcagattcacttagttatgaagggcagctgcttactccctttgggccagtcttcccatctgtagaacaaggaggctcttccctcttcctcgacttgcccgaggcagggacttagtcattgtgttctttatacccagcttaattccaggcctggagatggcatgcaataaatagttgttgaatggctcacgcctgtaatcccaacactttgggaggccgaggcgggcggatcataaggtcaagagatcgagaccatcctggccagcatggtgaaacctcgtctctactaaaaatacaaaaattagctgggcatggtggcacgcgcctgtagtcccagctactcgggaggctgaggcaggagaatcacttgaacccgggaggcagaggttgcagtgagccaagatcacgccagtgcactccagcctggcgacagagcgagactctgtctcaaaataataaataaataaataaataaataaataaataaatagttgttgaatgcatgtctgactgattaagccaaaggcaccatattcaaacaaaatcagacactggtgcaatgccaaacagcttctgcccgtgcaaggaatgatttagcatggagcacagtcacctgcagaggaacaacttggaggcagactctccttactcagctcacttggagcagagcttcctgagttgggggttcttgacagataagccctccagcttcagcagaagcaggcttggagctgccacttctctgaacccccttgcacttactgtcagtcactcacaccttgcacttattcacatcctatcctgcctcgttcttgaatggagtccatggtgagccttctctgtgccgctggatggtaagcttcctggggacagggaatgggtctgatagtttccttggagcccctggcgctcccggcactgggctgttgatacgtggggctccggaaacactgtgctgacctgtgaaagggactggcctaaggggctgtggattgtcctgtagggtgacttctgaactgttcttcagcctgggcagttcccaggtttatttggggggatgcctgggtccaaagaaccagggtcaggggcccaggggtttcttcctggagacaggatgcctggcgccttcaataacggaaaggaaactgagaaactttctgaggccaagataaagagtatgcaagtgaggggtgcagagagagcagtttaggggcagcaggccccaaccgaagcagaggaagggcccacgtctgggcccaggggactgactggctgccttgcgtgcatggggcacgggaagcataggctcccggaacaggaccctgccccagtttccccagtgagggaaggacaccgttccccgtgggatagagcactgcaccctttcttgattctcattgttcccgggagcgagcgccttggctgcgctgggcatacccaccctggcgccattcacaggcagtgcctgccctggccctgtgctcaccccatcaggcctcctcttccgcctctctggcacccacggcgcccctgcttgcctctgtccgggtctcggaggcgcgaacaccatcccaagcctgcgaccgcgcggcatcacccccgcccttccccctcctccaccccgccctttctacccctcccgggagctcctgggagtcgggccgccgtgtgcgcaagcgtgtccagccccttccccgcccccaacccgggcccgggtccccgcctcccctgcaggcggactcgcccgctcccaggccggacccgcgcccgggacagggacccggccgagtcgagccgtcgcgccagcgctgcgccgccggtcggtgcgcctagcggatcggagctgcgcgcggaaccgtgctgccccgccccgctccacccgtgagggtgagtacgcggcggcggtgcgcgggggcccgcggggcggggcggggcggggagccgcggggtcctcggccgcctgaccccagccggcgccgcgcctcccggagggggtcgggccctgcacgtgggcgcagcgcgggtcggggtggggctgccacagccctgcggagctgctttccggggtccctttccctggaccagattttcgcgggaagccggatcctctccgttcccttggagtgagcaagcgggacagttctgcggaaagtttccgcccccaatcccccagccctgcgcccggactgaagcggcggcccccacctccagcatcctcgagcgatggtttctcccacaactaccccggtcaggtccagcacttgggagctgactgtgctggaggtgacaggctttgcggggtccgcctgtgtgcaggagtcgcaaggtcgctgagcaggacccaaaggtggagttgtcagtgggaggccggctgtgcccagggtcctagggccacgttatgggggtcgtcaggcctaggccactgtgcctcagggctgcatgggtggtgagcagtgggagggatgcgatggggggagtgggctcagctgtctgctgtgggtgtttcctcggggacctggctggcagggacctcccggccagcccagaactgccaacatgtctgccagcactgcccctccattcccagtcctggggggaggctctgtctgggcagcttgaggcctgacctactgtggctgcttcctctgctccccagcctgggtcctgagggcctggcttaagggaactgctgccagaaggctgggagtgtaggcagtgttcgggtgcccagctgtgccctgtctgacctcatggccacccacaagctggcaccccccacaggcctcttggggaagcctgtactttccaccgccggaggcgggtaccgcgtggaagccaggctcaggcggactcattctttttgaactttgggaacaggcctggtacaggctgagttctcacaagagacacacacccgtgtcactgtctcctgagctgtgccggacccgtcctacagactccacctcctctaggtcctggccctggcatctgccagggggattttaaatgagttgatatatgctaagtgctttgaaaggcgcctgcacggagggagagctgtataaatattcactattggtaatatttctcccatgctgttactctccaaagctgcccgataattctagagtgggttccggggacgtgcccgctgtttggggcctagaaatgaactcgggaggttgttttgcttgctgagagctggtctgggaatgccccttgaccgttccctgccctgctcctggcccactcccagactgctcctgtgcctggccccattgcgctgggtgggtgatcctaagctgccccatgggccctgggctctgtcaagacatggggagcttgccaggagttggggccagatcccccagactccaagatggtaaccgaggttgtgagggtgcacatggaaggaagagttagaagagtgaattggaaattgccagcttggactttgggcagagtgggtgtctttagcttggggatgggttgttgttcagagacaacagggccgccttctctgtgagctggcggcccaggctgaggtgcctctgggctgccttccctacgggaagcagtgactggccctctgcttctcaggaagagagtgccgtgcccccgccagcctcccaa

SEQ ID NO: 1884707 - DNA, 4001 bp, Homo sapiens
cctgggcctggcagtagccctgctccggtcgatacagggtgtaggccttgagcacctgcaggagcccctgctgcctgtgccggaagaccccataaggggccagtcctgcaggcacccccttctccaccctctgggggcctctgcccaggcctcagcctccctgggccttcctgggtcccctgagatgcaagactgtagagctgggctagggaaagtgggctggagcacctggggcttgtggggctgggggtccctgggcatcaccggcctcgtacccgtggccctgaggcgacacaaacatctcgtgcagagggaattgacggtgcaggtccctgccaatggtctccatccactgtgggtctccaggggcctctgccagctcctgtgggtagccaggaaggtgggtgtgagggttcagtgtggtgaggggctctgggtaggggaattggggcccctgcccactccctcacctgataggtgccagggctgttcttctggcacacatgggccccacacaacaggggccagcatcgggcgcgcagggcagacgggatgcctttccggcactgcatctttacctgtgggtgaggccaagggctccactaggcagcctccatagctcctgctggcaggccccaggcacagctcatcagcaggcaggggcccactttgggtggcagggagcaaaggccggaggtgctgggacacagggtgggtacattttgccaagatgtgggctgaggcagagaggaatgagccatggaagccaagtggggcccctgcccccctcaccttcttgtaccgccgggacatggttttctcccagtgcgaggtcatctccacccacttcatctcccgttggcggatgaggtctgcaggtgggtggcccggcctgggggtgcatggcacaggtatccagacgctgggcagctgttacccaaggcccacactgccaccctccaggctacccaggtgaacccagctcctggccctagggatctctgggagccctgtggggtgacctgtgacccaggagctgccaatgcttgtcacggggacaggaaaggatgtggctccgacgtgggcagaagcaggagactgaaggggtgagtgggtgtgtattgggggagggactggttggctgtcacccaggacagggacacagacaattcataggggaagctggctggagagagccctggactggaagcccagagtcctgagtttgagtctgggtctgtgtctgatctgtgtgacctggggcaagtttctgtctatatctggacttgtgtttctgtctgtagcttggggaaagggggaaggaggaggtatgggttctgtgatttggatctgggattcctgagccagaggttcaaaggggaaggatgttctgccccagtagtgggtgcaaaccctcggaggctgggggtaagagacgtacagaggcctccccggacccttcccaccttagggttccacctggcacctgcagaggggtgctactggctgagtccccctcccaatccctaccaccagaccctcccggcctccctccagaattcagccctcagccccctgtcctctgtcccagcattccgccagccctcaccctgcccccttaccctggctctgctgagctgcccccaatgaatccatagcggtcggcctggcgatatgggccaggcccgctgagctctgagtcggaccccaaggagctggagtcatcctgcagctcgggaggctgcaccaggtcctcccccagggcctgggccatggtgcccggggccttcgatgccacaggcagagaaagtggggagaaccagtgtgaggggccactcccggccagcctggggcctggctgcggggtcagaggggggaggtttcagggtatctcaccaagccccctatgtctcctcttttatgggggcaggggctaggccctgccctgacagaaaagccaggcctctgtccggagacccagccccaagccctgcccctgtccccaccagcccagctcacctcccgcagcacctcacctcctcctctcacttcctcctcctcctcacacagctttggcaaccgctgggggcccctcccaagggtggggggtgtcaccccttcctctctgaggctcttcctgcctgccccagtgcccctgagctgtgggctcctcccaccttccccatggccccagtgactgcaggcttgagttcctgtgctggtgtggagggcccaggactgttagacgcaggggccgggccacctccagttcttttgtttgtttcttttgagacagagtctcgctctgttgcccaggctggagtgcagtggcgcggtctcagctcactgcaacctccacctcccggattcaagtgattctcctgcctcagccccccaagtagcagggactacagacaagcaccaccatgcccggctaatttttgtatttttagtagagacagggtttttgccacattggtcaaactcttgacctcaggtgatccatccacctcagcctcccaaagtgctgggattgcaggcatgagccactgcgcctggacttcatgtttgtttcttgagacagggtcttgctctgtcacccaggctggagtgtaatggcacgatctgggctcactgcaacctccacctcctggtctcaagagatcctcctgcgtcagcctccacagtagctgggactgcaggcgcgcaccaccatgcccagctaatttttgtattttttgttgagacagggtttcgctgtgttgcccaggctggacgcaagagaccatcccgccttagcctcccaaagtgctggaattacaggcctgagccaccacggcaggcccacttccagttctgaggttactggcatgtaaagcaccaactcagggttccaacaagaattaaggttcatttatcgtctgctcttcttttttttttttttttttttgagacagtctcgcactgtcgcctgggctccacttcccaggttcaagcgattctcctgcctcagcctcccaagtagctgggattacaggaggctcccatcatgcccagctaactttttgtatttttagagagatggggtttcaccatgttggccaggctggtctcgaactcctgacctcaaatgatccgcccgcctaggcctcccaaagtcctgggattacaggcgtgagccactgtgcccagccacgtctgctcataaagtaattatttttatgtgcacaccctgcaatattactgtgctactcaaaagctaattatggggccaggcttgttggctcacgcctgtaatcctagcactttgggaggtcaaggggggtggatcacttgaggttaggagttcaaggccacctggccaacatggcgaaaccccacctctgctaaaaatacaaaaattagctgggcacagtggcgcacgcctgtaatcccagctactccagaggctgaggcaggagaatcgcttgaacccgggaagtgaatgttgcagtgagccaaagtcgcgccactgcactccagcctgggggacagagcaaaactctgtctcaaaaaaaaaaagcgaattatgggacttataagaaaatattaatttagcatgccccaaggaccaaagtgcgctgggaattcagccgtagctgtctttgagtgtggtcagccgcctgggcgccacagagacccacgaagaagtggggggtcctccgtgaatgcgaggtccaggctgtttttatctcttgagcctcagtttcctttcctgcacttggagcagttaaccctcagtgcctagcagccggttattaacatgttcacaacaccttccacccagggaaggggtgggaaagtctgttgggcttttgaaagagaaaaacaacttccacagtccttccggccccacatcctctgaacagggctgggcgcctcctctggggcgtaaccagcttggtcacgcccccgacagaccccgcccccagcccgccgccgaggccccgccccccgggccg

SEQ ID NO: 1884708 - DNA, 4001 bp, Homo sapiens; identical to SEQ ID NO: 915632

SEQ ID NO: 1884709 - DNA, 4001 bp, Homo sapiens; identical to SEQ ID NO: 915651

SEQ ID NO: 1884710 - DNA, 4001 bp, Homo sapiens; identical to SEQ ID NO: 915653

SEQ ID NO: 1884711 - DNA, 4001 bp, Homo sapiens; identical to SEQ ID NO: 915660

SEQ ID NO: 1884712 - DNA, 4001 bp, Homo sapiens; identical to SEQ ID NO: 915661

SEQ ID NO: 1884713 - DNA, 4001 bp, Homo sapiens; identical to SEQ ID NO: 915663

SEQ ID NO: 1884714 - DNA, 4001 bp, Homo sapiens; identical to SEQ ID NO: 915668

SEQ ID NO: 1884715 - DNA, 4001 bp, Homo sapiens; identical to SEQ ID NO: 915669

SEQ ID NO: 1884716 - DNA, 4001 bp, Homo sapiens; identical to SEQ ID NO: 915675

SEQ ID NO: 1884717 - DNA, 4001 bp, Homo sapiens
tccttgtcagccctcttaccttggcctgaggcttcattgtctccagtcaggcgactatctcatagtcacactccactcacggcagccacattctgtattccagaacagcacttcctgacagcactataacattttctagcagccacatttaagaggtcaaaaaacaagtgaaatattttactaatatattttatttaacccaacatatctaaaatatttaaaccatatttttaaattactgaaatattttacattttaaaaatattgtctttgaaattaagtgtatattttatacagcacatttcaattcagtctagccacatttcaaatgctcaattgccacatgtagctagatagtggttatactatggagctctaaaattccgcccagactgagtgtgcttggtgtttctccattaaacagatgaggcccatcagtctgaggcacaactatgtattttctctaagtctctgtacccccaaggccttgaaaacaattcggaaggaagagaaggcctatgaggtttcagctacagcaggcactccctttagatgccaagcctagaaaaccctaaactgatgcctaacttgcagctgaatcacctttcagcaatcagattcagtgcctcaccaacacatttgatccagggagtctccagtttgtcctttgtccagtagaagacccactacaaagccttgataattcatcaaagtgacagcaccttcactgggcagtctggtgagaggacatctagccctgccaccctggttcctgttgggaacagtatcagatacgttgtgttagattcacatgaatctaagaatcacatgggcgaaaaatattgagagcattctgttaaaacatttccacaaattgggaaaagaccatctttaaaaatctgttggggccgggcgcggtggctcacgcctataatcccagcaatttgggaggccgaggcgggcggatcacaaggtcaggagatcgagaccatcctggctaacacagtgagaccctgtctgtactaaaaatacaaaaaaaaaaaaagaaaaagaaaaagaaaaaaaaaattagccgggcggcgtggtggcgggcgcctgtagtcccacctactagggaggctgaggcaggagaatggcgtcaacccgggaggcggaggttgcagtgagccgagatcgcgccactgcactccagcccgggggacagaacgagactccgtctcaaaaaaaacaaaaaaatctgtttacagaggtaaaaacacgggtattacatggagcataatttgaaatccattccctcatattcagccaagaactacaggcccagagaagggaagtgatttgccaaaggtcattcaacaaatccctaggggctgtgatgatccgtgtccttgccattacctcccttgtctccactaacaaaaatatttcaatgggagaatgtgccgatctaaggcactcctaaagtacttgctgagaatgacagccctggggagacaggtcggcagccctgaacaggcactgccttacccgggcgtagtgccccaattcgccacctcttggagtcctaggcggaggatactactggggcagttgtttcgccaattccacatctcccggagcctggcctggcccagcccagccccgtcgctgtgacccacttcctagctgcaggctggaccaaggggaggcacatggggagctccacagggaggccacgcccacgagggcagctcacagaattagaaagccgacggggtgctgtggtcaggaggcgcgtgggcggcaggttagtacttaaggtgcagagaccacccccaaccctttgactggcggtgggcatcccggaaaggcatggctcggccaattccagccccgtttccacgctcagcacccgccctgcctgtgcgcgaacggctccggcccgcacgggtcgccagaggcgactgtgtgacactcggagtttgctggggtctccgtgggcgggaggactttccagcgcaatggcgactccctaagccccgcagcttctgcgcccgggaaagatatccaagagatgcaaagctctactgggcccaggctgccaccccagaggcccccttccgtcccggggccggggctaggccaaggcgggcaccaggactgcccagcctcccggcccttcgcactggtaaccggttccggggcggatgctttttgcatctgacccggcgcgcccggtgacgccttcgcgtccagacggaagtgcgggcggaggatccccagccgggtcccaagcctgtgcctgagcctgagcctgagcctgagcccgagccgggagccggtcgcgggggctccgggctgtgggaccgctgggcccccagcgatggcgaccctgtggggaggccttcttcggcttggctccttgctcagcctgtcgtgcctggcgctttccgtgctgctgctggcgcagctgtcagacgccgccaaggtgagtcccgcccagcctcgctcctgacggaagctcctcccctaccaccggccttgcggaaactgggtctgccaacctgctccttggcccattcctgacagccatacgcctggcctcacagctccggcagacccccgccgccaccagccccgcccctcccgactgcccggcggcactctcgccctcagccccgacagcctggcaggcagcgccccacggtcgtccccagccccgacagtgcccacagtccggacagcagccccccaccgccttaacatttcccttcccagccccggctgcacgcatcttacacttgacaaccttttcacctccgagagcctttaactttccaccctaagctcttgacagcccacctgcgccctccgccagcctcacaggccccgcatgccccaagccagaatgataggaagcccccatctgacagagccttccctgtcaagggccgactcagctcagctcacccctgaacacttcccttcctgtggtgggaacttgcccctcctggcctacttccctcccaatagggcctacggagcatctctcacctgcttcatattctcacctaactccctccacgagtcccttggtgcctttcttgctttctctcttcctgataatttagtgggtaagggaagaaccaaactgcaagagaggtgaggttgtggcctccctggttcgatttcttgaccttctagttccctcatactgttctctggtgccccagctctccagacctgccctagctccatgcatacctgtgcttcctctttgatgagctagctcatcattgggggagaacagaagggattcacattagtatgatgggaaaacagaatgacattgcgtttttaaaaataagagctttaatttataatatctttaaatgtaggagtggggaaaggttacaggcaggcaaatgtttttgattcagagattctttttgaaaccatctctacctcctaccagaaacagggacagcagcacgtctcctgactttgaaaacattgctggcaccctctgcatatcttgcctcataactttatgtattgtgatcatgtatttatttttcagtctcctttactagggtgtgtcctggttatgggcagaaaccatgtcttatgcttatctgaatccaccttattgagcacaagatctaacacagagcaaatgctcactaagtggttgctgaatacgtttgtgaattgtcaatagctctgccagacatatcactgtatataggaggagtgggcaaggtcctctggggaatgataagccacttccttctcaaacagattcccctttgctgaggaagcatctcttcttttctctatccagatacttagtcacctgttcctccacctcttgaaacttgttttgttggtagttgttctgtctgtcaaccaggaattagaagcaaagtttcctgggaagagtatactaaactgatctcagagtcaggctacttcctgtgtgtacttcctttctagttgtaggtgggtgcctctaacatttc

SEQ ID NO: 1884718 - DNA, 4001 bp, Homo sapiens; identical to SEQ ID NO: 915682

SEQ ID NO: 1884719 - DNA, 4001 bp, Homo sapiens
ccattttacagatgagaaaactgagactcagaaaaatttattaacttgctcaagacttcatggctgggaagaggcagagctggattcaggccagtgtccctgcctcagagttcaggaggagcaggatcaagggacaacccccttctgatcaaggcagctgagacccctcaaactgcaaagaccaacctaggggactatgagcaagtctgtaaaatcatgcaaagaccagatggggctcctgggggcttgcaaaggtgctgaaaatgtgcacggtgctgagcaggtggcgcaccttacagaatctttctccccatcatcttgtgaagtcgcttttattgtacccacattccaaagaaggaaactgggtccaggagctgtttagtgacttgctcaaaagttgttctacagatggaggagtcagatcttcttcttctttttttttttttttgagacagagtctaacactgttgccctggctggagtacagtggcaggatcttggctcactgcaacctccgcctcccaggttcaagcgattctcctgcctcagcctcccgagtagctgggattacaggcacctgccaccacgcccagctaattttttgtatttttagtagagatggggtttcactatgttggccaggctggtctcaaactcctggctggagtcagtcccaatcagttccttttccctccctgccatttccctccctcttaaagtttaaaggacaactcaggacaagcaaaagtgagtacgattcttgaaagatggtataaactctgtctttgaacctttttaaattaacgtcagactgctccatggatggcaggtcctcagttcaggtaaattgcaaggttgagagaacccctctaagctttaaaatccatcagcccttcccaatggcaaacccatgagggtccctgccaggctgaaaggctgaactgtgtggcgggaccccttctggccctctcgagtcccctccagccattgtccaggcattgtcctcaggtgtgcaaagatggtggcaccttccttcctatcagacccttccaggaggggaaggtgggctcagatggacccaccactctggaacagagggaaagctgagcaaagtagagctgttgagagttcagaaaggtgggagagaatgggctgcttcccctaggacaaagagaaggatcgcagagggattcctaagcactgcagtaaacagcagcatcacctggaagcagggccctccagtgggaaccaggtctgtcttcagtttaatttagcccaaggggcatgtacaaatacctcactcctgcccttcacattgtctctggggaaaaagcataagcgctgtgcctcagtttctccatttgtgaaataggaatagttacatcttccctgcctccccagccctatctgaacctaagagctatgcccgaacacaaaagctgattcttaaatgatgggagctgaacagcaggctggcaggggataatggcaggctgcctgactcctcccttctgccccaggccctgccctggagccattatgtgctgagatgggggatgaggtgctcggctcaaattgccaataggtcagcacctatgtggtttagaacaaggcaaaatggtttctaatgtagcagccaaggctgaggttagacccaaaggaaaaagtgctgctctaataatgactcaacgcaaggcagtgtttgtgaggatgctccctgaatttctgcgtgagagcttagatgcccagcggcatatggcctgggctggtggccgacctgcctagagacagagtaacaggtgcgatcccaggatacttggaagtcggcatgatcagtcatctctgaggacctcccatgcactctgggctgctgcatcaccaccaggctcatctcaggaaactcactccctcctctcctgccccatgatcttccagccctcagtgaccctctccttacctgtcatggctgagacatccaagagagagagccctgttgccagcgcagcaaaggcatcaaactgcctattccagctgcaagtggagaggacacagctgcttgccgttggttttggggagggatgcaggttctggggtcagagagcagagtgaggctccctcagaggagcactgtggccgggccccactctgcaagctgacggcaagcacctctgggtctcttggcttacccgaagaactttccccaccccctcccttgggttttccccactgcttattactggcctcagcaacctaactgccacctgcccaagcctcaaaggacctgtttatcccatcacctagcaacagcaccatctctggctctaggttttcctatgagaccatgggaagccagggccttggactccagggaagactgaagctgtcaccctcttttgtgtgcccctgcttttctctctttgtccacactccagtcattccagctctgcccttactgacttctttccagagcaagtcaatgccaagtcagcattgcagagaggaagagagaaatcaggccccagggacaggatgcttggcaagggaggcagacaggagctggccgagctttctgttcctttggcctccttgagctgccgcctcttcttcctctccttattagcctggtggacttgcctgtttcattatgaggttattaactctttcatcccatctctgaagggcagttcccaattacccaaagggatcttgaggttcagagacattgaggagtgtgcccaaagccacacagcaagtcagaagacaaggcaagatgagaactcatactctccaggctggtggcttctctgcagcacactttgtggcttctctgcagccacttaagcttcactccatttaaaaacaagagctgccttgtatctgggttcattctctctgagctggaaaggaagttgaccttaagatgtctgtttgctttttggagctgagctaagcccaaccaggaggttccccatgatctaaaacagtggtaggggtggggaataggaataaaggaagaagaggcaggtgagaaaggtgggaacttatggaagaaagggaagaacaaatgctaatatcaataaagcccctcctgggaaccaagccctgcaataggcccctttcccaacatgctctttgaggtctcttgaccgcattcatggatgatatggcagagcccagaactgagcaaagtcactctaccttcacaccgaggaagagctggagagatgctgggggcaatctctgcatgatgactgcatgctggttatatccaacaaggctgcattgcaagggaggagtgattcaaaaggacccagcaccagctaatgactgttaccgaaatgagttcctgaaaccatggggaaatgaaatcaacagtccaccaagtccagaaacccggcccaaagggctagatctgttccttacttgctccgaagccatagcagctgccttttctgtaaaatggggacaatttctcagggttgttccatggattatataggacagcatttatgaaagaaagacatcgtaaattatataataatactcaactgcaataactaatggttctgcctccatatttgggtcttggattaatgtcttcctctgccggtgacaaaccgagaagcaggaaaagaagattctctgagttgatcaggcaatggcaggttttccagtgattgaacacccacccacttccacctccccacctcacccgctacctgggccctgggggcctgggcattcttgcccttccactgtactgcacacagcaggagcttcattcccggatgagccccaggtcagacactggctgggctggacccatgagtcagggctctgcggcagactgaatcaacagagaagacaggcctggcccagccagtggcccaaacagaaagggaaaggccaatgcctttgcttggtctgggctgggccggggctgtaacagttgtaggcagaagctgagttcaagctgggggtaaataaatacatctccagca

SEQ ID NO: 1884720 - DNA, 4001 bp, Homo sapiens; identical to SEQ ID NO: 915683

SEQ ID NO: 1884721 - DNA, 4001 bp, Homo sapiens; identical to SEQ ID NO: 915684

SEQ ID NO: 1884722 - DNA, 4001 bp, Homo sapiens; identical to SEQ ID NO: 915684

SEQ ID NO: 1884723 - DNA, 4001 bp, Homo sapiens
gctgaatctagtgtttagcggaggtcctggtgggagatacagattttaggatcatcagcatatggatggcatttaaaggaatggaactggatgagctcactgaggatgtagatagaaaagatgtgcaaggactgagccctgaggtaaggcactccgatgttaaggagtcaaagtgttaccagtgtgccctggcatcttgtaatctcccaggatagaaataaagagagatcagcagacatagcagcgaggagaaagagaaatctttatttagcttgtgcacaaggaagtcagcaccatgaaaggaaaacggtggggggccccgccgccagggggtggcacgtgggttagtttcacagggaagggattggtccaggcatggataggaggggtttgtctagtgcttctcagtagctttgcatgcttcttcatgcattgcatgcaacattcacattttaaatctctacccctaggtgtgatttttagcgtgaaaatgaggaaggggtaacaatagttgaagtataagtctaactgcacatgtggggcccggggaagtccctaggcccccaaagcaggaacttgtggttaatagcttcttgggtcttgtgctgtggattggctggatgttaagctacaacttgaggaaggggctttcgttctttttctctacaccccatcaaaacaggcaagcggccaggctgccggttttaaaaggagagactggtaaccgagacccaaagatgtggtctttgggataagaggaaagtgagagcacatggtgtcctggatggggagtgaagaaagcatgtgtagcaagaatgactatcgattttgctgtagttcccggaggacgaggactgagaactgaccactaacaatatagagatcactgacaaagagtttttagtggagtggttgtgttaccggaaaagggtcctgatccagaccccaaaagaggattcgtggatcttgtggaagaaagaattccaggccagtccacagagtaaagtgaaagcaagtttattaaggcagtgaaggaataaaagaatggctactccatagagcagggtgttcccaaaagcacgaggaggaaggcgtccacctgggtacgcttgtttatatgtaagataaaagccaaaaaacatcacgggggagacgtgctgtactacctgggctcgtcaaaggattgccaatctttgcataacgcctgtcctccgcaagcatctgtatcattatctttaaagcgaaacttcaactaagaatgcttcttgttcttaagatacccggacatcgggacctaagttccgggtctgctgcgtaaaagtttattaacctgttcccgtgaccgtaaacgcccgactcctggggatgcagccagcggggttcagcctcagtttacccagcgctgttcgagctggagtcgctctggttggagcgcctgaccgcgagggccgaggtcaggccggactggggttctccggagcgagcaggagaggagcggggctcctgcggagcggcgcggcggggaggccgagggcagggcgggctcgagctcgggctcttctggcagcgcctccatccccgttccgttcacccggcagccgccccgtggaggaaccgcgccccatctttagccctgtgaaacagaaaggcccttcctccggcaggcagctgagggaaagatcgccctgcaggggatgtcgggcctgtcactgctttgttgcgggccacagttccctcccttctccgagcgggtcgcacgtccgaaggtcacccccgccaggtggctaggccctgtcgccactcgacagaggaccgaggaggaaccaacccactgcccagactgcagcgccgccacgctagggcccgcgccgacaaccgtcatgactgggcatgcgcaaacggccccgccgggagccatttcgccgggctgcagggctcgaggagagagcaggtgcgcaggcgccgggcgagaggctgcgcctgccctaccctggagcgcgcgtgcgcgcgagagccggaaggggcggtgcctggcgcggcgcctgcgcagtggggcggtgccgggggcggggcgcggcggctgtcagctgactgtggcggcggcggcctcgaggtgacaactgtctccgtcgcaggctccggcgggggcgcaggaggtcgcccggcgcgtcactgtcgggtcggcgagccacgggggccgccgcagcaccatggcgaccaccgtcagcactcagcgcgggccggtgaggcagccgggcgagggtcgggcgggggcggtgacctgcggttgcgggcggggccttgggtcagggctactgctcagctgcggctggcgggccgactccgcggctctcccggggcacgcggggcgcctggccggccggaggggagcggcggcgtccacacctcggggcggggcgggccggacggacgcgcccacgctgcaggaggcttgagctcaccgccgtgccggggcagagctttggggaggcagccccgggggagggggcctgcgcccgttgtgagccccagatggaggcgggccccgtgccccatggtgccccagagggaggcaggccccgctccccaatggtctccagatggaggagggcccggtgcccagatggaggcggccccgagctctgactcccgaatggaggagggccccgcaccctaatggtcccccaggtggaggcgggccctgaaccctaatggtcccctagatggatgcgggccctgctccctgatggccccccaggtggaggcgggtcccgcaccctgatggcaccctagatggaggcgggccccgcaccctgatggcccccccaggtggaggcgggtcccgcaccctgatggccccccaggtggaggcgggcctgcactctagttggtcccatagatgatggctgtttcctctttctcatttacacagagtgagggcagtggtgaccacttcttgggcccaattgtgtccccggttagtggccaccgtgcaaaacctcagtttcttcatttgcaaatgagaggataggcgccaggaacttcagagaacctttcctgctctgaattctctcctgagagttgcctggcagtttcttctatagcattaatattgcaggagagctggtgtagactgactcagagatgatgggctcctggcgtgagtggcctcctggctcactgttagggccttcttgcattgctgtaaaggaataccgagactgggtaatttgtaagaaaagagatttaattggctcccggttctgcaggctgtacaggtagcatggtgccggcatctgctcctggggaggcctctggaagctcccagtcatggcggaaggccaagtgggagcttacacgtcacatggcgaaagcagcaagagagttgggggtggggaggtgccacacactgtaatgaccagatcttgtgagaactcactatcaccgggacagcaccaagccacgagggatctgtccctgtgacccacacacccaccctgccaggccccacctccaacattggggatcataattcagcgtgagatttggcggggacacagattcaaaccgtgtcactcactgaggctgggctggggcaggctgtcgtgagcggtacagtttttatcaacagtggctctgaacatgccgtgggtggaaaaagtcctttttcacgatgctccaaggtccctgccctcgcgcagcccagtactggacgtggtggaggggtcaccagggctccccacccttaacactgtatccacaagtcctggtgtttctcccgaggagataattcttcaggtagaacattttttctgagtttagaatgaagccccaggttttgggcatagctgctttttctgaggactttgaaggaaacctcctgacacttatgagactcaggtgtggagcctacgggtcggcagaggtcctggacggcctctgatggcagcgtctctacctcttcatctttactccaccacagtgagtccccgcaagttgcc

SEQ ID NO: 1884724 - DNA, 4001 bp, Homo sapiens
ttactgcacatgctgttttctatacctagaattattttcatatatatatacatgtttctcatatatgtgctcatatatatatttctcaaataaaggtatatatggatatatgaggaatatatacatgtatgtgtgtgtatatatatgttcctcaaatatatccatatatatatataccaacacccagatactcatatatattcatatatttacgaggaagaggaaggtaaacaggaggatatacatatttcctcctgatcaagattttgtttcagtgtgaatttttccatgagcctttttttctgaccaccctatttaaaactcaaaccctcatccccagtccctggcctctgtgctcctttggattattctccaaagacactactacactctaacacatcatgtacttcacatatctgcatggtgaccatttgcttttctcatttccatggcatgatttgtgtgttttctttcttctttacaccttaattttctaagttgatatttgacatagactaggtactcataaaatatctttcaatgaattaatattagaataaattaatgaagtaatattagatatcataccctcaatataaacatccacaaagagaaaatcatttctagaattcttctcaagtccttagagttctccttatattaaatactagttcccatgtttctcacatatttctgtcttcatcaagacaccagtctacatttctcgccacatttcccgttatgtgttatgacttattcaatattaattagtgctgatatttcatttcatgctttccctaaggttgcactcttgctccttctgcctgaaatttagctcacatttcaatgtacttgcccaccaggattcaaattcctactgactcagccttagaagggtcacctgaaatttccatgactgacaaataactcttgtgtccagaatttatccaggcagcccattgggaacagtgtgaaatggcccagtttcttgtatttgttggggtattcctataggtttgtatggaaacagatgagcatgcttgggtaacatctgtggtctgattagaaatcctaccaaagagtcacactaacttatataagcaattagggtgtttttttctcaagtgttttttccttgtttattgaattccggaaaggttatgggttgagatcaagttccgattttaagagtcacccatttgttcactataagttcccggagaaggtagagtaatacggtactaaccttccagcatcttgttctggtggtttccatgttcaggtttctgagattttcacaagctttttcccacaaagactgcatttttttttaggagctcctcctgaaaaagagccatgaattgaagcacaagtgaggacaataaagtatcattcacactctcatatatgaaggaccccaaatgagagacaaattagcccacagaaaatagagtttgctttgtttctcctcatgtttgtcaaacgtgagaagtgtgaagtcaaggaagctcataacagacatgcttaaggggacacagagatggcatcatccaatctccaaggaaatagacttacaagaatttcatgtgtcctgtatagaaatagatcttcagaggcatcacttacccggcgttcctcagcagcccactcaatgggacagtgtctgtgattccggtgctcctgagagttggaatacagcaaacagagcaggctcttgtccacttcacagaacatcttctttgtctctctgtgcatcccacatatttgctcttcagagctaaggaattgccggaggctggcttttctggcaatggaagccatgttcttcaaacaaatgtcagtgttgaggtttctctgccatgttgtctccttgcatttagagcactgagcaacaactgccatgtcttgccagttgaggtagaaacagggccggcaaaagctgtgcccacagtctatggtgactgggtctaggaagtagttcatgcagatgggacaggtgagttccctctggaagacttgcaagattccagaattcatgtttctgaagaagaaagagcagcatgtcattttggggtctggcttggtgaaaatctgtgaacatgtggtgatacgtgatagctatattttcttcttgacagtgctcattaaagtggaacaaactatttcctctgtaacaaaaatgaaaaattcatacacgaagagagtcttcaggctttttagcagacactactgactggatgactcacaacctcttctactcctagttcctgcccataacataatgcaaacctgttcaaaaacctattccctggatgtcgatatgaaactcgagttttaatcttaagtggtctagaataaaacctgcttgtccctatttctctttcaaataactactgaatgactatgggagaggagtagaaaacctacattgggtaacaaaacatgagaagatggtccgagggcgctatgacatatttttagagagagagacccagaagccggctctttaaaacaaaaacaaccccagaacaaaccaaccgaccagataaacaaaaagacagcaattaaaccagtctaggatcacaaggagataaaataaataatgaaaaatattgggtttatttttcttatggcttaaattaacttctttttgggctactcaaactatgaactgacatatagtcagttttttaaaaactgaaatatatacagttatattactatggtattatggttaattttaagtgttgacttgactggactaaataatacatggagaattggtaaagcattatttctgggtgagtctgtgaaggtgtttccagagagacatgtaagttggtgagctgagtgaggaacagcagccctcaatgtgggtggacactatccaatcagctggtagctcagactgaagataaagggcagagagaaagcagtttcctctccttctcttgaagctgattctaactcagccaggaaatcggtatctccaggacacaacattaatgacagcctatgttcaacttctcagacttcataatcaagggaacaaattcccctagtggacttcctctcctgtacagtgtcatgtgtagagtgaggacagatatatgatctgagggacgcattagacagtctcgttattgtttgaacatcatagggtatacttacacaaacctagatggtatagcctactacacacctatggtatataatatagcatattgttcctaggctacaaacctgtatggtatacgaaggcaattgtaccacaattgtaagtatttttgagatatatatatatatatatatatatatatatatatatatagttatgaacacatcctatggttctgtctctctggagaaccctgaccaatacaaaatgtaatctttgccttggcagtttgaagtcctttaccttactctcttttactaaacactgctgaatttaagtgccaacagtgaaaatttaagaattgcaaacatttttcagaggtcatctgagccatttcaaggaatttttcatagtttcatctgaggtaagcctcagttaaaatgacaactagtatcaagtatcaaatcattccttatacagttatctgctaaacaattgtgttttgatttctaagctaaggtatttttgggagcattcttatttcctttagtatcaccatttttaactcatcattgcctcagtagcttaaaatcatgtctaaaagcttcaggttatgaaagcacaacatttacagtattcaataattatccttttttacttaattaagtgtagcaatattagtacattcagtacacatatatatgttttaatgtgaattccatatattcatgattcatacatatatattgcagcaaacactagatatctaaaatttttcaaaaatatattaaacacttttggaacatacaaaatgacaacaattaataacctcatgtcataaaatgaatagcaataatatgagttacaaataagatcattcagt

SEQ ID NO: 1884725 - DNA, 4001 bp, Homo sapiens
catctctatggtgtgatggcgaattttaggtatcagtgtgactggattaaccaatacctagggaactggtgcagcattgtttctgggtgagtctgtgaaggtgtttccagaggagagagacatgtgagttggtgagctgagtgggaccatcatccctcaatgtgagtgggcaccattcaatcagctggtagctcagatagaaggaaaaagccagagaaaaggcaatttcctctttctttctcctgaagctggttctgaggctttcagccttgagctcagtcaagataccggtatcctcaggacatcagcttaaagacagcctatattagaactgctcagactctataatcaagcaaacgaattttcctgatgaattccctctcaggtagagtcatgtgtagcttgatgacagatatatgttctgagaaatgtgtaaggaggttttatttatttactttttgagatggagtctcactctatcatccaggctggagtgcagtggtgcaatctcggctcactgcaatctccgcctccagggtcaaagcgagtctcctgccttagccccctgagtacctgggattaccggaacacctcactacacctggtaaattttttcatttttttttcctttttttagtagagatgaggtttcatcatattgcccaggctggacctgaacacccggcctcaagtgatgtgcctgccacagcctcccaaagtgctgggattacaggcatgagccactgtgcccagccaggcggttttattgttttgacattatagactatacttacacaaacctagatggtatagcctgctacacacctatggtatacagtacagcctgttgctcctaggctacaaaactgtacagcatgttctgtacggtatactgtaggcaattgtaacacagtggtaattatttagtatgtaaacatatttaaatacagaaaaggtacagtaaacacactggtattataatcttatgtgaccaccatgtgtggtttatggttgactgaattggctcatgaatgtatctctacatgtatacatatacatcctatcattctgtctgtctggagagccctgactaatatataaactatggtctttggcaattttaagtccttttctttactctcctttatttgataacactgctgaattttagtgaaagaaatgaaaaatcttagaattgtaaatattctccagaggtcatctaagtcattttaaggaatttttcatagtttaataagattaagactcaagtgagatggcaaccaccatcacgtatcaaattatatcttataaatttatttggtcaaaaaactgttttgatttccaaaccaggatgttttggggagctttctcatttttttcagtttcactgttttgcatctctcatcattaccttgctaatttaaagttatgtctaaaagctgaatgaatgaattaacattcattaatgtcttctcaattcaattgtttaatattaatgcactcattacacatatatttacacacacttatgtgcacatatatgtattaatatcaactccatatgttcattatgcatacatatctgttgcagcaaacactagatatttccattttttcaaaactatattgaagatagaaaatgcaaaataacaacaattagtatcctcataattcataaaatctatagtaagaatatgaattacaatggtatcattgtgtagatttaagataatgagatatttttaacactctaatttattattttataaaggaaagaagatataattttatcaatataagtttcactcaccgctgggttctttgaatggttcccacagtgattcttccagaaataattctgttaagtactcctcaagttctggagctcattcaccgcagtactgacttttagaggtcaccaaaatacagctccctctaagtgtgctccttctcctttggagaaaactgagcttgtctcttctatgtccttttataagaatctgtgaagaccacacccacctctttaacagggtggagtattgagaaaggtagaggataagacgattaggtttatgcagtatttagaacacacctttgcaccgctgattaaattatcatcactccttcattccaaaaaaccgtgactgaagtgaatcatatgtaacataaatcctatgagattacacatacactagaaattaactaagatgcattttatactgtttattgagtttcatccaagatgcaggcattcctctaagggcatatttatttattctagagaaactgtctccttgtggagtgcagtggtacaatcatagctcactgcagccttgaattccaaggctcaggggatcctcttgcttcagcctcccaagtagctaggactacagtctcacaccatcccacttggctaatgttttttaaaacttttcatagagtcagggtatggctctgtagcccaggctgttctccaattcctgtcttcaaatgatcctctggtcttggacttccaaagtgcttgggagtacaggcataaaccacctcttccaaccctaaatgctgctttagtacatttataggctattcccagagaagtccaacaggaagataaaactttttttattttccaccactctaagagaaatcactgattaaccaaataaccccactaatttgaggtctcttattgaatttacaaaactttgccaatctcatgggtgaaatataaattattattttaatgcttttctccacatagtgcatgatgttgtatgatgactagaaatgcaatgtaataatttggggattataaacaacttttaggacgtaggctaattcacaaatacagaatccaaatgatagggatggattatatttttctttctataacaaatatttttgttgtcatgtgacaattaaaaaaagaagagatttcagaagcggctactcaaacattttctgacagaggaattctttgccaatagcccccacaagacttatagtcaagagtgcttatgtattttctcagcttattttatgtttaaccacatacaaatcatggagaaaatgtatctatggttatgtgcaatagtcccccttatccacattttttcttttttcttttatatatataatatataaaatattatatataatatataaaatattatatataatatattatatataatatataaaatattatatataatatattatatataatatataaaatattatatataatatattatatataatatataaaatattatatataaaatataaaatattatatataatatattatatataatatataaaatattatatataaaatattatatataatatataaaatattatatataaaatataaaatattatatataaaatataaaaaaaaatatatatatataattgtacttaaagttctagggtgcatgtgcaatgagaacacagtttttctttctgaggtttgagttaccagggatcaaaacctggccaaaaaatattaaattaaaaaaatctacaaataaacagtttctaagttttaagttccctgctgttctgaatatcatgatgaaatctttttcagtcctactttgtcccacctaggacatgatttataccagcacaatcatcagtaacctctcagatatcaatttattcaactgctatggtatggcagtgcttgtgttgaagtaattcatttcttactcaataatgtccccaaatcacacaagtagtgatgctggtcattcaaatatgctaaagagaagccataataaagtgcttcttttaaatgaaaaggtaaaagttttctactcaaaaagaaatgaaaaaaaatatgctgaggttgtgggttgaatcttttactcataaaattgtgaaggaagaaaaacaaatccaaacaagttttgcattgcatttcaaacagcagacgttacagccgcagtgtataataagtgcttatttaagattataaaaacggtcgt

SEQ ID NO: 1884726 - DNA, 4001 bp, Homo sapiens
atctctatggtgtgatggcgaattttaggtatcagtgtgactggattaaccaatacctagggaactggtgcagcattgtttctgggtgagtctgtgaaggtgtttccagaggagagagacatgtgagttggtgagctgagtgggaccatcatccctcaatgtgagtgggcaccattcaatcagctggtagctcagataaaaggaaaaagccagagaaaaggcaatttcctctttctttctcctgaagctggttctgaggctttcagccttgagctcagtcaagataccggtatcctcaggacatcagcttaaagacagcctatattagaactgctcagactctataatcaagcaaacgaattttcctgatgaattccctctcaggtagagtcatgtgtagcttgatgacagatatatgttctgagaaatgtgtaaggaggttttatttatttactttttgagatggagtctcactctatcatccaggctggagtgcagtggtgcaatctcggctcactgcaatctccgcctccagggtcaaagcgagtctcctgccttagccccctgagtacctgggattaccggaacacctcactacacctggtaaattttttcatttttttttcctttttttagtagagacgaggtttcatcatattgcccaggctggacctgaacacccggcctcaagtgatgtgcctgccacagcctcccaaagtgctgggattacaggcatgagccactgtgcccagccaggcggttttattgttttgacattatagactatacttacacaaacctagatggtatagcctgctacacacctatggtatacagtacagcctgttgctcctaggctacaaaactgtacagcatgttctgtacggtatactgtaggcaattgtaacacagtggtaattatttagtatgtaaacatatttaaatacagaaaaggtacagtaaacacactggtattataatcttatgtgaccaccatgtgtggtttgtggttgactgaaatggctcatgaatgtatctctacatgtatacatatacatcctatcattctgtctgtctggagagccctgactaatatataaactatggtctttggcaattttaagtccttttctttactctcctttatttgataacactgctgaattttagtgaaagaaatgaaaaatcttagaattgtaaatattctccagaggtcatctaagtcattttaaggaatttttcatagtttaataagattaagactcaagtgagatggcaaccaccatcacgtatcaaattatatcttataaatttatttggtcaaaaaactgttttgatttccaaaccaggatgttttggggagctttctcatttttttcagtttcactgttttgcatctctcatcattaccttgctaatttaaagttatgtctaaaagctgaatgaatgaattaacattcattaatgtcttctcaattcaattgtttaatattaatgcactcattacacatatatttacacacacttatgtgcacatatatgtattaatatcaactccatatgttcattatgcatacatatctgttgcagcaaacactagatatttccattttttcaaaactatattgaagatagaaaatgcaaaataacaacaattagtatcctcataattcataaaatctatagtaagaatatgaattacaatggtatcattgtgtagatttaagataatgagatatttttaacactctaatttattattttataaaggaaagaagatataattttatcaatataagtttcactcaccgctgggttctttgaatggttcccacagtgattcttccagaaataattctgttaagtactcctcaagttctggagctcattcaccgcagtactgacttttagaggtcaccaaaatacagctccctctaagtgtgctccttctcctttggagaaaactgagcttgtctcttctatgtccttttataagaatctgtgaagaccacacccacctctttaacagggtggagtattgagaaaggtagaggataagacgattaggtttatgcagtatttagaacacacctttgcaccactgattaaattatcatcactccttcattccaaaaaaccgtgactgaagtgaatcatatgtaacataaatcctatgagattacacatacactagaaattaactaagatgcattttatactgtttattgagtttcatccaagatgcaggcattcctctaagggcatatttatttattctagagaaactgtctccttgtggagtgcagtggtacaatcatagctcactgcagccttgaattccaaggctcaggggatcctcttgcttcagcctcccaagtagctaggactacagtctcacaccatcccacttggctaatgttttttaaaacttttcatagagtcagggtatggctctgtagcccaggctgttctccaattcctgtcttcaaatgatcctctggtcttggacttccaaagtgctttggagtacaggcataaaccacctcttccaaccctaaatgctgctttagtacatttataggctattcccagagaagtccaacaggaagataaaactttttttattttccaccactctaagagaaatcactgattaaccaaataaccccactaatttgaggtctcttattgaatttacaaaactttgccaatctcatgggtgaaatataaattattattttaatgcttttctccacatagtgcatgatgttgtatgatgactagaaatgcaatgtaataatttggggattataaacaacttttaggacgtaggctaattcacaaatacagaatccaaatgatagggatggattatatttttctttctataacaaatatttttgttgtcatgtgacaattaaaaaaagaagagatttcagaagcggctactcaaacattttctgacagaggaattctttgccaatagcccccacaagacttatagtcaagagtgcttatgtattttctcagcttattttatgtttaaccacatacaaatcatggagaaaatgtatctatggttatgtgcaatagtcccccttatccacattttttcttttttcttttatatatataatatataaaatattatatataatatataaaatattatatataatatattatatataatatataaaatattatatataatatattatatataatatataaaatattatatataaaatataaaatattatatataatatattatatataatatataaaatattatatataaaatattatatataatatataaaatattatatataaaatattatatataatatataaaatattatatataaaatataaaatattatatataaaatataaaaaaatatatatatatatataattgtacttaaagttctagggtgcatgtgcaatgagaacacagtttttctttctgaggtttgagttaccagggatcaaaacctggccaaaaaatattaaattaaaaaaatctacaaataaacagtttctaagttttaagttccctgctgttctgaatatcatgatgaaatctttttcagtcctactttgtcccacctaggacatgatttataccagcacaatcatcagtaacctctcagatatcaatttattcaactgctatggtatggcagtgcttgtgttgaagtaattcatttcttactcaataatgtccccaaatcacacaagtagtgatgctggtcattcaaatatgctaaagagaagccataataaagtgcttcttttaaatgaaaaggtaaaagttttctactcaaaaagaaatgaaaaaaaatatgctgaggttgtgggttgaatcttttactcataaaattgtgaaggaagaaaaacaaatccaaacaagttttgcattgcatttcaaacagcagacgttacagccgcagtgtataataagtgcttatttaagattataaaaacggtcg

SEQ ID NO: 1884727 - DNA, 4001 bp, Homo sapiens
gtgtgtgccaccatgccgggctaattttttttgtatttttagtagagacagggtttcaccatgttggccaggctggtcttgaactcctaacctcaggtaatctgcctgcctcggcctctcaaagtgctgggattacaggcatgagccaccacgcccggcaggttatatatttatttatttatttttgagacggagtctcgctctgtcagccagactggagtacagtggtgccatcttggctcactgcaacctctcaatctcaggttctagcaattctcttgcctcagcctcccaagtagctggtactacaggtatgtgccaccacacccagctaatttttgtacttttggtagagactgggtttcaccatgttggccgggcttgtctcaaactcctgacctcaagtgatccacccgccttagcctcccaaagtgctaggattacaggcgtgagccaccgtgcctggccaaatttggttattattaagaatggaggccgggcgcagtggctcacgcctgtaatcccagcactttgggaggccgaggagggcggatcacaagtcaggagatcgagaccatcctggctaacacggtgaaaccccgtctctactaaaaacacacaaaattagccgggtgtggtggctggcgcctgtagtcccagctactcgggaggctgaggcaggagaatggcgtgaacccgggaggcagagcttgcagtgagtcgagatcacgccactgcactccagcctgggcaacagagcgagactccgtctcaaaaaaaaaaaaaaaaaaaaaaaagattaatgggtactaagtccaagcagtcaaagctgaggacagagcggtctcccagggagggaatgagatgctgagattctaaaggaatgacacagggatagctgggagtcagaatcccactgaacaggagttatcaccagaagagtcagagtcacatgtgagaatgagctggcctgccatggggaggccagaaaattcctggggtggggtgggaggttctccctccagctaagctgagctaaagttgttaatattaatagatgcagctaaggtttttcccaccaaggacactcactgtagtcctacctcaggctgaggattcccagggaggcaggcattaactatggggcctgattaggtgagaggccaggatttgctggacatgattaggtgatgagcaccaagaaggccagttaaggtcaggggctcaaagagctgagtggaagggatccaaagggacccctgagtccactgctttttccttaatgatgggaaaactgaggcccacagaggggtcatggagactgacagaactgggactggaactcccaaccaagggctttttctgctatctatggttcctaatcttttctggggtcatggcctctttgagaattagatgtaagttgtagaccctctctgcagaaacatatacacttaccctccaaattttgcctgtagtttcagggggtcagaggtctttggagcgcacgtctctgtaggaacacaggtcaaggattcctgtgttacccaagagctggggagttttggaaggaagtcaagtggagtctacagagaggagcgagctcagagcagggccggtacgcaccggatcatgtcttcaatcatcttgccaatggaaatctgcagagtgcccagcgactcgtgggccggcagaatgtaggccaggcgggtgaagctgagcatgctggtggcagtgaagagcacctcagccaagaactggggatcctcggtgtgccactcgcttcattctgcacggggtggaatgggggctgtggctgggagccaagagccaagaaagaagaactgggggattcagggctgaattgaagggacactcaccagccatggtgaaatagtggcaggcagccgcttgggaggcgtcccggcagtgcatgggggcaagcccagccaggaggaggcgcagtgcgaaggctgccaggtacagggacaggacgaccatatccaggaagttccaccagtccaggaggtaactgcgcaggccctcaatccacacttccttgcactcaaaccacaggaagcctgaagcggggtggcagggagccaggacagaatgggaccgaacttctccttctatgtcagagctagattacgaggcaggggtaacctatgaatggcagtgaggtgctaaaacattatggggtgaagtcaatgacatgtaaacatgtaatctactcaggaacaggtgatcttatgtgaacataaaaaagacgccttgctgatgcagacactgctggtgtgacctgaaccaatgatcccagtcagcggatactccgaatgtgagtatcacctgggacaggctgtctattaggagggaatgactgaaatttgtttctctgtgccctccatcaagtaaatactggacaaataactgaagaatattgatttgagcctgggtgcggtggctcacgcctgtaatcccaacactttgggaggccaaggcaggaggattgcttgagcccaggagtttgagaccagcctgggcaacatggtgaaaccccatctctattaaattatttttaaaaattaaaaaatacagagtatcgacttgaaggggttccaaattctcaggctgctcagggtgcctgtgttccagtgaggcccagtaccagacctggggctgggggtcttgggagctggaccccataagctaggtggccctgccacattgcacccttctcattccctggatacaatcacatgcttttccactcatggtttgttccctgtgcctagaatgtccttccacatcttctggaagcccagctcacctttgtggcccaggtcgcatgttatcttctccaagtagccttccctaagcaggtggagtgaatttcttggggttttgtgttctcacagctcatatctctgtgatcccatcactacagggcactgcaggatctctctccacaggtctgtctctaccctgcctccccctgaacttggagcccctcaagggcagggactatgtccactcatctctgtccctggtgcccagaacaaattaaacaaatatgaaaaagaatgtatatatatatattttgagacagagtctcgctctctggtccccaggctggagtgcagtggcccgatctcggctcactgcaacctccgcctcctgggttcaagcaattctcctgcctcagcctcccgagtagctgggattacaggcacatgccaccactcctgactaatttttgtattttttagtaaagacagggttttatcatgttggccaggttggtctcgaactcctgacctcaggtgatacacctgcctcagcctccccaagtcttgggattacaggcgtgagccactgcgcctggcctaaacaaacatttagtaagctcctaccatgtgccagtgggaacctgtggtgaataagacagtccctgccctcccagggcttacagtctgtgaggagcatagtgggtaacccaagcgggtctcacacaatgtggtaaatgctaggactaaggagcagggggacagagggactgttatgggtgtttagggatggaccctcaccctgatttaggggccagggaaaacttctccaaaagtggcatttaagctgagacctgaaggaggagtgggagccagccaggtgaaggggcagtgcaggaagaggcaagtgctccaggaaatgtgaatgagcaaaggcctagacaaatgtgaatatcatgtggtcgggaacctaaatcagtcctgtagagcaggaatgccctgtgagggtagggtgcacgctcagtgaatgtgtgttggatggatggggccatgttaaacttctccatgtacccttagggcttcacttatgatagggcatcaagaaacatttattacatgaataaatgggttttgtttcatatgtttctaagacctttcttctcccacgggtaggaattgtattggtttcctctccactcagcacaggtcaatcca

SEQ ID NO: 1884728 - DNA, 4001 bp, Homo sapiens
tgccctcatggagacttttgtattttcctctttacatccccacagatagggtccaggttgcccgacacagctgggcaatccacaaggcagtgaccccctgtgccagccctgtgaggtagctggaggatcattgttccttccttctcaggctctgggcagatgccagggctggggtgaaccacgccctcaagtttcttgctttggagagtcacattttcccttgggaaggagggtaaaggtcagaggagccagagacctgtgacctgcttgtgccatgagccctaactataaggacctgaacactctatattaaaagtccaaagcttgggggctccaccgagcttctcacctcacggcctctgctagggaggatgaatgctttgtcctcccagagctttgcgagcttgtagcacacagcctccccagcacaacatctcttggaaacctcagactttgtcttaaacattcatgcaaattttgcatcttatttcccattatgtcagcatgttttagaaaaaaccctcaactttcctgaatatacaagagaatttgacgttgtagaacattgtgccttttaaaaaaattgtgttatttaaaaattttccccacccccccttctgccccccaagactgccaaatcctttttgaacaaatattaggaaatgcttattatgtgccagatatgattcatggtcttggggatatagcagaaaacaaatacctgggtatgaaataatctgtacaacaaacccccatgatgtgagtttaccaatataacaaatctgcacctgtgtccctgaacgtaaaagtaaaaaaaaaaaaaaaaaaagcagtggtttggggtctggcccacactctaatcccccggagacctttaagccacaatgttgcccaggccccactccagtgattctcattttactggtcggtggcagcttgggtttgggaaattctaaatgccatccccccaggtgattttacatgtagcaggggtgagaacaattgattcagggtaaagaatgcattcactgtagctggtttccatgcatactgatgggatttgccacataggagcttgaaaaatagctcttccttattaaaaatcaacggacacctccaagatgtacttagctgttcggataaattgctgcagaaaaaaagtcttctcagcagatgtatctttaagtcacttgatttcagagtaagaggttgtttcagtcacagtacttatagtcagtgttgaaaattatgaacagcctacaaataccaaaaaggaatgaaagcatttacagacatataggatacattctgttttaaaattgctcctctgttgttgggctctgatttcctaaagtcatctatcagccatttccctcaaattattccatgtccttccaagaagcttctgcaatttctcgaggtgattgattattcccaatggtaaacagcaccatatgggtccaaatctaaaaggaattctgcctctattgcagaagagttactctccagaaacttgcaggccttggaaagctgtatgagcagtgcagtctatgcaggagtaagggctgcagagccaggcagagctgatcctgagtaccagcccagctgcttagcagctgtgggactttgggcaaggttcttgacttggagcagtaatataaacctcttctgcaagaaagggtagaataatactgattgcagaaacagcagcaatgcttcattactctctgtatctatgctctttattgtgtgctcttacagctcctcccatcaagaggccgaatgtgtttcccaaactttgcatctggctggcactattttctctggctatagaaaactgttgtattagtttgttttcacactgctgataaagacattcctgaacatgcgaacaaaaagaggtttaattggacttacagttccacatggctggggaggcctcagaatcatgacgggaggcaaaaggcacttctttcgtggtggcggcaagagaaaaatgaggagaaagcaaaagtggaaacccctgataaacccatcagatctcgtgagacttattcactaacatgagaatagcatgagaaagacccgcccacatgactcaattacccccttccccggtccctcccacaacacacgggaattctgggagatacaattcaagttgagatttggctggggacacagccagaccgtatcaactgcgaatatgacagcttttgtgctagttttgggcctaggctcaaaaggtcttaaatgcttctgtgtttctcagaaccttgctatctttatgagatcaagctatcagaaccttgctatctttatgagattagccagctggaggatgacataccatggtggggagaaggaaggtgccactgttgatagccatctcatccccagaagcagagccacctagtcaaccagcagctggccatacatacatgaagcagtccagttgtgacaagaatagctcagttgagttcagcgtgaatggctgatgaactcaatcatgagctattaagttttcggtgatttgttatgcaatagctaactaatacatgcacccagggcagatagggtgccaggattcaatgaaaggttgattcctagttacctgcaagaagaaagcactttataggtactaattctccccccttatttaaagttggatcttttgtaagataatgttccgtcatacagaaatgcatgtacacatgtatatatgtgattggtgcttttactcacacagccccccaaccacgggaagaaacagacaatcacagcttgatcattagggctaaggccaaatagcaagataagtctgcctctagtctatttcctccatatctaaatgttggaggtcaaggctatggacagatctgaagatgtgttctctcctcttagggccccattattgatgggcagcagtcctctacccgtggatattttcttttgctttcccctatgctctctaggatcaccatctcgtccacccttcgaccggaggagagatgtttgtagcaagaggctgttccctcacctctggctgaaaagggactttcagaccctccacttcctgacataagggaggttagacctcagagctgcactttagtgtggcagctattgatcatgtgtggctattgaataacaggaatacagctggtctgaactgaaatgtgctgaaaaggtaaaatacagagtgagcttcaaagatttagtaccccaaaatatatacttccttaccaattgtatattgaccatagaggaaaatggttacatactgggttaaattattacaatcaacttcacctgtttcttagtacattttaaaacgtggctactagaaaatttaagattcacacatggcttacattttaattcttagaggcttgaatcctttttgaaatttcaggctgtctgttcaaaggaccaaaagccaggaaggccataaaatataaaaattcaaaatgattgtctttattttcttctttccattggtgaataacatatatttattatttataaataaacataaccgcagtcacaagatgaaatgtaaatatcctctaggtggggccggacagcgcaggcaggaagccccgctccaaaagatcgcggccagcacctgtccttgctgtctcattcggcccattgtctgattacagctcctgtcactcagggcctgagggggcggggcgtgatgccctatccaatcagaggagtaggggcggggactgtccaatcaggcacatgtctggagaggagaggacggcttccgggatctagcggggcctttgtcccgacagagctccacttcctgtccccgcggctctgtgtcccctgctagccgtaggtcgtgtgacccgcaggcaccgggagatccagaagtgaaacgccaggctctctggaggccaggagatggtgagtgtaggggccaggcctcctgagagacagggaggggcggactggaacccgcggtaccggctcgggaggaaccg

SEQ ID NO: 1884729 - DNA, 4001 bp, Homo sapiens
ccccaccaaccaccctgccgagtgagaacgggctgaagcctccatagtcctgggggagcgagaacagaggaggaggagcaggaaggaactccaggggtggggtctcttcccaggagttttggagcaactttctgagccctatctgggatgttgagtaggtgacagggagggggtcacttctactgggcccccctccaaactgttcctgaagtagcaagagagctgggggaccttggagttccccaaaagcactgtctccaagcctgggatcctggggtccagtgtggctttatttggggatctggatctcttagcgggtaggggcagcggcaggaggcaggacaacttccaggcaataggagggtccagtgtatgcagggacatgagtgtgggctaaaggggcacagagcaaactagcaagatctctgtcccctctgagccgactgtcctcgtcctactcttgcaccccaggatcccagggcaaggggtgtgcaaagctgcccctccccaactcctaggccctgctctgagggacggggaggggaggccggcattgacttatttgggatctgaggtcacacagacttgaaggacctggttttccctgtagaggcaccgcagggtgtttccacccccatcctgaggccagctctctcatcctccctgcccacagcacacgcccccacacactggtctaggcccaggcttgcctcagtttactgagagcgcccagctgtcagcaaggtttgagggaagctctgtggggctgaagggaagccaggacactacccactgagtcctcccccacacaggtggcatcgtcgctgatgccaggcccaaggaaggaggaaatgtgctttgtcctgttcagagactctctttgtatttgtagagacaatggacagagagcatcaaggaacgagggggccgacctgtggcttcacagccctggggcagcagagaagggccagggccacacaggccccaccatggggcaccctgatgcctggggctggggacgagccagccagcaggcaggggcaaactgagcggcatccactgatgaaatcacccgcagctaggcagagcccaggcctacataagcatggacataaccatgactgtgctgtgtgggtggcaggcagggagttcacacagtgtctgtaatgatgatgcttggttttctcagtgtgtgtcattcctcagactccatcagcttctatgttggcaaggattcacagaccccaaatacgtacaacagtataagggatcctctggcccagtagttatcagttggaaaacatcctttcatgaagaggctaacagaaaacataaatgcaagtggctctggatgaagctggggacagggtgggactagatttccacactctcagtctctccctccccatcaccctcaactcctgcttcctggagatgcttctgggtgaccctggggctccaaatgtcatttgaaaatcactggtatggtccagctttcttattttcagatgaagaagctgaggcccagagtgggtagagatctgccaaaggtcacacagcaagttggtagcagagccagggctggagctagaactgaggccccatgactcctaaccactgtggcctccaactcctaagtcagaggtggccagcaacccgacccatggttctgacctcctccaaccttctcctgcccactctctggttttcctgtacggagggacctggcatctggcaccccttccagaaacaaggtccaggcaggcctgagttcttggcccttcagcactagttctggacccttgtgactgtgttctccgcaggtgacctcttcactctcttggctttcccacctatccatggggctcccaaatctacttcctgatggctcccctgagccccaaatgcctctgggcccctccagggatacctctaagtctccaggttcaaagcaactcaccttactccagacctgctcttcctcctgttttctggcaatgtgcatagtcctgccattcgctcagtcatcaccccagaaacccaggccccaccctaaccctcctcatctcgcctgtggctccacccatgaagccctcctatcggtcccctcccctgtccccagtgcctctgcccggatcgaggcctcacatgtccccagcctccttctggtctccttgactgcagttctgcctgctccaggaacattacacttttaaaagccaacccgagcatgtcacttgtctgctgacaaggctctttccactgctcctcgttccaaaggatacaaaccaagctcttccatgaggcttacgaggctgcaggacctgccccctgacccctctcctgccttgctctgctgtctcccctccaggctggcttagctccagccactcctaaactcccggcagatctccccgcagaacttctttctcatctcctgcctcagcacacaccctctcgtctcctcagatcaaggcttttcccagtgtgcccttgggtacctgcttcaccatcccctagcatactcccgggcaccaccctgcccagacctgccaaaagagaatctccgcatttttaacacaaatctgtggatgctgcacactaaatgtcgagaggcactgttccgctgagcagctcctcttgtcccagcctcgctcctgcctcagctgggcaatttcttctttttttgcccctgtactctccagggtgtaactaactgcgactggatgtctcctctgctgggctgtgagctccatacaggcagtgaccacgtcttcttcctctgacctgtaaatccctgagcctgctacagagaagggaccaatgaacgggacccccacctgagccccagtgcccccggccaggaggaggtcaggctgatctagtgacaagccacagcttgtctggaaacctaagacactgctcccagggtctctgcaagttacatctgtccctccaccccaccctacctcaccgtctgcacagtaaggagacatgttgggactatgtgtaatggagggcctacggggtgttaacagtgacatttaacaacaagctctccagaaaatgtctgcatgcgtagactcaataagtttattataaattttactgacacaaaggatgtatagcacataatttacaaatactaatgaaatatccaatattctttattgtaaattccatatagccagatgactgtcccagaaatcaacccattcaatgagtttcgcctaactctttatctgtagccaacctacggttgcaatgacaaattactgtagttccagcttaatgctgcttgatattttcatttatgttaacaagtaagttgaaagtgaaacaacaaagacatgtcagaacttcactccttcactggtggtcggagtgacttctttgctgaataggttaatagtttctgaatactggaaaaatctttgttttctgctattcaccatggagcaactataaacatgacaccctttaaaatgtaatctgcattagtagtattttttcccatcactttctcaggtctagacaatcaacaaaacaataaaccaggtcttaatgtgcagcacctgttgactcccctggtctagccaccctcgccatggccaatctgtgatgtgactgagcatcgaagtgcgaggagatgctcagcagtgcacggtcacgtggcagttccaccccgcagacacaacagacaagcgcagggaaaggcagtaaaatgaatacgaagtggtgagttttcagtatattacctttgtaaacataacttgtttaatgttaaatttataccgcttctttttttttttttttttaatttttgagagagaggatcttgctctgtagcccaggctggagtgcagtggtgtgatctcggctcactgtggccttgacctcctaggctcaagtgatcctcccacctcagcctcctgagtagctgggactacaggcatgtaccaccatgcctggctaatttttgtatttttttgtagagatgg

SEQ ID NO: 1884730 - DNA, 4001 bp, Homo sapiens; identical to SEQ ID NO: 915771

SEQ ID NO: 1884731 - DNA, 4001 bp, Homo sapiens
gcaggccacatgtggcccaggatggctttgaatgtggccccacacaaattcgtaaactttcttaaaacattatgagttttttttaaagctcatcagctatctttagtgttagtgtattttatgtgtggcccaaaacaataattcttcttctaccataacccagggaagccaaaagattggacaaccctgtttcaaaaccttccagtagcttcataaaagccaaagtcctcagaatggccttggggacctacaggctgggtccttctctgacctctctgatcgcgtctcccactctttccctatctttctctctcttcactccagccacattgactttgttcttcctcgaaagtggcaggtcgctcccacctcaggacctttacttttactcttctctctgcctagaacattctttccccacatttatgtgtagttcacgcctagcctccctcaggtcacttgaatgttaccttctccgaacgcacctcctccttgcttgatgtgccccatagctcttagcatcatctaacatattacatattctacttatttagtcctgcttctactagaatgtaagctccctgagggcagggattgtgcctgttttgttccctgctatatccccagtttctagaagagtgactggcatgtccaatatccatctgtaaaatgaagtgatggaatgagggccctaaggaaatataacatggtgaaaccccatctctactaaatacaaaaaattagctggggccgggtgcagtggctcacacctgtaatcccagcactttgggggtctgaggctggtggatcacctgaggtcaggagttcaagaccagcctgaccaacacggtgaaaccctgtctctactaaaaattcaaaaattagccaggcgtggtggtgggctcctgtaatcccagctactcgggggaggctgaggcacaagaatcacttgaacccgggaggaggaggttgcagtgagccgagattatgccattgcactccagcctggacaacagagcaagactctataaaaaaaaaatcggcctggcgtggtggcgcacgcctgtaatcccagctacttgggaggctgaggcagaattgcttgaacctggaggttgcagtgagctgagatcgcgccattgcactccagccttggcaacaagagcgacgacactccgtctcaaaaaaacaaaaaacaaaaacaaaaacaaaacaagagttgaaatcaagaagggaatcgtgccttggacaagaacaggggtgcctctttcactgctcctgataagaatggattcagacatgtttgtaggtagaaatttaagaattcccctcttgattgcgtctgatttctctgggaaatagaagagaaggaaggacttgaggagagtagcgatggagagagagatctatggtgaagatgggaggagttaacggcagctgcaagggttgatggagcagctgaagttgaaaacctggattcgccttggtacccagctacctggttgtgcgattttcctcatcaacatcgggggagtcgggagaaggttacataaaaggaatgggagcagcaaaaattcaagttttgtctcggctttttcttgaaaagaccaaagagaattctttcattgactcagtgcctccgtttacccactcaggcattcatcactaatcactggtcccatgaaagtaaaatgagcggagagtgtctttgacagcagagaaaaagagaagaggctgaggaacaggacctcccccagcccagtgagaaggggagtgggggacgtttagccttccctaaaaactgaaagttgatacgccccagggctcaagttccgagccttctcccatgacgcctcttctttcccaataccttccagctgccccgtcgtgtgacattccagtccacctctgttcctgctccacccgctccaaactcgcgtgcttttcctccacgtggttctctgtgtatatcggttgcctgggtggccccagccggaggccgggctctaatgacgccacagtaggaacaagccaatagccgtgacgcgactcagtgacgcgagacgcggggtgtggctctgccggcccaggcgcgatgaggcggctgcccgctgggtggcgccgatttcccggggaggtcccttctgggcccccggcggaggtgggagagagtcaggcaggagccgaggccggggagccctcttcgtcagctggtgctcactgcgccgcgccagcgccagccgggactcacccgcagctccatgcttgtgcccggttcgactcgtccatactccaagaagaggcaggtacgtgccacctgtcggggatccgggaggggggattcggggatcagtgccggtttggagctcagaaagtaaggtgtccacgacattctgggcagagtggacactagaaatatagggagagagccggctgtgcagggacgctccagctgtgtctgccagttgtgtgagggctgcctgctgacagcccagggtgccaggaagagccaactgtgtgctgatcagtgtattctaaggaaatgctgctttggcgggtcctcctcgctgtgccccgtgtatatcggtggtatgtggcctgagcgacactgacaaaccccctccccacgtgtgcgtgcagctcactcgctgctcttaaagctccccggtcagtttgctaaagggggttaggggcgggggttgggcaacaattaagcggaaggggagattttccaccaatcccaaaccagaaagaggcagctttgaaattctcaccagtcccaaaccagaagcaggcacgcggtgctccggagagagcaacttctcaacagtcaagggaagccctagccaacccattctagcccttccctgaagagtgaacatcctacctcctgacctggctgcctttagaatgggactgagctggaggtagtggtaggggctgctcacctcccctggaatgggcatgagaacatcccccagatggacccccgtaaagcagaggaaaggagagctgattgggctaaggtcgaggcaggccccctcctttgatgctgtagatgcatgtcagactggagtcagaatgaggactggaatgagggcgtcctctgaagtgcatcattaggacctgggctgagtcagtagcctgtgctaagacagggtggaggcaccaggctgggtactcccagtcctcggggagagccatcgagaaacgtcctgggagcagacaagtgcaccaaggccagagaggctaagaaccccgttccttcctcttgtgaccctgcccagcccggctctgtggccctggaatcctgagccctcccacaggtagagtggaaccaccccagaggggccaagcattctcctggtggcctgggggaagctgcacttgccgtatttttctaggcaaagggggaaggagcccagatgggcttggcctttctctgcttggtggactggacgtctaggaagatggcaagccttgtttgcccttcccagttatgggacatggtcagttcagaaaaccaagggactgttctctggcattagaaaggcacacttccggccgggagcagtggctcaaagtgcagtaatcccagcactttgggaggccaaggcgggcggatcacaaggtcaggaaatcgagaccatcctggctaacacggtgaaaccccatctctactaaaattacaaaaaaattagccgggcgtgctggcgggagcctgtagtcccagctactcgggaggctgaggcaggagaatggcgtgaacccaggatgcggagcttgcagtgagccaagatcgcgccactgcactgcagcctgggcgacggagactccgtctcaaaaaaaaaaaaaaaaaaagagaaaggaacacttccccaggagtaaccctccttttctccctaggaaggttcacctggtaaggcgctattattaataataccactaattataataagaagtggaagtattcaatataatcatcaatgtttattgaactc

SEQ ID NO: 1884732 - DNA, 4001 bp, Homo sapiens; identical to SEQ ID NO: 915782

SEQ ID NO: 1884733 - DNA, 4001 bp, Homo sapiens
gaaaaacgacttccaagtagaaataataggcggggagaaggaagggagatacagggatctggggggttcttagggcaactggcagtgaattttgtctcgagagtcctttctccactcaaaaaaccaaacgcgcgagccccgcgaaaggtttagggatagatcgtgtgggagaggactgagcagagagcgtgggggcagtgtcttgtagaatctttcttttcttaataataattttaaaagcttctgagtggagacgacgcaaagtcaagcagcaaaggtggcctgggaggcaagcggagggctcaagtgccgcatctttaccctcagggtctcctgcgcctacgggatgcgcattcccaagaagtgcgcccttcgagtaagtcctgggcccgcacacacttcgggtccgcagccagaatttaatggcgacaacgtttatgcaatgcaagctaaaaaccaaagcgtaaaaaattactatgtcatttattgaaacgccattctttgtcaaactgcaactactttgcttcacataagtttggctggaaagcttgcagccccagcccgggccagccaggtacaggaggccggactgcaaccggttgcttccctcccgtcgcgcctggccgtcccacgctgcgccgtcgctgctgcctcctggcgcccctgggattttatacgcacctctgaaacacgctccgctccggcccccggttcttctccttgcctaggggttgtttcccaatagatactgactcctttagaagatccaaaaaccaaaccaaaacaccccctacccgccccaaacacctgctctggggcgcgggggctgccaaacagagactagacgaagggagtcagatttagcgaagctcttcgagctcccaaagattcgaacactaactcgcgcccgtgggccgatggaggttctccctactccactccttggtccccttaactggcttccgcctcctggtcaatcactgagcaaccagaatggtatcctcgaccagggccacaggcagtgctcggcggagtggctccaggagttacccgctccctgccgggcttcgtatccaaaccctccccttcacccctcctccccaaactgggcgccaggatgctccggccggaatatacgcaggctttgggcgtttgcccaagggttttcttccctcctaaactagccgctgttttcccggcttaaccgtagaagaattagatattcctcactggaaagggaaactaagtgctgctgactccaattttaggtaggcggcaaccgccttccgcctggcgcaaacctcaccaagtaaacaactactagccgatcgaaatacgcccggcttataactggtgcaactcccggccacccaactgagggacgttcgctttcagtcccgacctctggaacccacaaagggccacctctttccccagtgaccccaagatcatggccactcccctacccgacagttctagaagcaagagccagactcaagggtgcaaagcaagggtatacgcttctttgaagcttgactgagttctttctgcgctttcctgaagttcccgccctcttggagcctacctgcccctccctccaaaccactcttttagattaacaaccccatctctactcccaccgcattcgaccctgcccggactcactgcttacctgaacggactctccagtgagacgaggctcccacactggcgaaggccaagaaggggaggtggggggagggttgtgccacaccggccagctgagagcgcgtgttgggttgaagaggagggtgtctccgagagggacgctccctcggacccgccctcaccccagctgcgagggcgcccccaaggagcagcgcgcgctgcctggccgggcttgggctgctgagtgaatggagcggccgagcctcctggctcctcctcttccccgcgccgccggcccctcttatttgagctttgggaagctgagggcagccaggcagctggggtaaggagttcaaggcagcgcccacacccgggggctctccgcaacccgaccgcctgtccgctcccccacttcccgccctccctcccacctactcattcacccacccacccacccagagccgggacggcagcccaggcgcccgggccccgccgtctcctcgccgcgatcctggacttcctcttgctgcaggacccggcttccacgtgtgtcccggagccggcgtctcagcacacgctccgctccgggcctgggtgcctacagcagccagagcagcagggagtccgggacccgggcggcatctgggccaagttaggcgccgccgaggccagcgctgaacgtctccagggccggaggagccgcggggcgtccgggtctgagccgcagcaaatgggctccgacgtgcgggacctgaacgcgctgctgcccgccgtcccctccctgggtggcggcggcggctgtgccctgcctgtgagcggcgcggcgcagtgggcgccggtgctggactttgcgcccccgggcgcttcggcttacgggtcgttgggcggccccgcgccgccaccggctccgccgccacccccgccgccgccgcctcactccttcatcaaacaggagccgagctggggcggcgcggagccgcacgaggagcagtgcctgagcgccttcactgtccacttttccggccagttcactggcacagccggagcctgtcgctacgggcccttcggtcctcctccgcccagccaggcgtcatccggccaggccaggatgtttcctaacgcgccctacctgcccagctgcctcgagagccagcccgctattcgcaatcagggtaagtaggccggggagcgccccctacgcgcggggcagtggcgccagggactctccgctctaggacacccccctctcctaccccttttgaccgcagctcttacccagctgcttcccaagggccgtgaggatagcggaagcggcggctggggaggaggccggagagtgggagtgcacgcaggcactggcccccgacatcctccaaagccaggcagagctaggagcctgactgttcgcaagagccgggagggcgtctggggccccttagagtccgagagattccgggactgctagtccccacgggagtggaaccaggagaccggcgcagtgtctggctctgccttggggagagttttgttaattaaggaaacgccaaattgtcaccaagcgtagcgcttttcagacgtctggactctggattcggagtgggaccagcgcgggggtgagcgcctgtgctgtgctgcctccgcagcgctaaaatgtccaggagcacctccagcccttataatacggtgttggcacacacttaggtgcacattaagtatcgtagagaactagaatgagcacatgcacctccagtaactaaatggctttctggaacagcgtcgtgtccgtggatagctcccgcgtatggtaatacagaagtggatcttcactgggcttcgctcaggcggcggccacgcaggttctggggatggaagagaacttgacttatccgagtccaagctatgcgggaccaggttctaccgcaggcagtggaaggaggcacgagctttggcctttctttcagcgcatctggggcgcctcttcatcttgtaaacgcggggctcagctgggacagtatttcttcaagacctggggttagaacaaggacagggttattcgctgtgcttagtcaggatacaaggagggaactcggcacacgataagtatcaggttggtttctcatcccgcgccgatgcccgcccacctctctttcgcctgggcggcgcggacccgaacctgcggagcccctgtagtttgccctcttcatttattttcagtggatttccacgctattgagaacctaagccagttcggtttgattcggtaatttagtaaacgctttactaatacaatggcggatgcttttcctggagcaaaattactcgagggcctagggaccgggatgtttttggaatgc

SEQ ID NO: 1884734 - DNA, 4001 bp, Homo sapiens
ttggggtcgtacggagacttcctgtcgggtccctggggtcctccgactgcggctcctcagcttagcactttcttcttggccccgcaggctgcagggaactcctcccacctctttagtcggagaagtccaagtcgggcgagggggcaccccggggttcgcaccggtgctcttcccctccccgcccccacaaggattctgagaaaataaatggcagaggagagaggagttctacatttgcttggctctcctttcctcctatccacccctacatccctcaccccggggcaaaaacttatttttgaaaaatgttggcagagatttacgtgtctttgccttacctgggtttcacaaacacaacgactcacattcaagccagcctcccttcagataacctcctctccccccgctaaaagtgccaaggatggtaaaagaagaaacaatctcaatcttttcgtttggaaatgaaagtccccggcttttcataaagggctcctcgcccctcacagttgagtcctagttaagaaaaacgacttccaagtagaaataataggcggggagaaggaagggagatacagggatctggggggttcttagggcaactggcagtgaattttgtctcgagagtcctttctccactcaaaaaaccaaacgcgcgagccccgcgaaaggtttagggatagatcgtgtgggagaggactgagcagagagcgtgggggcagtgtcttgtagaatctttcttttcttaataataattttaaaagcttctgagtggagacgacgcaaagtcaagcagcaaaggtggcctgggaggcaagcggagggctcaagtgccgcatctttaccctcagggtctcctgcgcctacgggatgcgcattcccaagaagtgcgcccttcgagtaagtcctgggcccgcacacacttcgggtccgcagccagaatttaatggcgacaacgtttatgcaatgcaagctaaaaaccaaagcgtaaaaaattactatgtcatttattgaaacgccattctttgtcaaactgcaactactttgcttcacataagtttggctggaaagcttgcagccccagcccgggccagccaggtacaggaggccggactgcaaccggttgcttccctcccgtcgcgcctggccgtcccacgctgcgccgtcgctgctgcctcctggcgcccctgggattttatacgcacctctgaaacacgctccgctccggcccccggttcttctccttgcctaggggttgtttcccaatagatactgactcctttagaagatccaaaaaccaaaccaaaacaccccctacccgccccaaacacctgctctggggcgcgggggctgccaaacagagactagacgaagggagtcagatttagcgaagctcttcgagctcccaaagattcgaacactaactcgcgcccgtgggccgatggaggttctccctactccactccttggtccccttaactggcttccgcctcctggtcaatcactgagcaaccagaatggtatcctcgaccagggccacaggcagtgctcggcggagtggctccaggagttacccgctccctgccgggcttcgtatccaaaccctccccttcacccctcctccccaaactgggcgccaggatgctccggccggaatatacgcaggctttgggcgtttgcccaagggttttcttccctcctaaactagccgctgttttcccggcttaaccgtagaagaattagatattcctcactggaaagggaaactaagtgctgctgactccaattttaggtaggcggcaaccgccttccgcctggcgcaaacctcaccaagtaaacaactactagccgatcgaaatacgcccggcttataactggtgcaactcccggccacccaactgagggacgttcgctttcagtcccgacctctggaacccacaaagggccacctctttccccagtgaccccaagatcatggccactcccctacccgacagttctagaagcaagagccagactcaagggtgcaaagcaagggtatacgcttctttgaagcttgactgagttctttctgcgctttcctgaagttcccgccctcttggagcctacctgcccctccctccaaaccactcttttagattaacaaccccatctctactcccaccgcattcgaccctgcccggactcactgcttacctgaacggactctccagtgagacgaggctcccacactggcgaaggccaagaaggggaggtggggggagggttgtgccacaccggccagctgagagcgcgtgttgggttgaagaggagggtgtctccgagagggacgctccctcggacccgccctcaccccagctgcgagggcgcccccaaggagcagcgcgcgctgcctggccgggcttgggctgctgagtgaatggagcggccgagcctcctggctcctcctcttccccgcgccgccggcccctcttatttgagctttgggaagctgagggcagccaggcagctggggtaaggagttcaaggcagcgcccacacccgggggctctccgcaacccgaccgcctgtccgctcccccacttcccgccctccctcccacctactcattcacccacccacccacccagagccgggacggcagcccaggcgcccgggccccgccgtctcctcgccgcgatcctggacttcctcttgctgcaggacccggcttccacgtgtgtcccggagccggcgtctcagcacacgctccgctccgggcctgggtgcctacagcagccagagcagcagggagtccgggacccgggcggcatctgggccaagttaggcgccgccgaggccagcgctgaacgtctccagggccggaggagccgcggggcgtccgggtctgagccgcagcaaatgggctccgacgtgcgggacctgaacgcgctgctgcccgccgtcccctccctgggtggcggcggcggctgtgccctgcctgtgagcggcgcggcgcagtgggcgccggtgctggactttgcgcccccgggcgcttcggcttacgggtcgttgggcggccccgcgccgccaccggctccgccgccacccccgccgccgccgcctcactccttcatcaaacaggagccgagctggggcggcgcggagccgcacgaggagcagtgcctgagcgccttcactgtccacttttccggccagttcactggcacagccggagcctgtcgctacgggcccttcggtcctcctccgcccagccaggcgtcatccggccaggccaggatgtttcctaacgcgccctacctgcccagctgcctcgagagccagcccgctattcgcaatcagggtaagtaggccggggagcgccccctacgcgcggggcagtggcgccagggactctccgctctaggacacccccctctcctaccccttttgaccgcagctcttacccagctgcttcccaagggccgtgaggatagcggaagcggcggctggggaggaggccggagagtgggagtgcacgcaggcactggcccccgacatcctccaaagccaggcagagctaggagcctgactgttcgcaagagccgggagggcgtctggggccccttagagtccgagagattccgggactgctagtccccacgggagtggaaccaggagaccggcgcagtgtctggctctgccttggggagagttttgttaattaaggaaacgccaaattgtcaccaagcgtagcgcttttcagacgtctggactctggattcggagtgggaccagcgcgggggtgagcgcctgtgctgtgctgcctccgcagcgctaaaatgtccaggagcacctccagcccttataatacggtgttggcacacacttaggtgcacattaagtatcgtagagaactagaatgagcacatgcacctccagtaactaaatggctttctggaacagcgtcgtgtccgtggatagctcccgcgtatggtaatacagaagtggatcttcactgggct

SEQ ID NO: 1884735 - DNA, 4001 bp, Homo sapiens
ttgcaaaatactgaagtcaatgtcatgccatggttgacgcaggattatatgtataagtgtacaaccttaaaatcagaggtctttgggtattgaaaattaatagctaaccagttttcccaagaattgaataaactggaagtgagaaaccgttaggcatttctcagtcttagttactgaaattgcaatggattgtagacctgcattctgtctggatcacatcagtgcagcacaggccaagaggaacttcaagtgacagaacagataaacatagatcaaatgaagtagctgtgttagcaggatgatcagagagttgggagaaaagaacaaaagctaaggagataaattgaaggcatgttcaggggtgagttcaagaatgagagataggccaggcgcggtggctcatgcctgtaatcccagcactttgggaggccgaggcgggcggatcatgagatcaggagatcgagaccatcctggctaacacggtgaaaccctgtctctactaaaaatacagaaaattagctgggcgtggtggcgggcgcctgtagtcccagctactcgggaggctgaggcaggagaatggtgtgaacccaggaggcagagctggcagtgagctgaaattgcgccactgcgctccagcctgggagacagagtgagactctgtctcaaaaaaaaaaaaaaaaaaagaatgagagataaagaacagtgtcaagacataaaagaaaaaaagctggggaagaaccaaggtccaagccaagaggttgttttaaaacttttgttattactattattttaaatatatttggggggtacaagtgcagttttgtcacatggatatattgcatagtgttgaagtctgagcttttagtgtaactctcactggaacagaagacattgtgcccccattagataatttctcatccctcttttccctcccaccctcttgagtgcccagtgtctattattccacacagtatatccatgtgtacacattatttagctcccacttgtaaatcagaacatgcagtatttgactttctgtttctaagttatttcacataacgtaatgacctccacttccatccatgttactgctaaagacattacgtcattctttttatggctgcatagtattccaaacagtatgaggatttctcaaagaccaaaaaaatagaactaccattcaacccagcaatcccactactggatatccacccaaaggaaaagaaatcattatgtcaaaaagatacctgtacttgtatgttaatcgcagcactattcacaatagcaaagatatggaatgaagccaagaagtttttgataaacatccaagttgtagtcatgaaggtttcttctggcagttctgaataatctcttcccacttgttagcttttgatcgtgagcttattattcaatttttctaatctcaactttgttgggttgttctgaagtttaaaaataactcacatttaagaactgactacagtggaagctcaataccaggcgtttcacctttctttaagtatgagctctgtatgcttccttgcctgaccctatacatacttcagtaggtttaacaagtaatgaattatataaagacaaacataggactcacctgctccagggcattaatttctaccaggtgtcatggtttaatgcaggacaagtttaaacactaacatcatttctgtgaggcatgtgctaccctataggctcccaattatagtcgtagctattactacaatgtaaactttcattgtatcattaccacataataaaatccattaacaggatgtgtcaacactaataaagttatgactcaagcgaaaatgggcatctcacagcttgtcaaatcagggcctaggggcattgtcacagatttgtcaggccaacaagctttgtctgttaaaggtgttggagtgaaataagaagagatttgttccccagcataaagcatacaaaataactttgtgagtgtggttatatccaccccattttacagatgacaaaataatggcctgaattaattacacacagtcatgtgtgacttaacaatggggacacattctaagaaacatgtccttaggcaatttatccattgtgcaaacaccatggattaaacttacacaaacctctatggtacagcctactacatgcctagactatgtggtatagccttttaaaaatttcttggggaaagttatcctcccatctcagccttccaagtagctgagagtagaggtgtcagccaccatgcccagcaagcctattactcctaggctacaaacctatacagcatgaaattctactgaatactggaggcaattgtaacataataataaatattactgtatctacacatattttaacattaaaaaatacaataaaaagatggtattaaagataaaaaatggtacaactatatagggcactaaccaggaatgaagcttgccagactggaagttgctctaagtgagtcagtgagtgagtggtgagtgaatctgtacactatgtagactttatgaacattgtatgcctagactacactaaatttataaaagcatttttctttcatcaatataaattaaccttagcttactgtagtaacttttttactttataaactttttaatttaaaactttttttgactcttttgtaataacacttaggttaaacacaaacgtttcacagaggtacaaaaatatttttttcttgatatccttatcctataagctttctactatctttaattttttttattttttaaactattttttgagaatgaagacacaaaacacgaattagcccaggcctacacaggatcaggatcatcaatatcactgttttctaccttcacatcaagttccactagaaggtctttcagggcagtaacgctgatgcagctgtcgtttcctatgataataatgcctgcatagggcagtaaccatggaatgccttctgaaggacctgcctgaagcagttttacagttaacttttaaaaaaaaggtacactctaaaataaatgataaaatgtatagtaaatgcataaacagtcatttatcactattatcaagaattatgtactgtacacaattgcatgtgctagactttcgtatggcagcacagtaggtttgcttacaccagcatcatcacaaacacatgggtaatgtattgtactatgacattatgttggctacaatgacaatagctgatgggtgcttatcagctctgtattagtttgttcttgcattgctatcaaaaatacctgagactgggtaacttataaagaaaagagatttaattggttcacggttctgcaggctatatgagaaccatggtggcaccttcttctggggaggcctcaggaaacttacaatcatggcggaaggcaaaagaggagcctgcactttacatggccagagcaggagaagaaagagaggggctaggtgctacacacttttaaacatccagatctcatgataactcactcactcactatgacaagaacatcaccgatgggatggtgctaaatgggcatgagaaatccgcccccgtgatccaatcacctcccaccaggcttcacctccaacactgggaatgacagttcgacatgagatttgggcagggacacagatccaaaccatatcaagctccattataatcatatgggaccaccatcatatatgtggtccattgttgactgaaacattatacagtgcctgactgtacttgctcaatgtccagctgactttatttgagtctagttgtcagtccttctccctctgatattcaagctgatgtcaccacactgtagagcaaactctttggcaacagtaagtcacaagttgacttggctggctcagtgtatatcccagtttctctccaactctggcttggaagtctcagagcctcttggttcctggaagtctcacctgtccaggctaccttaagtagggtggggatggtgggcgatactgaaaagatcattcctacacacttatta

SEQ ID NO: 1884736 - DNA, 4001 bp, Homo sapiens
atgtgagaccacaggaaaaactaccatttataaaaccatcagatcgtgtgagaattcacttaactatcagaacagcatgggagaaaacgtcctcataatccaatcactttaatccttccatacgtggggattaaaattcgatataagatttgggtagggacacagagtcaaatcatatcaggacctaattcctaaactttagatgtacttatttaaacactattctgcctaacagtttaatattttgggttttccctcttcatgaagatgtaaacaagatgtgtaaagattggtttgggagcccatggcaaggacaggaaaatcaaacacatgttctcactcataggtgggaatagaacaatgagaacacctggacacagggtggggaacatcacacaccagggcctgtcgtggggtggggggaggggggagggatagccctaggagatatacctaatgtaaatgacgagttaacgagtgcagcacaccaacatggcacatgtatacatatgtaacaaacctgcaagttgtgcaccctagaacttaaagtataataataaaaaaaataaaaaataaaaaaagattggtttgggagcacatatgtaaaaggtttttctaaaatatgaaacacgaaaatatattattccaatattattctgaagccagacaactcccgcaatgacaaaatcccttgctcttcaagcgcgactgtacccccttcccaaaaacgatttatgcatttatggttaaagttcaaatgaagctgatttaatagaaataatttaaaaataataatgagaatatatggacagcttactatagggtgagatgatgttgtaattgactttaaaacatttggaactaaatgtcagtcctaggaaattatgcactcctgtaaattgtgctattaagggttaggtttctttcaacactttagatatttgatcagaagcatatttaagaaaaacgaaagctgcccttgcttttgaccccaagttgagaattttctatcattggtgcagtgcctgaaaatacgatccaatcttcatttagtcatttgtacggagtctggaaaggctaaaacattgcaaataataggacctactcgtactttccccgcttaagaagcgtatctatttcaaggtgcctatttggaaaaacagactccaggtctccaccacagaacttaacacaaaatgaaagcacacaacccgcagcctttggctgtggtgtttttgaaaacaaggaagggcacagaaccatggcttaaaatacccgaaagctgcagcccacaaaaagagtatttcagggcgggttggccgttccctgcaggcaaacgttcggtgcaggcggccgggcgttcctgcggggagggcgccactgtgatgcaaagacatcaagcggactttcagcttgcccgtggacgctgcggtgccgctttccctatccagtcctgttcccgcggctccccagcctaccccgggccgaccaagaggtccggcggggtctgcgccgcatcagcgcccgctcgtcaggcctagccctccgcacagccaaggccgaccagacctctagacactccgtcgtcgggtgtggggcggagaagtaaagggcgagttttcttcctagattccagtgggaaccaagaaaaggagttggcagctgtgtaaactggacctggggtgcggcctccgggaacaaaagaggtgataaatgcacagcagccgaggttctgcgtgctcctttggggccactacgaatccccgtgaatcaccccagcccgggcagagggccagaaatgatgaaaatgcagattcatggcttccactccagccctacaagatcaccaaccgtatctggcagtacccaggaatctgcattctcgacaagcgtccgcgccgacggggctagtgaagtttgagaacaattgcttcctacccagccgctccgctatcacctaggtagcacggccgctgcggctgaggctgtgactgcggctgcggctgggccgcgcctcaaccgagcttggtcctttcctttggtcccgccccgctgctcagcgcggattggtggcgggacgcaaatctggcgctgattgggcggcggcagagtcgctcgtgaagattgtagggttcgggtgctctagagtgctaaatttatcttcagaccggcgaccgcgccagccgcgaatcggatctctatggagatggcctaggcgatatccctgagctgagagcatcaccctgtccccgaatccttctttcctctctgttttgtttttcattcccctccctctctcccctccccctccagtccacgacgactggctgttgaccctgttcaggcctcggtgaaggtgagaagcagagccgccgccgcggctaagcggtgcgctctgaaatggccgcttcctggaactgcctaagatggcggtcgcgggctctgctgtggaccgcggcgctgctgtgcagcccagccgcggcaaaatccgttctctccatcgctgatggagatgaaatagagagatggtgttgggtgctgagacgttttcatgtggtcgttagcgcaggcggccgcccggggacgcgagagaagacctgaggcgagggtgggctgcgactggtagggagccccccagtcgtggcaatctgtgggcagcgcgcacctgtgacagggaggagctgagggatagttggccctggctgcacatccaggtgaccgtttaaaaaagcatttaggtgttggaaggagcatctgttcccacctttttggctggcctgcactcagatcctgtcctcctgaccctgagggtattgttcccagccggaaccgcccgaagataggggagaaaggattgtgatacttgtcagtttaaccggaaggagactaaagacggaagttttccccgctcttcagggagtggaaaggaaactttactctcaaaggagtccagattctttgtcctcgagaaattcggggaaacaccttcgaagaggtggggttgaggaccttctttctgaaaacaaaagcttcctactcttctgtgtcctctggcaacgagagggatcctgatcttttacgtgaaccagcagctccacagagttctccgttgcaaaatccaaaaggagactgtggaaggagaatctgcttttttgctcccaataagaagcagggctttatgctgttgctagtatgagaccctcgactttctggcagttataatccattgttcatccgtttcgctgcataacccaactcctagtaacgagattttttagtagttggggaattaaaagtattcaggaacacccaagtaatggctagacacatgggctatgcagtcaaactttttgggctctgaacttggtttttcacttacaagaggtgttagcgagatgtgttaacctgtgtctgtttatctctaaagtggggttattaataatccttgtgtcttcatagatgagataatctatatgagggatttagcagtaattggcatacagtaaacaatcatcagtcattagacattgtttacctgaggagattggtcactggggggctaaaaatgattgtagtgaaagaactgcttcatgtaatagttctatgtataattccattttagattcaagacctagttttagagacattgatgaggttgtacttttaaaaattaggcttagtttcaagttctagaaagtgtggtggtggtgttgttttaacatgtttctatgaagtcagtaggtgggggaacatctcaaagcatctaaattgccaagatattgaacaggatgaaaatgttagaatttttactatgctaggcgtcttctctttcagtccaagatctgcattgcagtaaagaatcattttcactgcttagatccagaaagaataaacccatcttacgggtttatagttagttctgcttgttactgtatctaattttaatttttctcattctaggcttttggttactccccttcccaccccatcccttaatttta

SEQ ID NO: 1884737 - DNA, 4001 bp, Homo sapiens; identical to SEQ ID NO: 915807

SEQ ID NO: 1884738 - DNA, 4001 bp, Homo sapiens; identical to SEQ ID NO: 915810

SEQ ID NO: 1884739 - DNA, 4001 bp, Homo sapiens
tatgactcaaagtccaaataggagtattatattggatcatctttcttctggaactttgagccaggattaaaggatagctgtaaagtcaaggagatattctgatgcagaaatcagttctcacaacatctgattgatgtctgatgtctcacaacatctctttagtctatttttaaaatatataattttctttgcagtaagtattgcgacatatatttccattctatagaaggggaagcaaaacttcaggagtttttgaagtaggaaaggttaaagcaggaggattgagccaagagagtctgaggacaatcgtaggagtcctactcttcatttggcacaaaaatgacaatgcttagttaggcagaaggtgagtatggattgtataaactaagaactggaaaagactttgcagttcaaggaatccttagctctgtctccaggctagacaaaataagaaataaaagctatcacttctgtgtggtgcttatagaatagaattaacatatcagcattatgggatctttagggtgtcgctttcctggccagtctagtggcacctttgcctgagttttgctctgggcccactgggctgcttctgcccactcgcacttgctaccaacctggatcccggatccaagggagattgagacgggtggagcagaggggtgtgctaggggtgtgtgagcaagcgtggccactgtgcagtcacacacacaagctgctgcccaggttgggcagctccaggtgccagcacaggctctccatgaggtggctggaccaggcacacaacaaacagcttccccctggaccaggcgcatcacaagcagcttccaacagtggcactggcgaatgcagtgacgccaaccagggccccaaagagggagtcacagcccgggctcaaggagctcccaggtctgggcttctccgagggccagagctcttctctccctgtggggagcaaggggcatgttgcagccctgtttgtgttacagctcttttaaccttgctgtgcagctcctcagctcctgcatcaagcagacaagtggagaatgagacagatgaagaggagcattactgagcaatggaacagaaggataaggaagatgaagaggaaggagacctgcagttagtagctcatttccacagtaaggatgtcctttccacagcaagggtgtcccaacgagtgttcagcttctagcagaacggagaccctggagtggctggctcctctctgcaaacaggtcttcccattgagtgttcagctttcagcagagaggaggttctggaatgggtagtttctctccacaggtaggtcatccattgtcttcccatcctctcttccaatctagctgagtctgggggattttatgagcctcagagggaggaaatgcatgctgattggtccatgggcagccatgagtgggcccagggagcagcaccacaagttacctctctggtctgcaggcttcaagccctcaccagcttgagggtgggacttcactggggacccatccccttccacccaggaacctgtctgcctcctgctcccaggctgttcatgccaaggagcgcctgcaagtcagtgtccagctgtcttcagacccctctcagcctccctcccacgcttgttggtgcccaagttccaaagggggccgagacggcagggggctggcgtatcagcactgtcctgagcgtgtgcacgctcggccaggctgtgacagtacccaggctcggcccgaccttgctctgagttcagagtgggtgctaacagtggagagaagccaggcagccggagtaggcaccctggagcctgcagtgggcaggggactttgctgggcctctgagagcacagaaaatgtccacagccgcggcaaggtggctgcagctgcaccctgggagctcctgctccaccagttcggaaggggcggggctcctgcttgtccctggctcacctgctcctgagtgtgcaggtccggtggcgcctccttgcaggctgggctgatgggcgggggcggggggggggggggggaggaagggaatgttccaggtcctccctgggcccgggactgtgtccggggcagggatgacgtcgctgcaagttcttcccgtggccccggggctcaggggcagcccaggactctccctcgcccggctcacggccctgcctggggggcgcctccgggagcagatcacgagccctggggctcagccctcaggcgcgtctagctcggcggtcaccccagtgccgggaggaccctgaagacgcgccccaggcggccctactcagagcctcctcccaaggcccaggaatgcggcgctgtcggaggtgtgcgcggtggccacaccgctgtccgggtccccaaagcgggccccgctcccacttctcgccttggccccgaaccctgggtccagccccagcgctttgtgtgcgaacaccgctccgccccggacccagctccgccttggggcccctctctgcctgcccctccgtgcccgactacactgcttcccctccggcgggcgactcagcccggtccatcgtggcggcttccagggcggcaggctccgggagtactcccggggccggctccaaggactgttcccctcctccccactcccactccgcggcggcggcgggcgagagcggcgacatagggccagggtccggagcggtggaggctcctggccggggagcacgtcgccccacccggcaacgcgaggatggtggcggcgcagtcggctgctttggggtctcaaggcacaggggacgcgaggcacagatgtcccacagcagccactgcggctcccgcagctgctccgccgccgctgcccgcccctccctgctgcagctggcgtgatggcagcggcagctctggacgccccactgctgccaccatcagccttgtgaaataggtactaccttaacaaatgaaattgaagcagagacatgtaatttgcccaaagttactaagttagtgacaaagctagaattcaagaccaagaagtctagcttccatgctcttaacttccaaccatggtgacacctcaaacaacttcagacaaaaaggccaggagaaagtatatttcagagcttaataaacattataattagctgtcaaattaagtatcaagccagggcacagaacataaaagaaatcagagtatggctatgggaacaagacaacaggattataattttacctcttggttctagtttttttctttgttcatatggaaatcgttactgaaaaggtactttaaggatatgcttgttgcaaatcattagctgtatcactgaccaagagtgtttattcctgaaatactaactgattgcctactatctgccaggcacaatatcccatgctataatacaaaattaaacaaaataggattcctcccttagaaaaactcaccgcagagtaaaagaaaaagatacacatctgggtcattataatgatcaggtgctcaagctattcattgccccagtggactggagatacaatggccttctcaagttttggggtattacactcaaattcatatgtaatactggagaaaaggcctaattacaacttaaactggatttcccaccagcctggtggcatgggaatcttggaattaaaattacgtagaatttttaaaagtgatgtatcttctacatctgattttgtgaactgaagtttattctttccaggaaagcatatagatacacgacaggaaatgaaatggatacttgttggggtcagttttatgtatagtttgtattttattttgaaatatgatacactgctattctcttgcattttcttatatgtgactcaccactaaccctatattcccccatttcaggccagttggtcataagcatccatttgcctcagagaatactgggttgttatgacaagaatataaagttggaaagaaatagaatatttgagtctaccctgtaagaataaaaagaataaaaggggtttaaatttatttagaccctattgtttaatcaa

SEQ ID NO: 1884740 - DNA, 4001 bp, Homo sapiens
ccttaatttttacactgaacttgtctcataatctgttccagacgattcataccttcccttagcacacacttctttttcttattttgaaattcaaatataactcttgagactttctctcccatttgcagcatctcctaaaccccagcagtctcacctggaggtacacacatcctgaccctgacatggttgtgctgtactcccctggaacctctggcaactggacctcctgcagcactaggcagttgccatcatcaacttggaagtctttagaaaaggtgtctgaagacttgatggtgaccaaagctgctttctcacttttagtgaaagttgctgttccatatttggagagcgcttgaagagccaccactgtgtcctgaaaaaaaaaatgagtagagaaatcacagaagaggaaagtaacaaactcacactggatgtaaaccataacaacactattcttttttcagaattatttagtcataaatgcagtccactaactctatttcaattcagttcaatctggttagtaatgataaactattctagatactttgaaggtatatttttaaaaagtttcttcattcagctagtttaaatagacatatggagataagacttagatatctgacacaagcccaggctatttcaataatttataaatttatgtaacaatatttgttataaaaggtcagagaagagagaagaaaatatgggttagaatagtaagagaagaccgaagaaggttatctgagaaataagattatctctgaataatgagcagggtttatgtagacagaagagaggcatcgggggggggacctgggtggggaatgctctatatgaagtcatggaaactgcggtgagctaattccagaagaagcaaagggatctgcctaatcagattggtgcactcatgtttactggagagaggaaatatttttgataaaatattagataattttaggctttgagtgaaaaaaagatttattttctaagggaagtaatcccttgaaaatattgctttgtgaagacaaacctacctgcatggttggggggcccctagggagttaagagaggagagagtataaaaaggacagagcagtaatccatacataagatagtaaggctggaacttgtctgctgatggagggatggagaaagtgtgaattggaaatactaaccattccattattcaactcccagatggttgtgtcttcatatatgtgaatatatttatgtttccttctagagtcttcccacagacctgagtggaggagaagcccccttggggattttgctgcttggtaatccacttcacaatacgtgatgccacagacaggtcctctgaagatggggcaggctggacagtaagataggcaaggagcacataagatgtcatctctacttccacagagggagcccagggttgagaatagagggtcttagcttcgtgaagtttcccaggacgttgccagtggatcgaatcctctttgacatagaaaagggtagaatttttagcttaaaggatgatttcaaaatctaatccataagtgataattataattacagtttacctaataaattgacatttcattttaatgaagtgaaagcattaaacaaagtgaaagcattaaatagtcactatcaaacaaatctttatcaagaaagtaaagttccagggaataacattgagcctttgtgtctactacatgtgtgtgtgtgatattagaaggtgggactgtatagagtctatactgtgtggattaataaaatgatccatgttatccagagaattcgggtcttagatcaatgataattattctgtcattaaattaagatagcatggtaagcatgagctcggtagaggtattgtcccttcttttggtcactggtggttgtcagaagtaaactttgcagtagcagctcttaccttctttcatagcctctctgtttaatgattcaagcaactctcttcgcttgactttgtttcctgctagggcaaaggcataggccaataatgctttggtatagacaacacttccttgggcctctgaggtggagctccaggccgtttcaaggcaggatagggcactgcagaccactgcgtgctatgaagaagacgaaaggctattgtaaaacagcagaaccaggcaaatgagctattcccgggctaactgcagattaaaaaccttaatgtgcctgtataacctcacagttctgaccagagaggagtttcctctgctgcttccaaaaggatctggtcctttacattccagtgaaatgtaccaaaattaaataccataaaaatcacaattaatttccctcagggattcaccatattataattttattctttacgtgtgtgaaggaggtacagaggatgtgcttgaacatacagtggcaggcagaggcatctccagcaaagcaatggtgatgtaggcagagaatgtcacctcatcgttcaccccaccgtgtaaggatcagaggcagagagactcaaacacttcaacagtcatgagacagcatctgctaacacttcttttctttttgacatcttcactagagtgtttcttgtcttgtgctagattgtttcttgtcttgtgctagattgttgattttctccccttcctcctctaccctaaaattcttgagtctgtcccagatcaccttccctcactttttatagtatgttcggctttgaggtttttttgaacactattttcattcaataaaaaactactaaggtattgctagatttcaggagatttagagtccaccattcttcctgaaatctatgtcgctaagactgaaggactcaattcaaacatcatttcctcccacatatcactatcttcagggaccagaagaaaaacagagaaggcatcaccttaatggcattgttcagcagtgatccagagccttcgaaaaaaccatctgccttttgtccctgtgaaagccaggtgagggcatccctgatgtgtgagctctccacaaagatgtacgattgggcttgagcaaaggacttgagcacaaatgcagtgagcccgtcgagcaaaacagaaacacacacatgaggaccacctcactttcatagctcactttgtgcactgcctccagacattgctcttcacaattcagtggaggagattactgggaggtattgatggggaaatagtatttaagagctgaatatactctagtccaacaaacacctcaatatcttttattatatctcaactttattggtttctctgagttgatgctttttaatttttttgttgtgaaacatttgttggagcctccaagcctccccaccatgaaaactgcatttccagaatgacttgtcctgactttactgcatcacggtctccttctgtcctcgccctcccctccttctttaatgcacagtgtgggagcttcttcccctgtcattttatagaatgacattttctgctttatatttccatttagaagatccttatttcaccattttcagctgtgttatcacagcaggtaagctttcagagatgaaacggtgagattacccaacaggaatgatacatacagcatatgcgttatttaaagactaacaattttccacaaaaaactccagatattagagagtagctgtttctagaatcctgaaatgtcatggatctacagagagcatagggaaaaaataatcttgtttccctgactgctaccatcattgtccccaaaggtgctgtaggaaccatctctgtgcttataattcaattgcctttggtaccctgaagaggaagtgttcatagatttattgaaatggcaaagacattggaggattattgagcttttttctcagtgctattaggaatcatagggtaactaatatttagttaaaatttcccgcaacccccaatcacaggcttgatgatactattgaattttctacttgtatattgggacattttattgaaaatcacgacaatgactatcgaatcttaatgaaacagatgttgattttc

SEQ ID NO: 1884741 - DNA, 4001 bp, Homo sapiens
ccacgccattctcccgcctcagcctcccaggtagctgggactacaggcgcctgccactacgcccggctaatttttgtatttttagtagagacagggtttcgccgtgttagccatgatgctctggatctcctaacctcgtgatccacccacctgggcctcttgctgcttgccatgagcttacaatctggtttggaagacaaactagagccattattaattatacacacatgtatgcatacaaatgtgtctgtatgtgtatacgagatgacactgggataatactgtaaaaaaatgttttacacctgcttatttcacttataatactgtcagcattttctctacatgtttaaatgttctttgaagacataattttaagaagcttgaatttgttatcagtctcaggttgtattttggtgtatttagccaatatgctattcctgattatttagcttccttcccattttttggctgcctgtatacgatgactatgaataatacaaagcacttctaattaattctctaggtaataacagaattgctgtgtcatggcccggtgcggtggctcacacctgtaatcccagcactttaggaggctgaagcaggcagatcacgaggtcaggaattccagaccagcatggccaaaatggtgaaacccccgtctctactaaaaatacaaaacttagccaggcgtggtggtgcgcaactgtagtcccagctacttgggaggctgaggcatgagaatggcttgaacccgggaggcagaggttgcagcgagccgagatcgtgccactgcactccagcctggacaagagagccagactccctctccaaaaaaaaaaaaaaaaattgctttgtcagctgggtgtagggctcacgcccctaataccagcactttgggaggccaacgcgggtagactgcttgaggccaggggctcgagaccggcctggccaacatgatgaaaccccgtctctaacaaaaatacaaaaaattcgctgggagtggtggtgcacgcctataatcccagctactctggaggctgaggcgggagaatcacttgaattcaggctgcagtgagctgagatcgcaccacggcactccagcctcggtgacaatgataatgatacacattgccaaaacgttttccagaaagattgtaacaatttacattcctactcagtttgatttccctctttcatttctgtttcaaaagaaatgaaaaagaaggaaaggagggaggaaggaaagaattttttttaatgctctgttaatttgataaaggaaaggcgtgtctttaggtttgcttatttattcaaacatatattttatgactatacatgttatgaatgccattgtattaacagtacttctgtttaattgaccttaccaactaggtcggccagtaggccaaagtcttcaaagcctctagatcctaagaccgtgatttttagacttttggagggtcatagaaccctttgagaatctaatgaaacctataatcttgtacccaggaaaatccgcatacacccaaacaccgtgcccatagtttccaaaggctgatgaactttacggacccttctgtcaggaacgcatctctataagcctattttctttggctatttcctgttacgaaataaaacatatatcccacttccggggcctcgcagcccaaaactaaaaccaaaatcaatttcaattcaaagcatcacaatcacccacccagctccaaccagggaatccctctggctaagtcagggccgcgcgggggtgtctgcagttcattgatgtccggagatgaaacgtagcacatgaaaccactaggcgtatatatcttgtccctcggagaaagaaagtacttacgacacattttcatggctgtaaccgattttggcgttgtaagctccattatccagcactaaggtcgtcatctcaccaccaaccacaccgcagccgtagttgttttccctttccgacccctctgctcgagctttttccggtactctatggtttgttgggcggagcgttaggacgcgcctctggtcaccttagcaacggaggacgccggaagtcggagatgctaagcagcaccgaatgttaggggctgtgcttccaaacttaacctgtttatgtggtggcgagatttgactactatgtgctttctcgctcatttcgtatttgtttttaactacgcagattaattcgcgcaagttttttctaatcctgtagagaaccggctgcgtgtgtgtgtgtgtgtgtgtgtgtgtgtgtgtcttccaatcgcattcttcagacggtgacattctttgaagaaaaaagtgcaaaacttgctcttggactcacattcatactctcctcttccccagcccacttgctcttcaggacgaagctgagtgagtctttctcatccaaaaaaggcttttgggccggacgcggtggctcacgcctgtaatcccagcactttaggagaccaaggcaagcagatcacttgaggtcaggagcttgagaccagcctgaccaacacggcgaaaccccgtctctattaaaaatacaaaaagtagccgggcgaggtggcgggcgcctgtaatcccaagtactcgggaggctgaggcgggagaattgcttgaaccggggaggcggaggttgcagtgagccgagatggctccactacactccagcctgggcgacagagcgagactccggcagggcggggacttggcaggtgcgggaggcaggacctggcttccggggcgtcgcgggggcaacggccagcgggcgggggcaagggccagcgggctaggacaactgccaacgggcttggaggggggcgttctacaaattccaggccactttgagcgcctgagagaggagcggggcggcgggaagggggcaccgcgggggcagggagcgcagcagccgcagcgcgaaggcgcgggggccggggaacaaacggttggcgcgcaggcagccataccggggccggaacccgggcagaggagggcagcgacggcgatggggaggctgcagagcccggggcgggtaccgcgcgggaaccagcgcgactgcgtggctaccgcagccgtcggttcgtgttggacgggcgccgctgctgcctctgctacttcaagaacccccacgacccgctgcccctcggccacctggacatagcagaagcctgcttcagctaccagcgcgccgacgaggcggcggagcagcctgcgcacttccaggtgcgcagcgcgggagccgccacggtgcttgaggtgggaactcgcgccctgcaagcgcctgggcccttctgtcggcgctccttgcctcccctgggggcctgccccatccaccctcctttctccaaggcctcctcgcaccctgccaacgtcggcctgcctttccccacttctccacatcccgtcctcgttcctatctcctcccctccacctgggcttaggcccgggtggctggggctacccagcccagtctccttcctcagacactttgacccattatctccctctgctccttccctctgacccctctctagtgtcttctcacccccagcatcccgtggatgtccggtgcagccctcccaagcattcataaccgtaggcttctgccccaggggcctcctttagaactctgctaggaccttggtacatcagttaaccgctctgcccttcagcgtcctctaaaatgagatagcagtagtatctatatcatggggtgttgagattaaactaattatactctaaactgctcagtaaatgttagtacatttattttatttttatttatttgttctttttgccataggatctcgctctgttgtgcagactgaagtgcagtggtgtgatttcagctaactgcagcctcatgcctgggctcaagtgatcctcccacctgagcctcccacctgagcctcccaagtatccgggaccacaggtgcaggcccacgcctggctaatttaaaaaatggtttttgtgtgtgtgtgtgtgtgtgtgtgtgtgt

SEQ ID NO: 1884742 - DNA, 4001 bp, Homo sapiens
aagcctgtaatacctgaacatataagtttcccacaaaatatattaccatctgaacaccgaacatattgtgacccaggactggtagaaatgccacagtttccaaattggtcccctttgctgttcattgaattgtaacactcttgtgaggctgattttgcaccatatccatataattgtaagcactgattattagggtccatacaatgaactttaaggcactcgtaaattgtatgacattttgagccatcttgcttatgcctgttgttggggcataatgcagatgtaccattgcaaaattctgggagatcacaggaacgactagaaggacagcaaggatatcccttacggtgaaatttacacttatgacaacatggaccatcactgcactctgctttcgccttcagtatacagttttcatcacagcatgcatgatgctgacatagagaaccacagtcacactgctccgtgtcctccaccacaccatttccacaggcagaatccctacgcttgcggcccctgggccgtggcttgttaaataggcaggcccctttgtgttctcgaaggaactggtagaagtagtcagagctgcagctgctgaagccactttcttttgtgatattttcatgcatgaggcaaaagtgcttatctttacaaaagcaggccgagtggtcgtgctgaatacccaggttgtgcccgagctcatgggccatcagggctgcaaacaacagcacatcttcatgatggaaggattcaacagctgccgcaaaaccgcttgagcaggcaccactgagaaaggcctggcccatattctgtccagggtgatgcccaacgatcatgtgggcaacatcgtgttttgcacgatggaagagcatctcttgtctccagtgattgaaattcctgagtgtgatttgcaagtccactgtgacatctattaggtccccctcggtccaaatctccattccagccagcaccacctctgtgtttattcccctagtgaagctgttggccagagcaatgacatccactactgtctggaccgtctcattgacgttactgccccacatctggaaccgctggttgttgaccacgacaaacatctccacgtactttttgtgtgaccacaagtaggacagtgcctgtagatcatgaggcttcctgctcccttgttgccagctagtagacaccacaggagactcacgcttgatgtgccatggtgtataacacatgttcaaaccgtcttgaagagtccatgggctcaatgctgtaagatttttcctccttaatcaggaggatgtgcccctgagacctgcacagatgttgacagaaacaaaagaacctgacactccttctatgtagccttcatagtggcagtcatgtgagatgaaaggcgattcttgccccaggaggccattgtggtaactgtagactggaaagttattcacaaaatggtttctcttcaccttcagatgaaccaggtgcttctggccttgcataagtaacaagtaggacagtccttccactgggctatctcctccctggactgtcagcctctttggaataattatttcatagaaagagtaatagattgatcccaggtgacagtacatgcttggcacaaaaatcaccaaaagcatcaaaatctctaacctgatacatgaaggtcctggtactagccccagccttaagttccacttctgtggagcccaagtttgaaactttatcttagcctcttccaaggccacttggtttttccataaagcaggatgttggcagagtcttttaataatgccaccagtgacatggcccaaataaatcagttaatgattctgggcctatgtccatcagcagagctctccctcgcacacaaaccctcggaggctcaggtgtttagtactcagatctacgctggctcccttattggcagttcttgcccaactctgattcttacagaacttcaagccgtgtttctcttcctgcttctctcctggccttcggcagtttctttagtatgtcttccttccaacagcaacaactttaatcttccttagttatattccttttactttcatgggaagatattccaagtagaaggcctgtagtgatccagccagtactgtaactcctcaggcaaattattctttatcctcagctcaggccacacaacttgatatccattaatctgctcattctttgaaacacaacattctgtcagggggtggggggaagggggcagggcttctctggggatctctgaaaaggacaaagttctttgtggcccactgcctctttccctcatttctgcagttttcagggtaccatttatcagttcagctctcctttgtcagtgtctggtttttttctttaattcaagaaaatctgtatgtggatgtccaagttttccctcattatcgttggttcataacaaatgagtttagatattttatatctgcatataatcttctctaccaagttttcctaatgcacggatatattgtgttaagtaaaatgggctcaagtttcaccatgggagtatataaaggatcaggatcaaagttcagttcctccaactgccctaacataaaaacaaagtgtggggcccgggcacggtggctcacccctgtaatcccagcactttgggaggccgaggcaggcggatcacctgaggtcgggagttcgagaccagcctggccagcatggtgaaaccctgtccctactaaaaatgcaaaaattagcggggcgtggtggcaggcgcctgtaatctcagctactcaggaaggtgaggcaggagaatcgcttgaacccaggaggcgtaggttgcagtaagccgagatcacaccattgcactccaacctgggcaacagagtgagaatccgtctcaaaaaaaaaactgtggggtcaaaataaaagctgactaaccaggtgtctagttaacatttcatcaagaaaagaaaactgggctatataagaacttttaaaagatttcttcggtttggaactaaaattgacctgaaatgtctgtggaagtccttgaatttggttttgatgtcaatttccttggtgtatttagcagtacaaatttaaaaggaaaagaagccctatgcacccattccttacgcagttattctgtgcattctagatgaagaaaaataaaactctacattttttatcttgtataattttacagcaagtcaaatatttacaacatgagacctttcaaatatgagatacgactacagaaaggaatgtaatggtagcataagatcttagataacagcatgagagcagatcaatttattcactattcctattaaatatttaattcctaatacagataatacaatgtatcattagcatctagcaagaaaatttatactgtcacaaacccactaaaaaaatttacagcaagaaaagtgaaatgatttccagctgtatttcttgtgatttatgtaagcgcaaagcttcttaaaattgtattttgaaaattatcacagattttagggtgtttccctgtttcttaaccaaaataggcagcgcaaattaggttaagccatttggtgggataaaagaagattcaataatggaagaacactctactctttaaataaataattaaaatgaaatatccaattttctaattctcaaattgaaacttattttcttcaataaatacatgcacatacacatacccacacacaagaccttatttaaatcttttggcttctttgaccaacaattaccatttcttcaactcattttttctcaaatgaatacaagcaacataaactctttttaaagagtaattcctgccaggcacagtggtttgctcctgtagtcccagctacttagaaggctgaggcaggaggattgcttgagcccaggagcttgagtctaacttgggcaacatagcaggatcacgtctcttttttatttctgagacggagttttgctctgtcacccaggctggagtgcaatggtgcgatctccactcactgcaacctctg

SEQ ID NO: 1884743 - DNA, 4001 bp, Homo sapiens
gctcgggcttcctgctgccccccaccctctgctttccctacccccactgccccactcccaggggctcgggatggacatcagggaggacggtcttgggaaaggcagcccctgcttgaactctgtcccttaatgaccccatcccatcccccactcagaggaaaactttgagttcctgatcgtgtccagcacgggtcagacgtggcactttgaggcagccagttttgaggagcgggatgcctgggtccaggccatcgagagtcagatcctagccagtctgcaatgctgtgagagcagcaaggtcaaggtaagagtttgaggtggagtggaggactggccgcaggaactgaccctggtgctgacggccattggcaacgacacggccgaagtcgtgtgagaggagagcagaggtgtctgagaaggaggtggggcttggaggcagagtcagtgccaacccaaaccctctctgcagctgcgcacagacagccaaagcgaggccgtggccatccaggcgatccggaacgccaaggggaattcaatctgcgtggactgcggggcccccagtgagtgccaggaggcagcggaggggctagggagtgtagtgaatgccggggtgcctgtgctgcccggctgggagccgacctctacgctccttccgcagaccccacgtgggccagcttgaacctgggcgccctcatctgcatcgagtgttctggcatccaccgcaacctgggcacacacctgtcccgcgttcgctcgctggacttggacgactggccacgggagctgaccctggtgctgacggctattggcaacgacacggccaaccgcgtgtgggaaagcgacacgcgaggccgtgccaagccctcgcgggactcttcgcggtaagcgtgagggaacagagcggggggagggttgctgagggtgtgcgaacctgagacggtcccgtgggtaggggcagaagtcctggctgggggtccctagagccttttccgttgatccctggtcttgcagggaggagcgcgagtcgtggattcgcgccaagtacgagcagctactgttcctggcgccgctgagcacctcggaggagccgctgggccgccagctgtgggccgccgtgcaggcccaggacgtggctaccgttctcctgcttttggcccatgcgcgacacgggccgctcgacaccagcgtagaggacccacagctgcgctccccactccacctggcggccgagctcgcccacgtcgtcatcacgcaactgctgctgtgggtacgtgagctggggggaggaaagggggtctttgaggcttcatctcggaaaacgcctggcgcgggaaagcccgaaattcccagagggaccccggaagtaggcttggccatgtgggggaggcggcgccgggtgtgggcgccctggggacgcgcggtcacgcggccgtttccgccctctagtacggcgcggacgtggcggcccgtgacgcccagggccgcacggcgctgttctacgcccgccaggctggaagccagctgtgcgccgacatccttctccagcacggctgcccgggtgagggcggcagcgcggccaccacgcccagcgcggccaccacgcccagcatcaccgccacgcccagcccccgccgccggagcagcgccgctagcgtgggccgcgccgacgccccggttgcgctggtatagttgcccagcgggagagacacccccatccccacgcgggccgggcacgaccacaccgggcggaccgctggacagacgcacccactcacctctccgatccgcaccccgccccacgggagcacttcctacccccacgagggcacagcccccacgccttccagaagacacaaactcacctccctctccccaacgaggcatggagaccccagctcaacacgccccctctccattgtttccacactcggattgctctgggtctacccgctcggggttcgcggaaggggaggtccccagcggtacgggctcctaggcgcttggacatgcccgcttgtgccccctaggggcggaaagaagacccggtcctgcccgagctcaacaatcccagggcgggagcccatacccaggctggctcctggggcgacgccacgccagagggagggtttagtacatgggagggctagccccgggacttggggccaatacggaaaccctaccccttccatgctcatctcactgcccagtgaagggggcaagggcagcgaggggcaggacccctgctgctcatgggggtgggggttcccaaccctttccgtgaaagggaccgtgagtagtggaaaccaggacgtcccctacacctacccatgggtggaagctaaagagtccggggggaaccaagagcctgggtccctcccactactatcttgggagggagaagggatggagcaggagcgggctaagagggctgcgggggccttgtaatttattgctttgttccccaacatggggatgggggcgggcaggggcgtggggagggcgttttggggtaggggaagcccagggtgggcagggggtgggttggggtgggggtgctctcgggttgtgtctgtgaccgtgactgcgtacctgtgactgtgcagcgcccgtggtgatctggggtagggggcacccctacagtgggacccctcccccattattctttctgtccagcccctccctcccactggagcagctccagagccattcctcacccccgtgacctctcccagccagggctgagaggattcgaggtggctgggagggtttccaggccccctgccccttccccacaaactgggtgatagggcggacttacctggcccagccctgcctccctcagccaacccagcccttgggctgtctgtgtcagtggtttccggtctttttttttttttttttttctggctaaaatagtttgcaaaggaccaggtaattggggaggggagagaggtgggggcaagggggaaatgcccccccatctccttggaggcagtggtgtgaatcttcttcaacagcaattaaagaggaagtgattttgtctagggggtgagctgctggtctgttcttggaggcaggtcagggcatggccttggtcaagatggggtactggggttggacagggacaggcagaggtgcctcccactggggctggtggcaggacagtacccatgggcatggaggtggttccatcatgtacaacagttctgggttcatgtagtggaggacgtgggcaggttggagtcagtggggaccctgggaacagagaaggcactgactcttaagatgatgccagtcctgggagagttgggatatggtacttagaggagaggacaggcccatggagaggggtgggaagatgggacagctttgtttaagagcaggaactttggagacagatctgattttgaaacctgcccctccactgcacagctaggggaccttggtggcatctgtttatctgtattctgaacagtatctgttcagagggcacctgaaaggcgctccagctctgaggagggctgccccgagccagcctgctcaccgtgagcactaggtaccagagtagaacatagagtaggggttcctcccctggcctcgtcagggggtgttccagagggaaggggtgggagacctcctgggaaagatttcccagctagctgcagaggtccctggtgtccacaaactcagtgtcagctgatgcaggcatttatccacctccgtgccatcaaagggaccaccaaggccacagcggcctgaagccggtgctgcctccatgagctgcagtgccactaggctcagcacatagccaatcctaccatttctcgagggcagctgaaagtgtttactcaggtagaggggctggacagggtagggttgggtcagcagccagtgcaggttgggcacagccatatgttgttatctaccttgaggagttagttggtagcaccagcatctttgggtagaattgcttctgacccttggtgcccaccagccccaag

SEQ ID NO: 1884744 - DNA, 4001 bp, Homo sapiens; identical to SEQ ID NO: 915851

SEQ ID NO: 1884745 - DNA, 4001 bp, Homo sapiens; identical to SEQ ID NO: 915860

SEQ ID NO: 1884746 - DNA, 4001 bp, Homo sapiens; identical to SEQ ID NO: 915897

SEQ ID NO: 1884747 - DNA, 4001 bp, Homo sapiens; identical to SEQ ID NO: 915900

SEQ ID NO: 1884748 - DNA, 4001 bp, Homo sapiens
tcgtatctgtcacctcagttaaaatagcttgtatcaaaaggacaggcagtaacagaggcctacaaggacgtggagaaaggggaaccctcatccactattgctgggagtataagttagtaccaccactatgaagaatagtatggaggctgctcaacacactaaagatagaactaccatatgatccagcaatgccactcctgggtatatatgtgaaagaaaggaaatcaatatatcaaagagatagctgcacgcccgtgtttattgcagcactattcacaatagccaaaatatgaaatgaatctaagtgcccatcaatggatgaatggataaagaaaatgtgatatatatatacacagtggagtattattaagctataaaaaaagaatgaaatcctgccctttgcagcaacatggatagaaatggaggccattatgctgtgtgaaataagccaagcacagagagacaaatatcgtatgttctcactcatatgtgggagctaaaaaaagtgaatctcgtgaagatagacagtagattggtggttaccagaggcagcgaaggggaggggaataaaggcaaaacaaagaatatcaatgtatttattgctactgaactgcatttaaaaatggtaaatatggtaaattatacatgtatagtgtacctcaataaaatttttaaaaatacaggaacccagtttaatttgaatttcagataaaccatgaattttttttagaataagtatattccatgcactatttggcatataattatattaaacatgtttttactgtttacttgaaattcaaatttaactgggtgttctatattttatctgacaaccctattaagagttttgaatttcaataattcatatcacagccttagtttaggattctaaaatatgaaacaaaagccacaatttcaaaactgaaaacttgcaacgtaaactatataagctcaatttgttacagctgcaattcactcagacccacatgtcccaagataagaccacagacaaaccattttaacagttaactccacagggacccatgtgtcccagcaagaccacttacctttccacaagtgtcttagctcaggctgccatcacgaaataccacagagtgggtggcttaaacaacagaaatttattttctcacagttctggagaatagaagtccaagatcaagtgctagcatggtctgtttctggtgagggctctctttctggcttgtagaaggtggccttctttttttctttttctttttctttctctctctctcttttttttttaagacagagtcttgctctgtcgcccagtctggagtgcaatggcgtgatctcagctcactgtaacctctgcctcacaggttcaaatgattctcctgcctcagcctcccaagtagctgggattataggcacccaccaacacgcccagctactttttgtatttttagtagagatggggtttcaccatgttggccaggctggtcttgaactcctgacctcgtaatccacccacctcagcctcccaaagtgctaggattacaggcatgagccactgcacctggccaatggtggccttcttaatgtgtcctcacatggtgggagttgggaagcagggattgggaacagagggagcaggaggggaaggggagagagagatggaggagggagagagaaagctctctggtgcctcttcttataagggcactaatctcatttatgagggccccaccctcataacctcatctaaccttaattatctcccaaaggcctgatctccaaataccatcacattggggcgtaggtcttcaacatatgaatttggagggaaaaacaattcagtcaataacacagaaacttacctagtttataaattggatcaatccctgacaaaacgtcactgatcaacttccactctgaaaatactccatgactaaccagcatcctaacctccccactttgagacactatgggactctatcaagatgatgttgatcctcgagtttaataagagccaatgtgggttctgtgacatcatcatctctctgcttctgattggtcaagtatcctctctctctccccacttttctccctctaatccagtggttctcaaacattagctgtacctgaggcccttggggagcttcttaaacctcaggctgctgggcccactcccggagttcctgattcagtaagtctgggagggggcctgggaatttgcatttctaacaagttccctgatgcttttgctgatgctggtccagggaccatgctttaagaacttctgccttagagatcctcttgaattgtctggggtcggggttagggacggtggctgagcattggcattttataaagttccccacgtgattctgacatggagacagcattgaaaacactgttctaatgcagtttccacactgtagtcagtgtgctttttggaaagcacagatccgataaaggaactcatcagcttaaaacagtgaatggcatctcactgccctcagtaatagacacagccccttaacaaggcttatggggccctgtatgatgggtttccatttacttcactttcacctccagccccttcttgagctacctcaccacctcatgccccacagtccaggattactggggaaaccacagttccctgaagatgatcttgatccttttctccataaggctttgcccattctgcatctttactggggaagctgtcaccaccgacacacctctctacctggctaaccctttcttgctcttcagagccttactactaacagggtgatccatggaccagctgcaacagcctcttcgggagcttgttagaaaggcagaatcggccaggtgcggtggctcacacctgtaatcccagcaccttgggaggccaaggtgggaggatcgcttcagcccaggagcctgagaccagcctggcaacacagcaaaaccttgtctctataaaaaatacaaaaacttagctgggcatggtgatccgcatctgtagtcccaactactcgggaggctaaggtgggaggaggtcaaggctgcagtgagtggtgatcgcaggctgggagacagagcaagactctgtctcaaaaaaaaaaaaaaaaagcagaactttaggcctcactccagacctcctgaatcagaacctacattttaacaagatcctagaatgattcacatttacagtaaaatttgagaaactgttttcgggcttctgtagatgtactttctctggacttacgcgtctgagccccagaaactcagccgagtgcctctcctatgtgctgccaccgcaaccttccctagcacttaacacattgcacctgaccagagccaagtggcctgcaagctccgcagggacaggaactgtatctttacgcatgcttgcattctccactccagcacagtacctgacacatagcagatgctcaaaaatagttatcaattaaatacatgtttttagaaacaagtagagaaagtattagctttccggttagaaaattttggacttaagttcttgatttaccacttactagctgtaggaccttgaacaagtcaccctcctcccagaagttgttactcattgttaaattgagaatattatcaagtaccctacagaggtgttgtcaggattagtgacataatagatgtaaacccagaatgctatgtctgccaggtcagaattgcacgataaagaagagtgccctccgccttagttctcccaagcggcaagtctttactgagtttagtagaatactacttgttgaaatagaaagggtggccacacttgaacttaatgccatttttctttctattttcccccaactgcataaaagcaaaaccaaataaacaaacctgagaattgaactggaatcaatgcttttctcggcattgtgtcagaagaacaaaacttaaactggggccagcagacccttaagctccttaagccaggctctgggacccttgggattaaatttttaaaatcctctctccag

SEQ ID NO: 1884749 - DNA, 4001 bp, Homo sapiens; identical to SEQ ID NO: 915907

SEQ ID NO: 1884750 - DNA, 4001 bp, Homo sapiens; identical to SEQ ID NO: 915911

SEQ ID NO: 1884751 - DNA, 4001 bp, Homo sapiens
ccagaatgttaatagcagccatattcatcataaccccaactggaaatacccaaatatccatcaattgaagaatggataaacacattgtgatatattcatgcaatggaataatactcagcaataaaaaagaacagattactgatacacatggatggatctcaaaaacattactaagctaaaggatacagacacaagtacatactgtaaagctccatatatgtgaaatacaaatgcagacaaatctatggtgctataattcaggaagttgccaggggagggtggtggtgggtgtggggtgatcaactataaaggggcatgagggaactttatagggtggtggttcagtatcttgttttgggtgttaattacataggtgtatattttgaaattcaccaaacaaagcacctaagatgtgtgcattttattgcacgttaagaataatttaagggccgggcatggtggctcacatctataatcctagcactttgggaggccgaggtgggcaaatcacctgaggtcaggagttcgagaccagcctggccaacatggtgaagcctccgtctctactaaaaatacaaaaattagccaggtgtggtggtgcactcttataataccagctacttgggaggctgaggcaggagaatcacctgaaatcaggaggtggaggttgcagtgagcagagattgtgccactgcactccgtccaacctgggacagagtgagactccatctcagagaaaagaaaagaataaaatattttttaagcaaaaaaatgagaaagctggtgggggtacccatcaagacatcttttaggttccagtaatagctgtccttgggcactcttttcatcaaactacctctatgctcaagaacccaaaatgacttctttatcttatgtcttgtcacatccatatccttattctgctctcctccataagaaacctcctccattaatttctcccacttcccaacgtaccacggtgatctgctcacggtcccacgcagataatttgctctttcctatctgaatctccttgtggcctttaccctgcctggaccctactcaagctctctctgcccttcaaattccgtatttaaataaacctccttcagaaaagaactcttaatcctagccaatctgagcaccctaacttgccttactttttatgttcctttattggactaatatgatactctaagctgcatcctttgtatactcgcaacaaaagaaattttaatgaagtaggcggagactgtacctagggattccttcgtatttccctgcagaacccaggtgagaacctacatttctggggcagtcactacaatgcaggctgtgagggttatacggtatttaggcaagggcaaataggtgtttaattaaggactaatgggaatgatattgaagctctgaggctctgcaggggcctggatgggctgtttgcttttcctcatcctcaccgagatagcaagtggttgagaacaaggttgcatcctttttctgcccagccttccccgcaaaccagtgaggaaacgaccagcactgccgtctgatgagaggagcctgttgctgtaactgttttccagattactggggggacgaccccatcctggagaaggaagagagaggcgggagcatttaaggccaaagaggcactcaagcctttcccccatggatttacacccaacacgtatgcagaaaagcaaattacaaacaccgacgctcacaaccacacatacacgtgcacgcccagccccacagaagcaaacgcgcatgcctgtgggcccgcgcgcacctacttagttttctctgttctagacgccctcattccacccccgctcggcccagcccggcgtcctctacccaggcacggctgaggtttaccaagcccggcccggcctggagaaagtgtttctataagggggaagggaggtccttcccaccaaagcggaagcggcgcgcgccggccgggcagacttagctcgcgtcctgggaacatctggagggggctgggaggggcgcgcatccaggctgaacgtggattggctgctagggaggagggaggcggggtcagggccaggggcggggctccccggcccctttaaagccttgacatcaggaggcggctccggcacccccctttctctgccccccgcccccaagccgcggccatggacctggcggatccggcctgccctggcccagctcaacacctgatttcggtgagttctgggtctacttgggattgaaagggcggcgagtgcgggggggcgatctgtagctccgggccggggggagtggggtgtggagggtaaggctctcgtggcagtacagagtcggagagggcgtcgcggcttcctgcccaaaccctgctgcccgcccctccgtccctccctccagccgcaccctcctcgggggtccggctgcgactctgtgcacccccaccccaccccctcccgccccccgcgccatcctcgcgcacactccgtggccccggaagggaaactttcgggagtgggggatgttccgggggccgggctcccctccctctttgaaagcactgaccttgccccagctgctcaccccacccaacccgcatcccaccgtccgggtgccgcttagcggtgccgggttattgcggggggaggggctctctccccaaagcgcaggcgcggagacgagcctggggctccctttcgcactccttcccattccccgtggcctggggcggtagggcctggggaaggcggggagaggcggaaagaccgggtctcctagagaacagccccttcaaaggctttgaggggctgcgggaaggaggaaggacctggtgggctgcacgctgaagagaagctaagggagggagaagggttggttgggcagggagcagggacagggcagcgtctgcagaaaaggccctctgggtgctggctgcggtgccagaagaatgcagagaattcatctgtgcccgacgcttccctggcttagcccaactaagaaagcggctgcccggatcctagctcccctctccctgtcctgggcccaaggtcccgcgttatctccagtcctggcacggccccaagggcacagagggccctcacctcccacaggcctggttttccaggcatcccagggctggatcagctgagtccacttagtctgtccagctgctacttcttaaaggcctgccttgctgaggagctgggggtcttgggctaaggagttctctggctgtagaggcaatccctccctcccacttctccgcgtctgtcatgggtcctccttcttaagcacaatggtcagccagaggaagtggcccgggcaggggtggcctggggagcagtagaaagagtgtcaatgccttaccgttttgtggtcagtactttcggggaaaatgaacatagcccatttgccttgttgcagaccctcccttgcagacattacgccatctggctctctgagactccttgtgtgataggaaaattcacttctcaaattggtccccccatcttcctaaaaacaacctgggattagtgggtttcctatcccaaagaaaccgtgtgtattcctttccggggagatattcccatgttcaagcttgttttcaaagtctatggtctgtgcatgaggtggctttgtccctccagcatctttctccagctctggccctcacgaagagagtgaggacctggaggggcaggtgctgtggttggcagggaagaaggatcttcatgataggccggtgaagacctaagtgtttggggagcaagcgggtatcaataaagacagagtcagaagctctggtccctacttttcctagcttgctgtatgaccttggccaagacagtttgctctctggggctcagtttccccatctttaaatgtcagtagttggactagatagctctaatattcccttccactttttgacattgaatggttccactgatgggtgaatctataggggagaaaggtcctctggcagaatggttccatttaga

SEQ ID NO: 1884752 - DNA, 4001 bp, Homo sapiens; identical to SEQ ID NO: 915943

SEQ ID NO: 1884753 - DNA, 4001 bp, Homo sapiens; identical to SEQ ID NO: 915948

SEQ ID NO: 1884754 - DNA, 4001 bp, Homo sapiens
gattccacatccggtgcccccacccactggaatgtgtgggggctggagcggggaaggggttggtgggggctgagggagtgggcaggacacctgacaggggccaagatagactgagcctttgttttcctttccggggaatgagaggaggcgtgggcagcaacacaaaaccctttctaatctggctttggcttagctgccctctaagctgaaagtggggtggcatctagcaaaggaaaagaagagggaaaggcctgggccaatctcacaaatgatgggcacagcagagcccaggaggtgccaatgtgggagggaggaaatgggagggcagaccctgttccttctttttgggagacagctgggtcactgtcaagggtcgggtaggaactgaaacagactcccctgagaattcctgaacttctggttttccccattgaccacctgcttctatattcacactgagtaaagagagctgcctggagagaagggagatcagaggccccagccacaactttctttctctcaaccttcccccaagatgagtaacaaagatgaccccagcccctgcatggctcacttggatgactcagtctctggattcacaccgagctgttctacttgacctggggtggaaggtaccatactgcctttcttccaataggcagactagcaaatcatcatctctgcacgcttctgggtcacttagggtcaagagacaatgttctttgctttttcccaagtctttggctgttacttgcattctcatttagggctggggcagggtgtggtccctagagacccaataggaaggtaagagacagcctggctctgccatagctcccggaacaggttctactctcaccaccaccagctctgccatctctttcctgccagctgctccccaggcttgccagagggtgggaggcagaggagagggtggtaagctgtaatgaaggagggtgctctccctcctgctgaagtgacagctggacttggaagggtgaagggaggtgggcagatggcatcaagttgtaaatgccagggaagttaacgtggggaaggggaaatctggctgcttctctaaccacggcagctgttcctcccttgcccagtgctaggactcagagttgactcaagttgctctacaaagagctgggaggggcggggtaggataggggaattagtggaacatcccaccccttcaacagctatttgagggccagactggccagtgcctaaacttgggcggggtggggaaggaggaaactgatgttgataagaggtccataccccacattgaggtgatccaccaaagcttctgtcaggcaggtcgctgcagtgatagcctctcgcctcctcttttctggggagagggggaaaaggaattggaggggagacttggttttttgaggggtagtgttaaaggttccctacccatccattactattctgctagttgccgaaatttcttaactaatctctgaatgccggagctgaaaaggaccttgcaaaacatagcgcaacctctttcattttagagatgaggaaactggtaccctgggagggaaatggactcactcagggacgccaggaagtcagcggcagcgcccaggactcctgactcccaggcactctttctccactactcggccgcagaatcggtaactccgagatttccagcccggactcaggaaacaagtgccccacctccgttccggtggtttcaggcctccaagaagcccatctctggggggttccccacaccctcctccctccagagtcgctccttcccgccgccaggacgagaggctcccagggccaataggcagggcgctccggggcaggggcggggctaaggtgcggcaggtcggggattgggggcgttgccgaggggaccggagtattgcccaagggaccggagccagttggcaagggaaaggagtttcaaaaaaagcctctctgaaattccctctcccccatgcccgttgcccgctagctggcgtctttccctggatatggttagttactcgagatccaggctccgggctgaagctaggccgcggccgaagagaaaacggccgacaggatatttggctcaccctgcagctccttgcgttcattctgcttggcctggtgttcttttaggaggcgggacagcatggtcacgtcgggctgggggctgggtacgccgggccccctccggctccggaagctggaacgctcacctcggctccccggggccatgtcacgtgaccgctgtgtcacgtgaggttgggaaccgccctcttgagaccttgggtgaagatcttggcggggaagagaggtagagggttgcggagggcaggtgaagtgttctttattgggagcttagtttttggtgagtgttggaagaagtattttctaatacttatattgccaagccagtttttaacatttcctgtggatctcaggcttcgagggctggtggtgtcaggccgtctatcaccgtttaattgagggagcagaagctccctggcctcatttaaattattctccttccctctcctcacctcctggcagtgctagctggttctcagttgattcccagttccttccctcaaggagaggatgctttcctgtctctcccaaccctctttcttctcactaccccactgaagtctctcagctctgggtgatcattgtagagaagcattttaggcacttcagacagcctcctagggagcttggctaacttggcgggctgtgtgaatgtagaatttcatctctgtccttttgtggtcaggaatgcgaacccatttcagtgttagcagaagcgtaagtgctgtgccaaagtaaaaagtaatttatataaggcctctgtgaactaaaaagaaatgcttccgggattaactccagcgagaacaattataaacatcatgagcatattcttgctactggtacaatctctctcggtgcaccttgcactaacatgttgggtgactttgggcaagttgctcaccattctaggttatagttttctctttagtaaaactaggagaagggattggattaaatcggtggttctcaaccctggctaagcattagaatctaaacattagaatcacagaaatcacaaggcttataaaaatgccgtgattagccgggtgcggtggctcacgcccgtaatcccagcactttgggaggccgaggcgggcggatcacgaggtcaggagttcgagaccaggctgaccaacatggtgaaaccttgtatctactaaaaatacaaaatttagccaggcgtagtggcacaagcctgtaatcccagctactcaggagcctgaggcaggagaatcgcttgaacctgggaggcagaggttgcagtgagccgagatcacgccactgaactccagcctgggcgacagagtgggactctgtctcaaaaaaaaaaaaaaaaaagccttgattccagactaattaaatagaatctaaggagtgaagaccaaacatcactatatatatgtatgtatatatgtatgtatacgtatatatgtgtatatatgtatgtatacgtatatatgtgtatatatgtatgtatatgtatatatgtatatataaaattattattatttttgagacagagtctcgctctgtcgcctaggctggagtgcagtggcatgatctcagctgactgcaacctccacctcccaggttcaagcgattctcctgcctcagcctcctgagtagctgggattacaggcatgtgccaccacacctgactaatttttgtatttttttttttgagacggagtctcgctctgtcgcccaggctggagtgcagtggcgggatctcggctcactgcaagctccgcctcccgggttcacgccattctcctgcctcagcctcccaagtagctgggactacaggcgcccgccactacgcccggctaattttttttttttgtatttttagtagagacggggtttcaccgttttagccgggatggtctcgatctcctgacctcgtg

SEQ ID NO: 1884755 - DNA, 4001 bp, Homo sapiens; identical to SEQ ID NO: 915948

SEQ ID NO: 1884756 - DNA, 4001 bp, Homo sapiens; identical to SEQ ID NO: 915958

SEQ ID NO: 1884757 - DNA, 4001 bp, Homo sapiens; identical to SEQ ID NO: 915959

SEQ ID NO: 1884758 - DNA, 4001 bp, Homo sapiens; identical to SEQ ID NO: 915968

SEQ ID NO: 1884759 - DNA, 4001 bp, Homo sapiens
ggtcatttttctaccaccaggaatgagtcacaaatggccttcacaacttaaaggtacaagaaaagaggctataatcaagtggtttgtaacaagacacctttaaaaatagtctccctttagaaaatactgagacatttgtgctttccatccacacctcccccaaaaccagttcccatgaagttccacctgtactaccactttcacctgcatgttcacagaaacaaattgaatgcagagtctccctgacgattcatgaactgcagaatccccagagtagagattcctaaactctgccaagagactgtgctgtgcaaacctctcgatacacaactatgaccatagcaaatgaatttttatcaccaaaccttgcaattccttctcagtttagcttcccagttttcattttccccatcctttccctttttatccaactctagattcaaatcatttcacctttgagcatcagtactctcttctaagcatacgtaattcccaaaagaacactgcatcttcaatactaaaatgataaataccatgaaaaggctcataaataacagtcagaagttgaactacatttttttattcctatcttggacatactgagcaatacgaaaagtgataagccaagttaaacctgcagtcaaaaaaaaactggtgtcaatcatactccacaaagtgttgaggaaatggtatcaatcctcaggattaatacaatctaaggcttacttgtttaggagcatttcaaaaatataacacttaacatcagaagaaaatgatctatagggataaagaaaataaagatctataggcataaccagaaatcagatctcataatgtacagatttctctatttacagtcccatatattaaatgatttaaggactcagttaagcagctgggtcggctggtattacaaactatcttactgtaaaagattttgtgatactgttatattagttccaaatatgaaaataaaccggttatattttgatagcagccatatataaaagttcagtggcagagactgagagataagtctaaaatgttggcagtctgtataccttcagataaataagaaatctattcagttttagacaatccaagatatactttttgaagacttccatgcatagataaaactattgacaaatgttctccatatagcctatcaagaggattttatcacatcatttgaaataggggtgaaaaggggagaggaagtatctttaaacttcaatatgcaaagtacaacttcagttatcatacctctcttctgtaaagaggaagaagagagagtatcagaaatgttaaaagtcacgcagggagaagtccaatagtagatttatttgctcccaagattaaagggagcctggaaacctgtagtcattaaacactagccatcgggaatacggcttccttccttttaacttgaaggccaatttcataaactgcaacacctatacaaaacaaaattaattacttgcaatgtgtgagttataatgacttaaggaaactatttgtgcaatgtacctgaaagccactttctggtggcctttccagtctattattatagaaatattgcacataaggataaagacatgagattcccattccagatgacaaagataacagccgcattatcctgcatgaaccagggtaactcttgctatacaatccacttgaagccttgtttcaacattacagagggaggcactacttaaatttggaaaaaaggaaataatttcaaaactacctgttaaaacttagaaagtaacactcctcaaacttactgccaatcacaactatgaattcctggtgccaaaggcaacaataattttgaaagtagtcatcctatcttaaaaggatttataataaaatatttcaaaacattccccagaaacagtgaacaagaaatacatcacaaacagctactgtaccgcagatacaggttcagctcaattgtctggggaaggtaaggttaaagtcacaggaaacagctggtctcagagtgatgtgtgcaagcctttttcaaagacaaacttataaacagctcctcacaagccagacatcacctgaattctaaaataaacatttttattaactgtttccatcattttcaaagattgaaaaagtctgatgtcaagatcttcaaaaacaactttccatttgaaaaaaggctttatgataaaaaaaaaaaatggttgaggtacttagtttcaatggagttaccagatgaaatgtagttggtaaacaacagtagtcagcactggggtgagacccatttaaaaacaaccctacctggtgtttttattgtaattcaagtttgaaataccgaggagctttttcacagaataggtttaaaaataaaaccataacaattggcaagggtagtccatgtgttgcgggtctacgaattctaactctcgagaatggtgtgccaataatatccacagacatttgtactctaaatacctgcatattcagtggcctattcctgtgttgtctacaaaatcagaataatttattcctgggtgtagaaataacttcttaaaagttatttgagattactaatttcaagtaattactaattttatttcagactgcgtatttccagtgtcaacatgtttacatatataccaaaaaaaggccactatatgttaactgtgtagagcaaaattcaatttttccactttcaatttccactgaaaaacgctgttatcctctacaactaaacagcaagtccttctattatatggggtagtgaagtaatctacactacagcattatcaaggttcacttaggtttttagtatttatctgaaataaaagtctgaaaatgaggaatcgagaaagtcagcatttcaacttttgagaataaaagttcataaacataccttttgttgaattccagcttatgtgatttttatgtacatcttgcaggtgatgaaaagcaaaaagcaaccaatctctctgtggtgtttagcctgttctttaagactatgggtcacctgccccggggaaatttctaattgaacaaagaatccatggggcaaagtaattgtttttcaaaggtgggtcagaatggaacatttatatcttcacttcaacagggaagcaatgaaatgtaatcctttgagtatcacatttttggtagatgctaccgtggtctcttatccttatttcatgagatcattagcctgtgaatgtgtccatgttttgactttagaaatttttaaaacatgctactcctgtgtttcctgtaaaacctaaacatgtatatacagagcatcttcattcctcatcaaatgtttttccagcatgaccagtgtgcaacagagattcagtttatagaacctgtcttctaagaaaaaatacttttagctaaacctctataatcatgacaagagattgattaaaatgccaagataagaaacgatttattatagagagaagaaaaatttctcatccaaaatatagaaatctgtacaactttgccacaatcaatatacatgaactgtacaaatttacaccagttcataatttaccaaataaaagatgactaacaaagttcacaaaatagatggtggtttgtggaaaagacttttacccaattaagtacaaggaaagttacaaaccagacctccactttctaaaaataagaagtttactcagtcttagaaaactacaagctagcaaatgtacagagagctggctggtgctaacaccacagttgagacagtgtctttttaagggtcttttttaaagcctgttgccatggcagattctggtcacttgctactttcaaggccaaaaacacaatacaaggtctgaccatttccccaggtcatgcttactagtttgtctttatgtacatttatacatatttaagtgctaggtaaaagtcttgtaaaatttccagtactaccatgtttaaaacgtttaactttcctattaaaagctgccgaaaaggttaacaataacaactttcaagtgtaatagtgc

SEQ ID NO: 1884760 - DNA, 4001 bp, Homo sapiens; identical to SEQ ID NO: 915980

SEQ ID NO: 1884761 - DNA, 4001 bp, Homo sapiens
ccctaagagttctatgagagagcaggtttcagtggtctcaggggaggaaagaagtcctagtcagagaggcccactcctcgaagatgggtatgggagatcatccccagttgtgtttggggttggggtgtggcagacaggtaggcttgatctcaagactgtacctgagacattgcatctgtcctggccatcactctcttatcatctccttgtagccatagactgtggctctcctaaatctctctagcctagaaaaaccaaagatgcagagcacaccctgtttgggtctgtaacttgcctccatattactatatgcaaaatgggggaagcaatagattcttctctgagaggtgtgtgtgcgcgcgcacatgcatttgtgtgtgcatacaacgtaaggccttccacacacctgccttctctgaggatgggaccacccatctccataagagccttctggcctcctaccaagctgtgggtgagtgtccttcctcggggagcggtgagagcaggcaggggctctagtatctgcctaaagaagcttgagtgacggcttgagtgatgactgggactagggactgagggacacctgggctcgaccccagccctgaccatgctggacaagcagcctccagaggttgtgaataggattcaaaagaccacctaagcgcatgtcccccacccctgcttggggaggagggaaaggaagagaaagctcaagttcaaggatcacaaacttcaattctacaagagggaggctccccgggtatgtcgtgaacggaaaggtcggggaggaagagacatggctgattgaaggcagcagccataactcacaaggagccatcctacacacatggcaaaaattaatgttaaatagtacaaaagggtcgagtcagtgccctgccaccctgacctctgagggccagcgaggtttttggacgtttctcccctaagctgcggcgggcccgctgttcctgagtcagacggcaggtggcgctcagcccggagaattggagaaggggaactgtggagttgcttaacatttccaggaacttcctcctcccccaccggccttcaccttttgttccctatcctgggccagttctctcgcaggtcccagatgtccagttccagatgcctggacccagagtgtgggggaaatatctctggagaagccctcactccaaaggctgtccaggcgcaatgtgagtgtggccccggcagaggaggagggaagaggacgggaggggaagagaaagggtgggtggccgcaaaccctccctccccccaccctaccccccccacacacacatcccccccccccccacacacacacacacacacacacctcccccacatacacacaccagcagcagcagcagcagcagcacagcagatattccatggggagactgaaatttgcctgtggcctctagcaccttcccagagggtggtcgggggatatttacggcagaccctcactcgccccaccattgctccctcggatcccagggtggggtgggatctgctgaagcagaaagcacccccctcctttggacgagactctcctgggagatgagcaaaggtgatgtcttcggaggatggaaaacccacaatcctagagctcaggctgcgcgggaggctgtagggattggggtgaggaaggggagcaagggaggagacgggaagtgcccgggcctcaagggtgaggccacagcttctagccctgcctcgcgaggcctctgagtcctagcgcggctcccccgctcctcccacacccacaggcttccggccatagctgcgcggccccaccttgccctccccccaactcacaggtggtggctgcttctctggggagtcctccaggcttgcccaacccggggctccgtcctcttggcccaagagctaccccagcagctgacatcccccgggtacccagagccgtatggcaaaggccaagagagcagcacggacatcaaggctccagagggctttgctgtgaggctcgtcttccaggacttcgacctggagccgtcccaggactgtgcaggggactctgtcacagtgagctggggatggggggggtcccgccaggactgtggccagggagattcccggggttgtgggaagtggcggtgccctgaatcccccatctggaggagggatgaattttccatgtaggggcagtcgggcttggcttaccggggagcagtggtggaccccaggacacagcctcccaccagcgcctccggggctgccatctgggccccacagagcaaagagggcagcaagcaggccctgcgtttggaaggcttatgaatggacacacaaatcttgcaaatctatggagccaggggcagggacgcacatattggttgttaaaaatatgtcatcatgtatttgttgagtgcctgctctatcaggtgaggaagctggacacaaataataacaaaagattaagtcaccgttcacacttaccttggaagagctattacaaaacttctaacgccaaagccttattcagaataaggacattttaaaaacagtacttgatggagtgatgcaagcttgcagtcccagcagtatagtcaggagactgaggctggaggatcagagggctggagcccagggttcaaggccagcctaagcaacatagcaagaccccatctcaaaaataagtaaataataaataaaaataaaaagagcacattatcttttgatttaaattttatttatatcaaaatgacataaatttttgaactttattttttaattttaaaatttttaattattatggatacataatagttgtaagactttttgttttttaattaaagttttctaaggctgggcgcagtagctcatgtctgtagtcccagcactttgggaggctgaggcgaaagaagcacttgagcccaggaatttgagaccagcctgggcaacatagcaagaccccatctctacaaaaaaatttaaaaattagccaagtgtggtggcacgcacctgtggtcccagctacaagggacgctgaagtgagaggatcacttgagcctggaaggtagaggctgcagtgagctctgatcatgacaccgtactccagcctgggtgacagagtgagaccctgtctccaaaaaaaaaaaaaggtttttaaaaaggtttatgaataacagcagtctccaagctgttcctccccgcccctgagtgctgctcctcaggagcagtcatttgccaattcatgtagctgtttcatctggtctttaacttcatatgtataaataacatgcttatttgtctttcatttttacgtattttctattaatgctcaactacagtatagaagataaggactagctttatctgtcttcagtcttcaccacccacatttcccctcctcattctgccagtttacctatattatcatttttagttaaatctttattcattatttacattattatgactgtaaaatattcacatctgagcacatagcataaaataattatatttcttttcttctccaacttttgggtttcctaggagtcaatagttacatggagtttttttgttttgttttgttttgttttttggtggggggtgtttgtttttgttttgctttttagtttgcttagttgtctctgtaactaatctcaccagactcttaaccaggagtgtaaatcttcttctgaaatactcaagcatgaatttcagtctatcggtcctccttttaattggtgacatccctcctgaagatctctcgatttattttcacagcctgagttctttgctctctaagccgtcacacattctgggagttctcttctccctctttctggggatttcctttacctgtgctgaacctgaatcccatacctttctcttttttggtttactctcccattttggaggagcaccttcaccagtggcttccttagaaagggtattttagagtgaattttagaagatcttatatatgtctaaatgtctcagttctaccctcacagtggagg

SEQ ID NO: 1884762 - DNA, 4001 bp, Homo sapiens
attaactgatgattgttaaagctcttcgatgattttaacgtgtagcaaggttgagagccactagcctagaacaagcgagctttcagtcccactgtgctctgcctggtcagagcatctagtgcaatcccggcaccacattattagggacctttgacacactggaacaaacccaacagaggatgaccaggatggcaaggttcctagaaaccatttcctaggagaaccgtttcagggaattcgggaagaaaacctggagaggaggtgactttggagggtgcgatacacctctcacacctgcaacgggtgggatggggaaagggtggcaggctcagcccaccagcggacagatttcagctcacatggggaagaccttcccaaatgagctcttccaagatgagaggggcttgcctgaaaggtagtgagccccccatcatcagacatagccaagcagagactgtgctcatccgggcgtcaggctgtggtgcaggaggtggggcgttaaaccaggtggcttccaaggtttacctctcaaagtctggtattcctgtggcctcgatcatcctgcattcatttcacagaccttccctgagcgcctaccatgtgcaggccctgttctaggtacagggacacagctgagaaacagagcttctgctctcatgagctcacatcatggtgaggagagacagataataaacacatacatatataacacatcaggaaggtcaggagtgccaaagaaaaactaagcagggcaaggagagaatgagtggcgtgggcaaggagcaagacaaacagatgcctgaaaggagcgagtgccaggctgcactcagcttcccccgacccgctggctcaggagccgattttcccatagccaggcactaagcagccggtagggaggacagagaagcttaagggtcacctgctggcccttcccagcagaagcaaggcaggggcatgcgccgtgtttgcacagatacctcacccctggaaaggcagcagcaggcaatgggcagtgggcctgtctcagcagtttcaccagggagaatggtttctctgaaagaatagtataaaggttcagtgggtgtcagaaaggagagaggcaggctgggatctgctgatacagcatcagggcaaccccccggcccctctgagagccaaaccttctctggtttttgttttggttgttttttgagacagggtctcgctctgtcacccaggctggagtgtagtggtacaatcacagctcagtgcagcctggcgctgctggggtcaaatgatcctcccacctcagtctctggccttgctaagatcacaggtgtgcatcaccacacccagctaattattcttaaattttttgtagagacgaagtttccctgtgttgcctgggcctggtctcgaactcctgggctcaagcagtccttctgcctgggcttcccaaagtgctgggtgacaggtgtgagccaccgtgctgggccataagcaagtcttcatatatttgatgacagtgtttgaccaccccagccaaaacttctctggcctgcacatccctaattctggcagatgctccatctccacttgttccccatgggtgcccctcccaacacacacacgtacacgtgcacacacgcacacttccccaagtgacctaccagataccccctcgctctagccctcaagggaagagctgggctccaggagtaatgttcctttggttcttcatggctcccaccccgctccttcaggtcttgatttcagaaggactggggcagtttgctcaagatcccaagttcatcgaggtcaccacccaggagctggccgacgcctgcgacatgaccatagaggagatggagagcgcggccgacaacatcctcagcgggggcgccccacagagccccaatggcgccctcttaccctttgtgaactgcagggacgcggggcaggaccgagccgggggcgaagaggacgcgggctgtgtgcgcgcgcggggtcgaccgagtgaggaggagctccaggacagcagggtctacgtcagcagcctgtagtgggcgctgccagatgcgggcttttttttatttgtttcaatgttcctaatgggttcgtttcagaagtgcctcactgttctcgtgacctggagttaaccggaacagcgtcttcattcatttctgttgggaccagacgcggagcctgggtgcgcgagccgccctccgggaggaaggcgcccggctgcgtctgcagaggcggggagaggaggcggcgagggtcccggggcgcgaggaaggcgcctgccctctcccagctcgcaggccccgggcccggccgcgcctccgcggggagagcaccccggcttcccgcgcgccctcaccaaaaggaccctacagcaaacgggtgtctttcgactctgcttgtagaaaccatttgcacatattctgtacgagcctcgctgtctccctagagccagggccctgcggatttggagaagggagcggggcaggacttccaggaggaccccaacccggcccggagagggaggaggaggcctccaggggcgcggagctctggggatgggcgtcgggccggcagtggtgcggctcactccgtccctgcccacctgcgacgggatcccccgaccggcacgggccacgccgagctcccggccagccgccggcccgcaggcagcgcgagggaggagctgcgccgccggctccgcccaaccaggtggtgctgagcttccgctgagcgctcttttgttttgtggtttgacacttttcttgacagcatgttgcagtttcttttcggttttggttttttttaaatgttttattttgctttcccagcgggaggggaggaagaagagtgtttacaaagtcctgtagccccctcacctttctgttttcacttttgccaatgtacatcgggtttggttttcttgtattatttaaacggttgtggtttcctttttccacggaggttcaatagaagccgctgcaggagagttttaccaaccattgtgtatgcccaataatttgttatcatttccttaggtagtaacctatttttgttctggtttggttcggttatctaatggaaaggtaactggcaatgcacttgatgtggtcttgcacatgtgggtgatagagttgggttcctttttatgctgggtgtacaggtgggtttgggagagaggagcatgcgcgagagagtctccgagtgtgtgcgacgcgtgtgtgtgtggtgggttgtctgtgtgcatatgtcctgcccgtgtatatgcacccacaccatgtgcccgtgcacaccagtgactacgcagtcccccctttctggtttagctgtgggaagatctgaatctggggccgtttgaaagcaaaaacaaaccactgtctctgcttctgaaacgggaatcagtaactctttgcattttctgtcccacaagatatgcaaaaacaatgcaataatattcatttaaaaatacaattgtgagttgtgttggcattaaaactgtattttaaaaaaagacagaaatttaagggaaaaacacaagaaggcattttgcttcaatatattccgtgtaatgttttattgcattgataatgtttctgttgaagaaaccgttatacttgaattcaggtcagtttcagtatttttcaaatatttttttaaaactgaattgcaattgtgccaagcgaatataatgaattgaattaagttggttttcggattcacttcttgtatattttgctgcatgtaaagtaaatcattttgtatttggagtgtgacaagctttacctttgaactcaagtgcttttctatatgtggttgggggaaagggaacaagttttctttagtttgcacaatgagcaaaggtatcaccagtgtagtcattattctgctctccacaaacaggtttggacattactgttttgcatatcttgtgtttgcttacatttccctcaatttttccaaaatcgtttgctgggtatgtttgtaccgcctcttgctgt

SEQ ID NO: 1884763 - DNA, 4001 bp, Homo sapiens
gcttccttccccttcctacacttccagcttaaagctcaggctgtccgtcagtgtgttcctcggggcaacagaaggagccccgggcaggtgggaggctcgaatccgagtccctgctctctcactaatgacatgagtatgagccatttactctctctctacttcagttgctccattggtagactagagaaaggtgatgacatctgggaatttaattcattgaataacccagacatgggccttctctccgttagatccttcaaaaacaataacagaaacatttcaaatgaagtgaaacaagaaccagtccaccaagacacaagtcaaaataattagctgatttttaaaaaataaaaataggggccaggcgtgctggctcgtgcctgtaattccagcactttgagaggcccagtcgggcagatcccgaggtcaggagattgagaccatcctggccaacatggtgaaacctcgtctctactaaaaatacaaaaattagccgggcgtggtggcacgtgcctgtaatcccagctactcaggaggctgaggcaggagaatcgcttgaacctgggaggcagaggttgcagtgagccgagatcaccccactctagcctgggcgacagagtgaggctccatctgaaaaaataaaataaaataataaaaataggacaagttctgctactaaattaaaaaaaaaaaaaagagcaaaggcttaaaaaatataccatcagtagccaatgcaatcactcaatctgaaatgggtgtaaataggcctatttctgactgccagaaaaccaaaacacactttttttttttttttaaatggaatctcgctctgtcgccaggctggagtgcagtggcacaatctcggcctgctgcaacctctgactccctagttcaagccattctcctgcctcagcctctcaagtagctgggattacaggcacgtgccaccacgcccggctaatttttgtatttttagtagagacagggtttcaccatgttggccaggatggtctcaatctcctgaccttgtgatctgcccgactgggcctcccaaagtgctgggatgacaggcatgagccaccgcgcccggccaaaacacacatttaattcacacatatgtgtgtataacaaggaagaaaactgggaaggaaatgtgttcgtatgctaacactgattatcatgagtagaaagatcagcagtgacatccaccttactcctttagtttttttactttccaaatgttctgcaaggaatgttactcccctatgttcagagggaaggagaggcgatataaatgactgccaggaggaatatgctgtaatacttaaagattgatgtaaattaaggatgtgagattttgttccctagaggaacaaaaggcagggaggtatggaagcaagaattcagcagggtcgaaggttcactgtcaaagccaaccacatgccaactaaggaagaccaatagctagtaacaatgcgaaagactgaccagtcaaatgcagggacccaattctgaggaaataagagttccagagaaaagaggagaagccagccatgtgggaactacaatcctgtcaagaattacagactatcttttaaacacaaagacatttcagaacagctaccaaagggcccgaaacgcccccacccaagggtgagccttcatcagacatgggccctccataaacttgttaaaatcgaaacgcccccacccaagggtgagccttcatcagacacgggccctccacaaacttgttaaaatcctaagaaagaaagacaaagtcaagtcttggaagcaactagaaagaaatgtgagaagacatctacatttgtgaagatgaggcttgcatcagtcctcacccttcagacttctcagcgtggaaggaattggggcgaaattaacacctacctcagagaagcagagctgtcatcccaagtccagtaccaagccaaagaagcttctctcttggaacgtagaaggaagagctctcatcccaagtccagtaccaagccaaacaagcttctctcttggaacataaaaggaagatagtgaaaaatacttagatgacatgaaacaattgtcggtgaacttcaacaattacatagaccatcatgagaataaattaaggctgataaaaaaaaatgaaaggtccttttggaaactatgttaatttcttaggtctgctgtaacaaatgatcacaaactgggcagctggaaacaagagaaagttctctcagtttaggagaccagagacctaaaactaaggtgtcagcagagttggttctttctggaggctctggggagagtctgttccaccctttctcccagattctgagggctgtggatgatgcctggtgtgcactggctcacagcacatcacgccatctgtgcctccatcttcaaatagcctccagggtcttgtgtcctctcctcttcttggaaggacaccagccacattggacttagggcccaccctcatccaggatgacctcaccttaactaattacattggtgaaaatcctatttccaactaaggccacattctgaggttctaggcagacatgaattttgggaggacactattcagcccagtaccgaagctaagtatatttgaataccatgtgtgttaggatcttgcactgcgtgtgtcagaaacctccagctacctctcccgtgatggggactgatcatctgtgcagctggaaggcccaggagtcgtcccctgccttcaggtcctgtttggatctggcatttggggagctcgggattccgtcaatccctctactgccacctctgcatgctctgccctgtggccccagaggtggatttgaacccaggcagtctgacacaagagccctcaaccacaatactggactgccggtcctatgcgagagcagtaaacatcccgtgttggtttcctactgctgcaaagcaaattactacaagcttttcagcttaaaaagacaccccgttggctgggcacggtggctcacacatgtaatcccagcactttgggaggctgaggcaggtagattacctgaggttgggagttcgagaccaacatggagaaaccccatctctactaaaaatataaaattagctgggcatggtggcccatgcctgtaatcccagctacttgggaggctgaggcaggagaatcacttgaacccaggaggtggaggttgcagtgagccaagatcgcgccattgcactccagcctgggcaacaagagcaaacttccgtctaaaaaaaaaaaaaaaaaaagacaccccgttagtagctcatggttttgcaggtcagaagtccagcagtggtgaagctgggctttcataaggcaaatccaggatattgatcaggccatggtctcttctggaggctctgggggagatcatgttgttggtggaattcatttgttgcaattgtaggcctgagatcctcactttcctgctggctgacagctggggaccccctctgctcctagaggctgcctctctcagttcagcccacatgactgtttgctttcttccaggccggctggagagaactctgcctttaaagggctcatgtgactaggtcaggcctgcctaacctccctgtcttaggtcataggtgccgtgtgccatataacctaatctcaggagtaaaatctatgatggtcaggggcccagggctttggcagcatgtgtaccctgatgaggagcatcttagaatcctgtcccctacatctgcccttacagctgtaaggctcagctttcctttttcatcactgtaaggctaggaccccagaggctgcataaggcaggcatctaagtaggggaactcgggacagagccctcatcgacagatgtaccctccaatcatccatgttccctgtgactgccgaaggaggtccatgagaaatgccacccatggggaccagccccccactgcccgtggcagggccatacgtgttccagctggtgagcgcatggccgccattgttcctgcccaggggctgggct

SEQ ID NO: 1884764 - DNA, 4001 bp, Homo sapiens
ttgggcaaggaggcctcaaaggatgccaggcagtttgttcagaataaacatcaacagtgaaagtcttgtcaagagtgttgggaagttggacatttttagatacagctgatggcagtgcagaagttccactcaccttggagggtcatttgacaaaatgttcaaaggcttcaaaatgctcatttcttttggttcagcaagtccataggattttatcctacagaaacagtcagaaatacacaaggattacttacaagtgtgttcattgtagtcttatttgtaatggagctaaacctgggataatttctctcctctattaatcaccagagggctgggtaactaagttaggatgcgtccatatgatggaacaccatgtagccattcaaatgataacctagaaggacagttaatggcacataaagatgttcaactgcactgctaaatgaacaaacatagaaagttatctacaatatgatcccaaattttataagatatataacctctatttacatctcatatgagtgtagacaggatatactataccctggaaggtataataggtatacattagagtgttaatgataagccaattcagggaacaaaattacaaattattttatttcattctctatttatgattcttctaaattttctaacataaacatttgaaataaaaacttaaaaaaagccctgttatttgaaaaaacttgtgatgtcttaccatgtccaagtataaactgaaaagtgaataaatcagtgggctggtggcccttcttaatacactgccatacataggacaaccatttgtattcagaaagtttgtgttgagtaagtcactggatttgagtcagaagacttggagttggagtcccagctcagccattcactggctttgtgatcttgaacacgacgcttaacctctaatgcacagactcttggctgcttcaatttgcagtgggaatgaatggtgataacaagaacaagaataatgctttcacggagttgtgaggattcagtgatagggaattagaaaatattttgtaagaggaaaaccacaatgtaaatattaatatttcagggcccaagtctttgacatggacgtgactatgggcaccaatagatttttggatggatcatttatggtaccctgtcgtgccctttagtacacctttgcctggtgtacatctcatgcaaccaaatggccagctcacgtctgatcccaagccctgaattaagtgagcaatctgaacatgagggacaatgagttgtcctgagtggcaggcggctctcaagtgaggagtgctttctcattcactggaaaactgtaagtgaaatgctgcttcagcagccacacccagagcccctttgatacatggttcagctgttctgttacataaacctattggaaatgaacctgcaaaggagttgagcagagggaggtgcccattggaataaggacaaaggagaaatgcactacctctccatttaaaggagacatttgctttttaatggaccctaaacactgggatctgaaatgtcacaatctttacatactggaatggacacgcacataaatgctgatgaacagctcagcaggcacttaatttttaaatccttgattgttcaaggacagggatatcctacttggctctgcaagactcatagcatactggacaatgttgtctgcatcggaatgtcttactggggagtcacacctccaaaaagaagctgtgtggtgaatgggtccaaacataagggtttgagcccctgttttcagctgggatttttgggtaaagggagatgaagcagccaggtctaaccaactgcagaggtttatttcttggggactcccagctccattgaggtgtagaaaatatagcacataccagttaccaacaaggatacctgttcctggatggaactgcctggttggaaagaatgctggtggtcagtagtgccttctgatcctaagaagaggaccctaacctggccattttgaataagggccccatagctgctgattaagtgtgtcaatagtgggttccttgtgatgtaacattcatcgtccttcctgtggtggatgaccctacagacccacctgctgataagctaagctgcttgcttaaggccataaagctacagaggtattaatctagagtttgaatcggatctctctgactctaagactcctgctctgaagtcctccattatccttcctcttatagagttgttttgccagtgctattggatttgaattcaattgtaccctacgtacattagaatgaaaatgttatacatcgtagaaaatgaataaatcatggttccatccctcaagaaacttatatgtattattatttaagagtttgaagtgcatagcaagagctcaataaataattattgagtaaatgataatacacaaatatattctagtttatttatagatatccataaccccaatcagattatgatgcatctcataaaaggtgcacacacaaaatcccatcggagtttaaagacgggagagaatacctctggagaaatcaggaaaataaaagttggatgtatcatttgagatgggtcttaaagacctgtaaacactctgacaggtagagatggtgaggcttggttcccaccctgaacctcctgcctgctgattggttcctgcagtagaccctaggtgccctggtttgtttctgctttgtaattccacttcttaatgatatcaacaactgggagctgggaaatgaagtttttattctgataaacctgacttgccacaagaggcctacaagagaaagtatgatttctggtctcctctccaccgtctccgatatgcaaacgagtcacacatctgtatcttcattctagagctctcttttgaactgctaatccccctggcggagcctctgatcctggttatccagcattcttctagatttaaggttgaaacatgatttaaggtcatgaatgcatgaccttcccagactcccttgtacatgagctcccacattcccagcccctgttctgctccaccccttgtggtgatagccagggtggtcagctgcattgcatgttagtagtaagggaagaatggggtggtgggtccagagttgtgtgttataagatgactttggaggtcaggctgttgttttggctcactttgggattttggggagtagcttactttgccatcaatttcctgatgaagaaaaggcaacttagcattcttcgtataagtaaacaggtcagtgttggagataattacatcatgaagcaccgtgggtcccagaggtgggaggcctcatgtaagtactactgtgctattgccatcattgtctggaggggatgataatgtcgtatttgcttgcaaaatggttttctgatgttgggttgaaagagacggttatgtaccttagccaactgttagggctgtttttcttctagcacaatttataaagtgatttttgtcacacccaaatttttgcaggaccgcagaactcagacatttaaggttgtggcttttcagaatggatgaataaacgttcgcactctaaacttaagagtgtgaaggcttgtcaaggctccatttctggtttgctttctgatctcatgcaagtcacttcacctctctgctttttgtttttccatctgtgagacattgctcactttgccaggatatcttcaatatgaagaagataatgtgtggaacgctgtcagctgctgcatcattaaaaagcatttattcagcacttatgtagcattgcacaaagagaattataaagactagatccctgccttgtctgctaggttatattctaatatcttcttaaaaaggcagaaactaggcaactaaagagagcaataattcaaatgttatcttttaagctacacaaataacagtagcataaataattaacaagcaccaatacgcaaagaaatcagttatcaagaatacacagaaatagttatcaaaaatacatagataaaattatcagaaatttctc

SEQ ID NO: 1884765 - DNA, 4001 bp, Homo sapiens
tttacagatatggaaactgagacttcgagacttgaattacaatgtccagggtcacccagctgagtaaatgtggagcctggacttagcccaggcatatctgacaccaaactcagtctctactattatcttactcattcttctgaggggtgaagtgtgggtgagctggtgggggcagggctgcagggagatgaacagggtgaaatgattgcaaaatatgctgcagataattcacaaagagccaagtcactgggaacagagtgtatgtgtgttagggggtcacgtgcaggatttatagcccagcttttctaaaggtaggcactgtataaatctagcaagtaaatattacctccacgcttctttagtttcatttttcacttctcttttcagctgtgaaatgtgttctttcctttccagaaaaaggtatttcctaaatatttggtcttgcagtatacgcccatatcccagcttttaactttggaacacagccctgggtgtgctctttcgaggtaacaaattctcaacatgacaaaaggagaccattgtgaattccgatttggggatttgggaggtggtgggagcagaggagggagtctgcatttctctgtcattgaatgatttgattctccagctaaagaatctcccataggtcttcatgtgtgccctctttctgcatagtattttgcttatatttgcatgagcctttttctctcctcttccttactacattttaggtgtcttcaagaagagaactgtgtttattctttgtgcataacataatgccttgtacatatggacactcaatttgtgttgagtgcatgattcactctggaaaagatttttaaatgtgaccacagatattttctttggaagcaattaagagtgcactgaatttgttaattacagtatatttgtaagagtgaaaacctggaaatgaactaaatattcaacaaaaatgttggttaaataataacactgagagattattctaagtgcctcacatacataaagtcatttgctcctccaaacaaccctgtgaaggaattgcttttatccacattttaccggtgaggaaaccaaagcacagaaacgtttactcacttgcccatgtttcacagccagttgatgttgaaagacctgggatttgaaccctagcagtcttcagagcctacgctcttaaccaccgcatagatgaactagagtgcattcatacagttaaattctacatagacatgaacaatattaaggaagaatattagtaacgtggaaaaagatgatttacattaaaagaaaaacaagtcacgaaaatattacaggcactatgatttcattttccttttaaagtcaggtttatatttgaactagggaaaagactaaatagggttcacaccaaaatgttgacagtatcctcaatctggggcaggtggggaaaaaaagtgttgacagtagctgtctttgggaggtgggattacacgtaaatgtttcttcttcttcttcttcttccctgtctggtccaaggcttgaaaagccaggttgccaagcaggctcttcctcttcccttagcacacacacacctcttgacacagagccctccccccactgcctagccagggacaacactgctaatcaatctcttcagaataagtctcccatcaagtctgcaaggtgtcccttctatttctctccctctgcccaccacaacagccactcagcactaaatgctgccacccacctgcaaaaattacctgtgcagtgtttccagcccaaatgcattgcattgtcctcattgcaatccaagctgcctggttgaagtgtcagccactctgtgttggtcgtagagagctaggagcaccaagatgatgggtaaatcttaacagtgaccttttgggaagatgtttcatccttaatttctaatccacataattgcctgtatataagggtgggcatttcaaaccaggtaaagttgattagcaagccagagtaggaagagtggagtcagaaagcccagcttaaatgtgccttctgacaccttaccttctttatctccacatagggccacgcacaaccgttccttctcaaaggccagcgatgggaacatcagtgtggtggttttgcattaggtcaacttcactaagctggaacctatttcccagaattgccttccttatgtggttctgcgttaaggttgtccacaacaggtatttgtggagcctctggaaggtggacatgaagcagcagcatgcgctcattgtcaccgaattgctggctcaccctgatggtggagcccacagctcctccagctcctgctagatctcctccttcagctactctgaggcctgggcaaagtacgtgtccagctctgtagtcaagattccagctttatgtttcatggtcgagatcggaagtggtgaaaggcaaacaagggttttatttgtccttgtgggctccactttggcctcactctctcccacatcatgtcctgctttcctccggccttttggcattacggcaacttcacacccatcctcagatgcagaggcagcagccttctagagattcttcaccagcttccacaactggataaggtctaatctctgcaatcaatcccttcctccacatcactcacggtggtaccacttccctgaccaaagctggctgatgcaacagtgtagtgctcccacctgtgaccaggttacttgtttagatatttttatgggtaaatagtgcctggcacatagttgccctcaatatatatgtttgttgaattcatactaattatcatcatttaatatgcctggtgagtatcaggtgctatgataggcactttaaatacagcgaagagcctggtctttggagacaggccagacacagagccaggttctgcctgctatgagctatgggcatgtggacacctggctttacctcttaacacccagtttttacaatatgaagctaataatggtacctacctccatagggtggttgtgagaatgaaatgaaatagtccaagtaaagtgtgtggggtgcacagtgtgctcatttaatgttagctgttatcatccttcacccctgtgaaaaagatttgttgagtatctactatgtgccctgaattcaccacagccctgccaaagagacttaccaccattgtacaggtgcaaaacagtagctaagaggttaactttcttgcggaagattgctttgtcagcaaattatagaatcaggatttgaacccaagtctacacaaacccagaggccgtgcactggccgctactgtgggcaacatttcaggcactagaactagaatggaggagagaagaaggctttgggggaaatcccccaacccacggttcagagagcaaagctgaagagggtgcagaatggcctttctccttcttttggaagacccataataacgctgaggccttcacaacttatgttagtatttaaaaacctctgctggcagagttctcccttccatcacatctccatctttcctcctgtctgtttatctagaagccataggatggaccagatcccacctaacccactgggctgttatacactacacttagggaaaactctcctggcagctcagccccagcgtccgtcccaaggggaagccagagtactcggagtgtgaggagaattcaagcttattctacagcagcctaagttgttaggataacaaggtgtggtaacatgactaacatgactagccttgtgattttcagcaatgcttagcccccaaagacagaacgcagcgaggttatttatggcctgatcctggggactggctctcccggtgggagaattcatctaccatgtgtgaattcaaatgatggccctctacctcagcaagccagtggtgcatgctaattatgtaactatcttggacttctgtttgctcatctgcaaaatgggaatgtgtggcctcatctcctgaggctctttggaaagagaagttgataccaagggaagcgctcagtcaccaaagctgtaccttc

SEQ ID NO: 1884766 - DNA, 4001 bp, Homo sapiens
ctacaggcatgcaccaccatgctctgctaatttttttttttgtagagatggggttcactatgtttcccaggctggtgtcaaactcctgggctcaagcaattctcctgcctcggcctccctaaatgctggcattacaagagtgagccaccatgcctggccttgacacaatttaaactgtttaatcttcatactaattccctaccatagacactattttcatccccattttatagattagggtatcgaggaactaaaatgttaaacaacttatacccagctagtaagtggcaacaccaggacttgaactcaggcagtctgagctggaatggaaagagcgaacagcctttggaggtactcagaatacctaactccttaagctacactgcctcatgggggagattctctctgagtacttttcccaaggctcagggtagcctccacttctcaaaagggaaaatacccgctctggggctgcaccttggacttaaacctacagaaatgttttccatttagaatgaaactgggaagtagaaacacaggagtcgaagaacaactgaatttcacccaaattggccctggaagccatgaactggatcccacaccccacccctcacaggcccttccaacccggcctgagtagtggcaggtggctacccaatactggctggaggtgacagagcctatcgggcccaggaccctgtgggactcagaagaggaagagacagctggatgcgaaagaaaagtgtctgccattaccccaaacagatccacgttgtcctagagagcaagcaacaggccaccagccctcggcaaagggagtgtctagacacccttcatctcccctttcatgcttacttcacccacaccccccaccaccatccagcccctccagcctggccagagaggggaatggctgtctgtgccagcacttgctaatgatttcatgtgctctccccgcaggtggagtaagacttcacccaaaagaagaattggaatagtggcaatacagacattgtggcatcaggatggaggtgacatttgaggaccacgagccctacttaagacatcccatggccaagcttaaaccagaaagggagtccaatgaccttccactcctgcttcctccatcctggcctcctgagttcctgtctggctgggtggcatggccgtgggctctctataccgtagagggttccatcaccacgtctggagtgctgtggcccccactcaaagagactactcgtgttctctcactggagaactcaggccactcagcaagacggttgccttgaccaattcaaaagcctcaaaacattgacatgaggggtcactgagtacggcattctggaaagtgtaaggcactccaggtgtggagggttgaagtgattcaagacaactgctcataaaagaatcaggccctgccctcaaaaagctgacatttcacagagaaggagggtgtatgggagacatttcagaatttcattacagctggctcaaggtagtttgcaaggtaaacacactagtcttgacgatggaatactttaagagtcagtaatagctttcgaagctcgccttctcaggacgagccttctagagttggctaaacaagacaaatattacaaatgagctccagctccctgctggctcccctagaccccttccaccctctgttccctgaccccgtgccctggaagcttggtgcatggggactgcttgaggtgcccggctccctggccctccagcttcaggttggtttggccaatgagcagtgtcaataagagagtggagatgggaggacagagaaggcagggtgttttctttccatgtccccctaccttggtgtcttggtcctggcagtgacaacatccttccatgactatggtttctccctcatggtcctcctcccagctacagctcccaccaggccccccaaacagtattttctccccttcctcctcaggccctagggtgatgacagcttccctctaagtttagccctgggtgcctcaatatcccttgctggtctccttacccctccataaatatgcccctcaagaaactctgttccgttgaaccatctgtgtagaattctgtttcctattatgatgccaactgaacactcggtacccattctttgtccgtagtcaaggacagcttatacagaaaacacaaagcttccatggttagaagctggttcctggcttccatgagtggctgtacccaaacctgtcctaagtagataatcaccattctcgtttttcaaattctccacaaagactgtacgactgtacatctatgttatctagagggctgtgtatgattttgaatccagaacccaggggctcagaattcctccaccctaaaccttccttcatcaggaacttcactgtcactcccatcagtagagaagagacagtctcaaagttcattgagcccatccccttaagcacatacacagatagcagaatttaggcaggtttaacctaggtgatttctttcagccggtctataaatcaagaactaattcccatgactccctcctggctctagaatgagcattccctcccggactccttggaatgtcttttgcatattgaagtcattttcctcattgctcacccttccctgagtagacgcggaggcattttgtaactgtcagtgttttgacaaagcatgagtatttaatcatgtgcccgctactccctgtaacccacacggcacacaggcttgctggtacctgctgccagggcaggacagtgggcagagagccggcaagcacccaagacatccgaccctgggcagggggtggggacaaagccaaggaggtaagactctccctttcacaagatgctcagagtctgcccaaggccgagtctgtcttccattccacttcaggaagggaatgctcagcccggaatgaacagcaccaagattaactgggacagaaaggaccatctcgttctatcccttgcctcttccggaactaaatcatctttggcagatggtgtttctagccacagtctcccggggaacctcccccagcgcctagcaaccttcagcattggggagcccttcccgtggtttggtctaaatgcccacgatgctcccaggctcaggggtccacactcctctgtccattagggtccctcagaggaaccctccccccaggacaccacaggtccaactgttccctcgctgggagcccttggccatcccaccatggggcgaatgtgacctcccactccagccaacactccccacacccccagcctgcccaggagcatttgcttttcaaaacttccctttcttaaaaaagacacaattttccaaagcccagggagttaatccatgaaatcttctggaacaagagcagctggcccaggccttggataagtcgatcaacaaacatgccagagccccgtgtggttcaaaacattctttgttccagccaccgagcctggatctcgctggatcctgccggtgagttggcttctcaaagtcacacccctctggctgtcgaccccacccctgccatacccttgaaagctaaaccctcttcagagggaccacatcatcactttcccctcagtctttccctctttcagaaaccacctgaagtgaaaatgtttggagccagtcaaggtttgctgacaatggaaacaaaccagtccctggcacaaggcacaggctgctcagtgtaagtggaggccccatatggttgttattctgggagagaatcaaagaacctaaaaacctgcttcttagatgacaacagggggaaaaacacacaaaaaaacctgttttttaaatacccattcttcattttatgtgcaatcgatcctgaacagtgtcagatgtttggcgggtgctccgagaccaaaagaacagtggaaaaaaggactggcgaggccagcatgatttcccaagtatcaccagggggaatacccctcccagatgtgccacagggaaggaattccagcaggctccttcctcgctgccct

SEQ ID NO: 1884767 - DNA, 4001 bp, Homo sapiens; identical to SEQ ID NO: 915996

SEQ ID NO: 1884768 - DNA, 4001 bp, Homo sapiens; identical to SEQ ID NO: 916001

SEQ ID NO: 1884769 - DNA, 4001 bp, Homo sapiens
tttcaagagataggagcagaacattgcctctcaaattgtaaagaaggtgacttctgaagctcatcattttaattttccctcccctttgtccctcatcaacttctattcctgcatcctccctaacccctccatgcgtgcatcacacacacacatacacacacacatacactcacactcacacgctgggcacagcaggcatgcaagcacagttgggaattctgtgagtccttctagactaaggaaactcaaactaaaaagtaaaatctattaataacaactccctcctccccatttactacggaatttgctcttgcggattctctagagcgccctcatgtgacgccctgttgtaatagcattcaagactttggaaggatataaggatctgttgaaacactgtatcaccacaattcaaagtatcacttttccggatgaataacgcctagtatttgatagcacaaaacgaggactgtagtcaataataatttaattgtacatttttttaaatgcccaaattatttaaatttcagaaagagatgggcccttcagggagaggaaggctcggctgtcttaatctctgggagccctgtagaagaatgagaagacaaacagctgacttttttctaatttttaacagctacttgtggaccaaggtgacacttaggaatcccaagaagctccagccataaagggagtcggtatccttcctccaattgtaaaccccagcactcccactgaacacactggccatgccaaaagttcacacatcggccacgcaaagagctcaaagagatccattcagtacctgggaaggcacgatcactacggggagaatcagaaaccacgcgatcgccaggtggccttcaaagaagcctcctcccagaaggtccagaatcccatccagagacatttctgtcactcttctcaagccacctcatcatctctctctgcagttgaactgctgatgtttctgagattgtgggtttgttcaaaatgaagcttggcagaatcataatttataggctaatattttgtaagtagagacaattcatgacttagaatcttatgaataaattgctcctgttttattgctctgtgtgtgtgtgtgtgtgggtgtgggtgtgggtgtgggtgtgtgtgcatataacttttctttttccacgtttacctcttgagtgggcccattaaactgagaagtactgcgtgaggtcttgagatagcacaagccttcgccacccctgtaaaggtgtgacgtgtgtctaggcaaaaccctggcaggtctccaggcggtccttctgagttagggctctgaacactctctcttaaagccctgagctatgaacacagctttgaacgggacagagaaagaccaagtcagagggggagcagctgtgtctttctcctctctgcttcattatagacaaaattgacctctgggccaagtctcattaactaattgaagagttcatagtcacacagtgtttctcaaaacgagattcagagaacacgagcatcagaaacacctgaagtgtttgttggaattgcagctacctgggccccatttggtgcctgttgaatcagaatctgtggtataagaacctaagatctgcatttccaatacacttataagttgagtgtcaagcacagtaaagtttgggcagcccgtcccttaatcttttcacatcccgtcagattacagatttatattttaacaaaagcctttatttccataagccaacaggggaacttcagatactgctgtggggcagcaggggagatgttgttaagcaaagggagaagggcttccagcgcctcttgattttttctgcagaggtagctgcacatgcagctggtcagagtttaccttctatgtcctacccctgtgaatgcaccccagagctggagcacgcattgaggtcaggggggcgcctacctggaaggacctacctggaaactggatatccagtgaggagaggagaaggggctgtcagaaaatcagctcacctctagacggcggcaactcagataagaggagcttgtacttccggtctctcctccctcatccctttctggttgggaaattttgttcaagctaccgctgtatgcttctgttttctctgaagaaaatggagactaatatttatgcctgcctcaataaatacatttttattataattaattttgaaaggtcctgagattggtaggaagatcacgtcctcagaggcaggtgttgtgaacagtggatatgaagttgcatggaaaatcttccacatgctcagtccatccccaagggaaaaggaatgtctggtgggaagtgaagagctctgagcccctgccttctctgctgcagcacccaccatcttcctcttctattccagccatgcgaggcttttttctattccttgaacccaacaaacattgctcgtcttcagccaggattgggaagcactgctcaatccactgctgtatataaatctagctcacgggttgggacttttcaggcagggaaaggctcattaggaaactgaggctgattttggatgtttccaggtcaggaaggttgtatgtgtaggttttcttctgcattgggcacagaacattggatggtcattctcattcccatctttggcaagggctgggatgaagtatgtgctggtggttcctgagctgcctagcagagacgtgggcttggggaggaggacattttctttccagcaggtgctcgagaggactcaaagaggtgatgaatggagcaaacagagcctggactccatccaggtagacagggcttatacccaaatctgtcacttactagttgtatgatcttggttaagccttagtttcctcctctataaaatgactctaaatagtaacacctacctcagagttgttatgaagattaacagacataaggtgtgtaaaccaattacactgtgtctagtacacatgactgccctgttcatactaactatggtgatttgatgtttgggagccacgctttttagtctttaaggtctgtgtaatctcgctgtcttgttttattttatatttccccatttattctctattctcgctcctgtttcctcccatttccctctcctgtcttccttcctgggatttcttatatgtccttagattatctccaaaaaacacagaacttggttttgtgtgtatattaaagtttaatatccttaagtagtaacgtgctataaatcgtttaccaccttttgcactcaacactaagatttttagaggtatccatattatggtttgccagtggttctcaacttcactatgaaacagaatcacttgggagcttttgaaaaatttcaatacctggacctccattccagttattctgatttaatttgtctagggtgcgggccaagcctcaggtcattctaaagtgcagccaggattgagaagcactgctcaatccactgctgtatataaatctagctcacaggttgggacttctcaggcagggaaaagcccggggttcacctttttctgcctcaccaagtctctgcagtaaaatcaggtgatgacgaccctaaggacagcgttaaaaggaaaaagaagagaggagaaggcaacttgcagcctaaggcatatgtaagaaagagcagaaatcagaactcctactctgccctatttgtcagagtcatgttattgattcatctgttcgtccatttaatcacccaggatttactgagctcctcagacattctgctaggtgcagggaatacagcagtgaacagggtagacagtctcaacactcagtggctttcatacctgttaaaataaagcttctcaggcctcatgtcgagagcttctgacccagtaggtacagggcttggctcaggagtctacatcttgaaaaagtgcagcaggtgataccaatgcctatgatcctgggaatcttttgtagaaaattggtctagccaatttatgagtcaggttgtttttaagcatgcttgataaatttagcccatttctcc

SEQ ID NO: 1884770 - DNA, 4001 bp, Homo sapiens
cttgtatatccagcttcaagattaggatccaggctgaatgtggtggctggcacctgtaatcccagcattttgggaggccgaggcgggcagatcacctgaggtcaggagtttgagaccagccgggccaatacggtgaaaccccctctctgctaaaaatacaaaaattagccagcatggtggtgcatgcctgtagtcccagcgaattgggaggctgaggtaggagaatcactcgaacctaggtggtggaggttgcagtgagccaagatcacgtcactgcactcctacctgggcaacagagtgagattccatctccaaaaaaaaaaaaaaaaaagactaggatcctaaatagtcaatagacaaggagtttcaaggttaaaattctttccactctctttcacccatacataaatagtctgtgttcttatttgccaatgctaaacagaggccttcctatgtgattatttatgttgtcaagtatatcacataaaatataagacataaattactctatgtgtggcttcttatcagctttgagtatacacattttcagcctcaatgtgaaatcagagtttgcttctaaatggtatctggacatacagaatttgtaaagaaatctatcctctttgtttaagagaagatatcaatgtaattttgcctcgtgcagattccgtccttattttttttttttactttaactactttaaaaaccttttttttttcccagtacaaaaggtgaatccatttcacgaggaggagctcagtcaaattttatatgaggggagaccaagtttgatcttgccgagagatcctcgttctgtaaaccccgtaagtaggagtgtgaagggagaaagccagaaacgggttttaatatggatgtgcaaaaaagttcaaggaaagacgaagaggaaaagaaagcaagccttccatgtttatctgctccatctatttcctgcctgtaatttatgccataggttaattcccgggaagtaggaaaaagactcaccttgtactacagttaaatcttgtggagaataagtaaaattccaaacatatcccaaagtaatgtaagagcagaggcctcttattttgcagaggaaagaggcctcctaaaaatgctgcacacagatgtttaagcatcagagagacatggactagtagatccttggagcgaaaaggtgcagagagagaaatcgcccagtccagaggaagaacatgaaccccggagtggagaggagtccctcccaaatttacagggcaagtcagcggcagagctggtctagaaactgcacccctgacttctagcccctgcctgattctgtgcgcccatgtaagctctaaaggacgccattcactatgtggtcccagtcaaatcttctatgtgctatgtacgatggttgacccaaaaagaattgtctcatcattgcccttcccctcccctctgcaaaacaaaacaaaacaaaaaaaaaccttgtggctttgtccttactaggcaacaatttcatcacactttgtcatttagtaagtataaaacagccagccaacttctaaggacagaaatacacatccccggtctaattcttgcctctagcctttcaaagctcaaggcctggctttggggcaagagggtccacgtgtatatgtgtgtgtgcacgtgtgtgcatgtgtgtgggtgtgtgtggcaggggatagaaagcccatcacatgtacctggaacacagctttgatccacatctttctcagcccagtaaaaaacttgtagccactaaagcatctgagcactgaagcatcttaaccactaaagcatgtggggcattgtcatctgaccccactgccataggcccctttttacagatggctgaatactttctcaatgaggccattgcacttgccctgagggggaggacctctcatcactcacctgctgccattcttttccagggcccagaacaatcccaggggccttaactacagactctaattgggcgcatcagcatcacgagtaggactcaagtaagaaaggggcatatttatgtttcttatcgtgcgtctacagggaggggctgaaaaggactcaaaagcctatgaaaacttgtattgcagatggggaggagggatgagggtagaaacaaaaaataatatacagcactttatccaaccattttataacaagttgaaatcaggctccttccagattgaaatggatcctccagtcccataattaaattgggaaaatgaagccatttcatgcctttggctccctttgatcattgttatttctgtgactaatgtgtaactggagctgctttttctggggcatgagcctcgcctgggcagctgctaggagagtgtggcctggtctcctgttgtcagcgcaagctgacggcaaggccagggctcagcaaggtcaggttagtctcagccaaagtggactggaagagatgcacctgcgctgacaagcagctatctgttcccatttgcctctgactgcatttctccagggcctcccttgtcctggagaactcttgggtgggaactggtgttttttcccttgaaaggaagagatagaggacatttcaagagataggagcagaacattgcctctcaaattgtaaagaaggtgacttctgaagctcatcattttaattttccctcccctttgtccctcatcaacttctattcctgcatcctccctaacccctccatgcgtgcatcacacacacacatacacacacacatacactcacactcacacgctgggcacagcaggcatgcaagcacagttgggaattctgtgagtccttctagactaaggaaactcaaactaaaaagtaaaatctattaataacaactccctcctccccatttactacggaatttgctcttgcggattctctagagcgccctcatgtgacgccctgttgtaatagcattcaagactttggaaggatataaggatctgttgaaacactgtatcaccacaattcaaagtatcacttttccggatgaataacgcctagtatttgatagcacaaaacgaggactgtagtcaataataatttaattgtacatttttttaaatgcccaaattatttaaatttcagaaagagatgggcccttcagggagaggaaggctcggctgtcttaatctctgggagccctgtagaagaatgagaagacaaacagctgacttttttctaatttttaacagctacttgtggaccaaggtgacacttaggaatcccaagaagctccagccataaagggagtcggtatccttcctccaattgtaaaccccagcactcccactgaacacactggccatgccaaaagttcacacatcggccacgcaaagagctcaaagagatccattcagtacctgggaaggcacgatcactacggggagaatcagaaaccacgcgatcgccaggtggccttcaaagaagcctcctcccagaaggtccagaatcccatccagagacatttctgtcactcttctcaagccacctcatcatctctctctgcagttgaactgctgatgtttctgagattgtgggtttgttcaaaatgaagcttggcagaatcataatttataggctaatattttgtaagtagagacaattcatgacttagaatcttatgaataaattgctcctgttttattgctctgtgtgtgtgtgtgtgtgggtgtgggtgtgggtgtgggtgtgtgtgcatataacttttctttttccacgtttacctcttgagtgggcccattaaactgagaagtactgcgtgaggtcttgagatagcacaagccttcgccacccctgtaaaggtgtgacgtgtgtctaggcaaaaccctggcaggtctccaggcggtccttctgagttagggctctgaacactctctcttaaagccctgagctatgaacacagctttgaacgggacagagaaagaccaagtcagagggggagcagctgtgtctttctcctctctgcttcattatagacaaaattga

SEQ ID NO: 1884771 - DNA, 4001 bp, Homo sapiens
aaaatagagcctccatgaaaatgtttccctaattaaaccgtgacttctaaaatgtgttaaataagaaaaaatacaattcctatataaattatcctatagtacttttaaataataaaacaacacttaaaggatttcaaatgaagaaaatacatactttactgttttaatacattgttcttctggctgaggctggtcaaagctacactgatcttcaaataaaggctcgtcaatgctacactgttcttcaagcaacggctggtgaacttgttctgacaaaggatggtcgacttttcttgcttgcttcctatgtctttcctcttcagctaaatagagatgtttcagattatctgggtatcgatctgtgaattgagattccagtgacgtttgagccttcttttccttccgtagcaatttcttgtaactttgctgtattttcagttttcttcgaaaagcaaagccttgtcctacattgaggaatatcatccaaaattactttcagagaaaagaagttgaacgaagaatggagctgttaattacaaatgaaaactttttttacgtcatcacattcagattctagtattatattttgctttaaaaaattatttcaagcaacaaatttaagctgatggattgcatagtaagttggccctttgcaaaaagaccaggctaacagtcatgcggaaatccaagtaagaatctcaaagaaaaactgaccagttcagactgttgcacaacttgagtttacagctgtattcacaaatcaaaacaaattccttagttcatctaaaacacttaatctgagccttcaataaatgcttaaaaaataggaaagaaaatgccacatctagtatcttggacaaactacatgttttcgaaaatgtttcaacacgaaagaaaaagacagtgtatggttgtctgaaaagctagcaattatcggaagactgaatttaacatttatatattccaagtgggatctaagagaccttacagacagcaatacaaaatgacaaacacaaattaaagcgaaggctggagggcctcgggtatttgtaataaggaagaattcggagcagtgtttctggccctgtcctcctctctatcctttaccttaccacatgcgcaagagttcacagggtcatagactctctctgctcagtttctcaggaaaaatataggaaaaaagttctgatgaaatacagggttacgtcagaaaagacgtttaaataatagcaacactgctccgtcttcctatctagagctctgcgaagctcacagctttagcgggctcaggaatgaattcccttgccccaagtaggaccgggtctggttcctaaatccttcttccaagcttcagcgaatcttatatcctaaaacttagcaagcctgaggatttgcaaatggttgccttcttacataccctcgcgaacgctccccacgaaggcttgcgggtggttaggccgccatgtcttctgtctcacattcttattcctgtacccgacagtggaaaccccttcaccacgcgcctcaataccaccaggccgccacttcgcggaccgcctcaccggcgccattgcagccgactaactgcgtcatcagaagaccacgacggacgcccacaaaatacgtcaccaagccgaagcaatcaatcgctcagaaggaatccggctcggagctctactgagcctgcctgtgctaatttgggccgagctggcgcctcacggccatgtttgcgccacctacagcctcggagggtgagcgtcatggcggcttcttgccctctcccggtgaccccggacctgcccacgctgcgtgccaagttgcagggactgctgcagttcctgagggatgccctgtccatttccaatgcacataccgtggatttctacacagaatccgtgtgggaggagctggtcgacttgccaccggagacagtgctggctgcgctgaggaagtcagcgtcggagacggaggccctgccctcagagacgcgccccctagtggaagcagagtgggaagcaggtgggtggtggggtaggcggggcgggaagggaggcggaggagaaggtcccggcagacgaagcgagccccctggtggaagccagcagaaccaggtgcgtggcggcggaggcggggcggcccgctgggaaaccgaggaggggtcggattagttgaggggtggggtggggatgttctttggaatcaggatcactctttctttgggtgcttgtgtatgtccacaatttaaagaaagcaggaaacagggcaggggagttccttcatctagtaattccataataattgacgctagggaaactaggggagcagtgctctcacaggttttataaatgccagcatgtggtggaagattactcaacagttaataaagataatttcaagtggtggtaatgaagtagaaaataaaaacagtgtaatgtggtagggattgtgtaaggaggctgcctcaatttaggaggtcaggaacatgagaaggcactagctgcagagccacagggaggggttgcaggcggtgggaaccgcaggctaggcttggctctagccaggtgaggggctgcaggtgcaggacgggaggcaagcagaggccagatggcacaggcctttctaggccttggaaggattttggattttaagtgtgacggaaacccttgggattatttaggcaacatagtgacctaattcacatttgaaaagataactgtgaattatttgaagaatagactagggcaaaagctgaagctgagaggccagttaggagactacctcagtagtacaacagatgattgtatcttggactaggatggtattcggatagtcactatttcatttaaaaactattttaaagtacctaatatgtgtcttgaatttttgtaggctcaagcttttcctaccctcaagaaatgtagattcttctcaggcaagcatattttggaagtagaatgatggacaccaacaggcttctgggatttttactttccttctagacttcccaaagttacccttactagtgaactttattcattgagcattctctgaatgcaaagcatcactagagggacctcttataatagcacttggtaaatactgttgttgtttttttaagtaattgttattgaaaagttaggcacttcttcagtttgctctcataataaatatatggcacttatgatatgacaattttacttaaactccaaaagagcagagtctttgtctgacttgtcaactgatgtattcccagcacttggtaaaatacttggcatacattagatactggatgaatatttgttgaatggaggaattaatgagttactcatgttagttttaaataaataaaatgaaactactctcaagtttagagtgtaagactttaatacgtgtttagcctggtctccagacaatggtagagtcagattgtcttacatattctaataataattggattatttgatatttactatataccctgtagtgtgctaagtgtcttcatgtgtattttctcttttaatctttacatcagccttgcaagataggttctgttattgtcgatttgtggaattataacttgaggagttaatttgcaagggatatagctgataatggaagattctcaaacctgggtcatctgatttgaaacttttttagtgctgtaagaaaaaaagtatactagataagggaggagtaagtaaggggaagaagaggaaaatgtttgcatttttaagtaagttgtcctggcaagacctcactgaggtgactctaacgctgaaaagataagaaaaaaaccgagccatgaagatctctggagggaaagcagtccatttagtgacaacaggaaacagaaatgccctgacgagggagcctacaaggtatgtttaaggagctgtaaggagactgaaatagatttccactagggactcacaaggagtatggtcttgtgtccggaattgttaggttcttggtctcactgacttcaagaatgaagccacaga

SEQ ID NO: 1884772 - DNA, 4001 bp, Homo sapiens; identical to SEQ ID NO: 916015

SEQ ID NO: 1884773 - DNA, 4001 bp, Homo sapiens
aaggacatccaaccctacatgcgcagaatggtggccacctggatgctggaggtaggtcggggggtggcgctcgccaggagccaggacccctccggatgctcgggtccccggccggagccctaaacctgggagagggcaatccccgcgccggcctcccggctcctgtgcgggagtttaccgcgcgccttctggcgagacgcgtggctttatttctgttcctctccagataaactggggaggcagaggggggaggaaaatctgggagaagcgaggctgtcctgggcgggggtaggggagcatcccgcgcgcgtgttcctgcatgtggctgcctcttcttcccacccccctcgcgacctgtcttttgcgaagccgccgcggctgcttgcgctgcggccaggaagagagtcggggcctgaaatcgggaccccgagtagaaaggcaaccccccccaaaaggccagagcaaattcgtcttggcctcaggtccccgcctgtggtcgcgactccgcgctggcacttcaccggggaggtggagggaggagggagaaggagagaaacggggaattcgggagccccggaagtcccattgaagaaacgcgtgtttcaggggaacccaaaagaaccgcttcttgcccctcactccaagtctttgcccagcgagccgtgtgcccacgtatgcacagctctggacctgccgtggtttcgccatgttgctttgcaaactccctttggaaaggctgggaaacgtcgcccgcttaccctcgcaccccattatcccggccaccccacttctaatcgtgccctctcccccaccccccacctcacgaagattacttacagtttggttttccagcttcctcggtgcggagatttgggtggggtaggaagggggggagggggtgtgtgtaggggggataccgggtcacccctgaaggagaggtgggagccccccgtgcctctttccagggctctctgctcccgtctttcccctcgctcgtcaccgcgttccctagtttctgtccttgtgggccgcagccggacactcccgccgcggcgctcaccccttcaagtttcctcccgggatccaaagccccaggggtcggaatacagacctttctggcacccgaaacctctgtttcgggaagcctggctcttctttggggttttcacgccaaaagggcttttctaggatatttcctcgatttttaattattttttgaaaccatccccccctgctccgactccagctgccgaggctgcggcgctcttcctcctctcctccctccccctctcttccccacctctcctcacccgcccccccaaaagcggcccctgggccgcagggacccccccagacattttttccaattgtcgggaatgatagaggaggatctggggatccggatgagaccaagaagtggacccccggagcctccagaatatttttattgattttttgaaaagatgacgaaatccaaaaaagagtgagtgagttagagtgcgcgaaggagtagccaaagggagcgtcgcggagctgccgcggctgctgcgcacttctccgactccccgttttggagctgtagttcacccccttttataggatccctgggaataccaaagcactgatgggctattctgattcactccagtttcctcatctttgttctttattcttatcacgcattctggtcccctccccctcccacaaaaaaaaattaattttttttgtttcgatagattacgcttttttattctttttctcttttgctgatgctatgctctccacccccgccccccaaccctttcccactcccattataggtctgtgaggaacagaagtgcgaagaagaggtcttccctctggccatgaattacctggaccgtttcttggctggggtcccgactccgaagtcccatctgcaactcctgggtgctgtctgcatgttcctggcctccaaactcaaagagaccagcccgctgaccgcggagaagctgtgcatttacaccgacaactccatcaagcctcaggagctgctggtaatgaccggccccttcctcccttcctttctgcgattcccgctttcccctggccaacaatatgccttctatcaccactgccagagcaaattcttgggatccagaatgaccccaccaatagaatttacccacttatgggcgatagctcatttaataggaaaccactgtttattttttgtgtgttcctactatgtgcccaggctccgtgcccagcactgaggctacatctgtgaataagatcctcatggagatttgggttggtgagactcatttgcaattgtgtatgcatgtgtgtaggggacgcatggaatattttaattaacagtgataatattttaattaaattccaaatttccaaaaatagtctgagaacgtgttcacatgataggtatgtggctgtggtgtctcctaaaaacttggagttcaaaggtaatgccctctatatctacaaagtctcaagataccaacacataatagctgttcactaaatatcagttcattgacttttgagcaaagtcaaaatgtggcctttcactgaaggagtccgaggcctgggttcctacctccagtgggactgtgacctctgtacaaccccagggatcctgtcttatctctgcttttctaccagggaacctttttcccacctgatctaactccttttccctgcagcttgacatataagacgaccatattgcagctgtaccgcatggaatagcggctccaaggcccaccttcggtggtttgcacacccctctttgcactgttcagaaaagcaccccctccttcccgcccctccccctcctcactggtagggcccgcacaaagtccacagggctgaggctggcttcttgaactgagctctttgtgaggagccttcctttctggggctctgctgccatctagtggaagacatgcacaaggttgggggaggaattgccgagaatgtggagaggggcctgaatgacttcacctttgaaccgctgccaggttttagctgcttctggtttggtccgagaggcctagaaaggtgctttcttctgggagatctgcttcctttaataacggtgcaagaccagtggttcgtactcgcattaccctgtgaagaggaagggctggcatttcaagccatctttgaagatgatggtggtttagtagtttattggggtgctttaccccggctgtacacagaaagccaaggcagattttaaagcttatgaagaaaacattgttagaattgggaaccaatttgtttttctcatgagagagcaggaaaaatcatcttcatatggttcatttgtttcgagaggatggtgaattgagatgttcttcaggacacccaaatctttccaggactagccaagcaatatattgctacaaacaaacttggctttttcctattccctttatcccagaagttgggatttggaagagtcctattttacaaatgagaaggctgaggcctgggagggaaagggaatcacccccagccccacagctgtgggactggtgctctggttgctggtttagcaaatgaaagagattccaggttctccaggtgaatgggagagagggtgcattggcaaacaggccctgcctctcattcttctgatgacagctcagtggataggcatattttctggtagcacatacgatatttttaatgttttattttggaccgtttccctttgagcacagtttcccgtaagtatctcagtgaaagagggaaacaaggttctttttcaggtgggttgctggtgagagacccaagagacagggttgtgtggtccccacacttgcactgagggatgctgtgacactgagcaggcaccctcaccttgccccagatcacctccatctgcaaaatgaggttgctaatgaccatgtggtcctttagtcatgatgacaatggcctgtgaaacatttaggggaaagggctgagtgtcacatccccagaatttctgcctg

SEQ ID NO: 1884774 - DNA, 4001 bp, Homo sapiens
cctctctgtacgtatattatactttaattaaaagttattaaagtattggggccgagcacagtggctcacgcctgtaatcccaacactttgggaggctgaggctggtgcatcacctgaggtcaggagtttaataccagcctggccaatacagtaaaaccccgtctctactaaaaatacaaaaaattagccgggtgtggtggcacacacctgtaatcccagctacttgggaggctgaggcaggagaattgcttgaacccgggaggcagaggttgcaacgagccaaggtcacgccattgcactccagcctcggcaacaagagcgagactccatctcaaaaaaataaataaaaaataaaaaatgtatcagggagtacaagagaaagtcatataagctctttctacttttcatggtttctatgtctgaacccatgaatcttccttctgaaaggtccaactttcttctttaataacaataataatggcaaaggcattgggggaccgtgagcaaagggcaggcctttgcaggggtgggaatggaaagggaagcacgtccctagaggtgggcctgggatgggggttgggggatgaagcaagtggaccttgaaggtctccacaggtctgagtgtcctatgctccctgggcctctcttcccccaggtcttctcgttcgcaactgcaccatcactgccaatgctgagtgtgcctgtcgcaatggctggcagtgcagggacaaggagtgcaccgagtgtgatcctcttccaaacccttcgctgaccgctcggtcgtctcaggccctgagcccacaccctcagcccacccacttaccttatgtcagtggtaagttccaggcaactctctgtgccatcacgtggggtagcggtgataccccaaccagtactccccactcctacccctagataaggtcagcctgtttctgccttcccatcccatccagcacctctcaggccttcagatgtgccctatggggtcccctgctgctactcattctgtctctgtttttccagagatgctggaggccaggacagctgggcacatgcagactctggctgacttcaggcagctgcctgcccggactctctctacccactggccacgtgagttttctccttaatccccaccgctagagagaatgcatacacgaggggccaggagggaagccagacagaaagctcctaggattagggataagaggaggggaaaaagcagagtccactgtttaggagaggagttggccaacggtggcgggtgggatagaataaggtgggggaaaggggagaggcaaggtgacaggagggctgggctgagggagccaagggctagaccctcccctaacccctgtgtgtcccctcctattacagcccaaagatccctgtgcagctccgattttattcgcatccttgtgatcttctctggaatgttccttgttttcaccctggccggggccctgttcctccatcaacgaaggaaatatagatcaagtaagagacagaacacaggcctccggtcctgcccctgcaccacaccccactggctcaaccccactgcccacgcctggaatctcactgaaacccaccagctccacttcaccagccttggtcctaccccttctctccccttagctggcgtgctcctgacacccctcccccaagcgcacccgcctctacccatctccttctcccgtctccccctgcccccactgctggccaagactcatcggatctccttctgcagacaaaggagaaagtcctgtggagcctgcagagccttgtcattacagctgccccagggaggaggagggcagcaccatccccatccaggaggattaccgaaaaccggagcctgcctgctccccctgagccagcacctgcgggagctgcactacagccctggcctccacccccaccccgccgaccatccaagggagagtgagacctggcagccacaactgcagtcccatcctcttgtcagggccctttcctgtgtacacgtgacagagtgccttttcgagactggcagggacgaggacaaatatggatgaggtggagagtgggaagcaggagcccagccagctgcgcctgcgctgcaggagggcgggggctctggttgtaaaacacacttcctgctgcgaaagacccacatgctacaagacgggcaaaataaagtgacagatgaccaccctgcagctctccagcttcctctctgaaatcccagtcccaaaatccagtttcctggccgcctcctggctcaggtcaggatctggcagaggaggtttctcagccggttatgttggggcctgcttaagggcgggggtgagaaaggtccccaggctactgtggatcctgtgtctgacttcagatccccttttcccacagttatagctccacttttttgggacaggtggggagcaaaagggtgcagaggtcaggtcttgaaatcaccaggggatttccgggtgaggtgggtggtgagaaaggaaacagcaagcagggctctggcagctgctgcagacggcttcacacagggacgcgggctgccatcttgctctaagtgaaagtgaaagaaaagtcggcagcagagggaacagggaagaaacctaaaggctgcaggctgccaggtgtgcttggagagcccccttcttccgccgggcctcgcaagcagcgtaggactgtggagaagggcggtgggcaaggagggaactcgagagcagcctccatgggcacacaggagggctggtgcctgctgctctgcctggctctatctggagcagcagaaaccagtgagtctgggagtcggggagagctggctgggagaagagctactgaagccccagggtgccaccctccccgagattccagaagagcaaaggggccggggatgaccccatcgccttctaagcccaacaggggaaaggctcagcggctggcaaaggaaggaaccaatagtgtgtgtggagggagggtggggactccacagggaaaatgctaaagaggggctgcctctgtggctgtggtcaggagccactgtcctacagagagggcactggcctgggagctgacacttcagaagaggaaaggactccccaggtgaggaaatcacttggaaggtgaccttgaaggcgggggaggggaaggctacccgaaatgggagaaagcagtgcaggctgtcagtgccccagcaacagtaactgtccagtctcctctctctgcggtggcacttgcttgttttctgagaattcctttgactgaaaagatagtcttttattcaacagttggaaatgcaagcataaactcctctgagcaaggcaaatccaggactttaactctcaccaagaagtatttgcctggactagcaggtgctctccagaaagctggtttggggatgacgggagaatagagggacacagaaacagctaggatcttggatggcaacttttaccctttgatgactccacagcttgagggcgggggcaggaagcaagtgtggagtagctttctggggaaggcggtgctcaccccagcctttgtctgcagagccccacccagcagaggggcagtggcgggcagtggacgtggtcctagactgcttcctggcgaaggacggtgcgcaccgtggagctctcgccagcagtgaggacagggcaagggcctcccttgtgctgaagcaggtgccagtgctggacgatggctccctggaggacttcaccgatttccaagggggcacactggcccaagatgacccacctattatctttgaggcctcaggtaaaagccttccacctgtgtccttggtcctcccgggctccctccaccaggacagcccaggtcccgattacagccacacatactgcctcccgttggccctggtgttctcacgctaatttgccctctgtgtgtgccctgcttctccccagtggacctggtccagattccccaggccgaggccttgctccatgctgactgcagtgggaaggaggtgacctgtg

SEQ ID NO: 1884775 - DNA, 4001 bp, Homo sapiens; identical to SEQ ID NO: 916042

SEQ ID NO: 1884776 - DNA, 4001 bp, Homo sapiens
acctccccttttctgtcctccccactggacttcgtgccagccccagctgtgccactcctggctgtgtgacctcagacaggctccccgccctccagtcctcagtttctccatttgttagaggcagtgcttcccaagagaaggtctatgggctccagttcctactatttgatgatactggggttaggttttgcagggctgagagggaggaggaaggagaaatcgtcccattttggctgggggacgaggagcaatagctcggtgaccccagtgctctgtccaggccactcccttgttcgggggcgggggggtgtctagtcctggagagagatggcggaagggctccgagttccactcctggtcactccttcctgcagacacagggaccaggacacagggaccacgtcagcgaaggccgtctcggcgcatctcagacaatgagcgcagtgtgcaggagcgaggggttggcagaggccaggaagctcctggggccaggcgcggctccccacccccacgccagacaaagagcgcggggcctggggagctggcggccttcccgccacttggggcgcctggggggctctggggcgggggaggcgggggctttgtctaactccgccactgccaccaccggccaggccgcggcttggcaacccgtgaacaggaggcagggctgcagggcgtgagggatgatgacaaggaagccggaggagcagcggcggcagcggagagtccatcttggatgcaaatggcaggaggggagctggggttctgcaaaggggcccgtggggggttgggaggggcaccaaaaagcccagatctggggatctcggcactcctggaattctccacaggacaaagaagaaaagctgagtacaggtccagccagcccagaacaggacttcaggggtccccgtgagtgccgctgtccctgtgaccccaaaccccgagggtcccagtttagggccccggccccaatgacaccagggtaagcctgagctcagccttgcccaggctggcaacaccagcccctgccctccccacaggccagaggaagaaggctgctggcagtcctacctggcaacaaagcccgtctttgtaaggtctgcggaccccagaggaggtgagaatgtttgagaaaaaaacagtggctgtttgctctttgggactccgagcccacaagtgagcaattcaactctccctccgcaccctgacgcttaaccctttcctgcccctacacctcagtgtccaagattttttttaggtatcgtttttatgggtcccacttccgatttggggggttacgaggtcaacgtttgcaaacaaggcccaaaactcgagcaggagagccagcgtggcaccggtgaccaacggggccactcctctccccgtcgagtccttccccccatcccgccccgcaacacaaccgccttttgggaagtctgtttccgaccaagtgtcagagaagaagggccccagtgaggtcacaaagcccggcacctacgaatccctcaatgttgtgcccactccccatggctccctcggtcccctgggctcagcccgaagctgcctgacaacttctggaggagtttcctgggagcgcccggctgcggccgcagccccaggaagcttgaggggagcccctcccggcttctgcatcgagggccttccagggccagcccttgggggctcccagatggggcgtccacgtgacccactgcccccacgcccgcgcgcgggccccagcagccccagagctgcgccaacttcgttcactccgcgctcaccttacgggggtccccgcgtgaccgcatggggtagcccctgctcccacgctcccggccgaggcccccgggcctccgagtacgctgcccgccggcgaccccatcctggtcccagtcccggcggccccgcgacctcagggcccccggcagcccggcagccccgcagccccgcagccccgcagccctccatccgcgcccgcccgcgcgggtcctggccctgcccgcagcgccccccgcccgggctgcttcacgaccccgctccccagggcggcggggccccgcgccccgctcccggcgcggcccgggccgctcccgactcccgccggcaggggccctcgccgagccgcccagaagccggaggaaaaaggagccgagaacaagcctcccccgccctcgccctcgcccgccgcgctccctgcgatccgcagccgccggcgcgggggtcaccccgggccgcccgccccgcacccccagccgaggccctcggcgtgcggggcgcaccagagaactttcgcggcgcgggctcgggaatcatggcggcggcagcgctgccccgggccgggaccctgagccccccgcccccggcctccgcgggcgccccgggcatccccgggccggggccgggcgcgcggacccccaacttggcggcgcttggggcgcgtcgcacgcggctcactcaccggcgttgagggcggcggcgggcatgtgcgcggccaagttcggtttgtaagacatccccccgggcggcgggcgcgccgggcgcggcggggccaggccgcgagggcggcggcggcggcggcgaggccgggcggtagcgctgcagccccgcgcccgtccgagcgcccgccgagcgcccgcgcactttttgttgtcggcggctcgggccgcgccggcaaatatggccgtccgcgccctgccgccgccgcagtctcacccaggccccgggtgcggcgcaggggcggccgcaaactttccgcggagccggcggggcggccggggccgggagggggcggcccggcgtcagggggcggctccgcctgcggccgcgccccgcgcctccgggtgcgctcggcgcccgcaacttgccaaagtttggggggctggggtcccggcggcgcctgaggcccgcgcgcgtccgggcggctgccccgcgcccggcgccccgggggtgtgctgggggccggtcccgcggcggctgcgggaggccagggcgaaccggaatccgaagagcactttcttccccttgatggtgggggcagggatggaaaattacctggagaaaatggtggcgagtggtgtatttaagcacgtagatcattccagacgcccaggtctggccaagccccaggattagaataaccgatgcttgacattgatttcaaataaatttcatgtctctgtctgtatgaagtggtttttaaccctttggggatccaagactcctttgagactgacaaaagcttagaggccttctccacccctcacccccctccccggaaaactcatccctgaatcgcacaatttcgtgcgtagactcactccagtatttaagggaagcacctactatgcgccactcactgttccaagcgctgaggatacaagaattgaacttggcaaagtttctaccccctggagtttacgggacaattttagatcctccttcgaccccacccccagcccatccttggatccgattgaaatgtaaccatccagtgtattttggatttggattagatgaataacctgaaggttgtggggttttttggggttttttttttttttaatcttggagttctgccgaagtagtaaagctcgttaaaatacataagatgcccacccttttctgttgtttttaatcgtcatggtttgcagatttaattagacacaggcgtgcaagcatcatctccggatctgatgacaaaggcacccacctagggatgcccacccaggcctgcttcttcctttaggaccaaaggcgcaggcgacgacaccccctccccagcttaacccccatccttgagatcagctgtaggccagcactagcgaagaatgctcagtgaaaccttattccatgaataaattaatgccacccatgtggctggtcccgggcgcccagtcctttagagcagcgcagtccaatggaaatagaatgccagccacatagctaattttcaatttttcagtagtcacatttgagaaagtcaaaaaacactggtgaaa

SEQ ID NO: 1884777 - DNA, 4001 bp, Homo sapiens
ttaaccctttcctgcccctacacctcagtgtccaagattttttttaggtatcgtttttatgggtcccacttccgatttggggggttacgaggtcaacgtttgcaaacaaggcccaaaactcgagcaggagagccagcgtggcaccggtgaccaacggggccactcctctccccgtcgagtccttccccccatcccgccccgcaacacaaccgccttttgggaagtctgtttccgaccaagtgtcagagaagaagggccccagtgaggtcacaaagcccggcacctacgaatccctcaatgttgtgcccactccccatggctccctcggtcccctgggctcagcccgaagctgcctgacaacttctggaggagtttcctgggagcgcccggctgcggccgcagccccaggaagcttgaggggagcccctcccggcttctgcatcgagggccttccagggccagcccttgggggctcccagatggggcgtccacgtgacccactgcccccacgcccgcgcgcgggccccagcagccccagagctgcgccaacttcgttcactccgcgctcaccttacgggggtccccgcgtgaccgcatggggtagcccctgctcccacgctcccggccgaggcccccgggcctccgagtacgctgcccgccggcgaccccatcctggtcccagtcccggcggccccgcgacctcagggcccccggcagcccggcagccccgcagccccgcagccccgcagccctccatccgcgcccgcccgcgcgggtcctggccctgcccgcagcgccccccgcccgggctgcttcacgaccccgctccccagggcggcggggccccgcgccccgctcccggcgcggcccgggccgctcccgactcccgccggcaggggccctcgccgagccgcccagaagccggaggaaaaaggagccgagaacaagcctcccccgccctcgccctcgcccgccgcgctccctgcgatccgcagccgccggcgcgggggtcaccccgggccgcccgccccgcacccccagccgaggccctcggcgtgcggggcgcaccagagaactttcgcggcgcgggctcgggaatcatggcggcggcagcgctgccccgggccgggaccctgagccccccgcccccggcctccgcgggcgccccgggcatccccgggccggggccgggcgcgcggacccccaacttggcggcgcttggggcgcgtcgcacgcggctcactcaccggcgttgagggcggcggcgggcatgtgcgcggccaagttcggtttgtaagacatccccccgggcggcgggcgcgccgggcgcggcggggccaggccgcgagggcggcggcggcggcggcgaggccgggcggtagcgctgcagccccgcgcccgtccgagcgcccgccgagcgcccgcgcactttttgttgtcggcggctcgggccgcgccggcaaatatggccgtccgcgccctgccgccgccgcagtctcacccaggccccgggtgcggcgcaggggcggccgcaaactttccgcggagccggcggggcggccggggccgggagggggcggcccggcgtcagggggcggctccgcctgcggccgcgccccgcgcctccgggtgcgctcggcgcccgcaacttgccaaagtttggggggctggggtcccggcggcgcctgaggcccgcgcgcgtccgggcggctgccccgcgcccggcgccccgggggtgtgctgggggccggtcccgcggcggctgcgggaggccagggcgaaccggaatccgaagagcactttcttccccttgatggtgggggcagggatggaaaattacctggagaaaatggtggcgagtggtgtatttaagcacgtagatcattccagacgcccaggtctggccaagccccaggattagaataaccgatgcttgacattgatttcaaataaatttcatgtctctgtctgtatgaagtggtttttaaccctttggggatccaagactcctttgagactgacaaaagcttagaggccttctccacccctcacccccctccccggaaaactcatccctgaatcgcacaatttcgtgcgtagactcactccagtatttaagggaagcacctactatgcgccactcactgttccaagcgctgaggatacaagaattgaacttggcaaagtttctaccccctggagtttacgggacaattttagatcctccttcgaccccacccccagcccatccttggatccgattgaaatgtaaccatccagtgtattttggatttggattagatgaataacctgaaggttgtggggttttttggggttttttttttttttaatcttggagttctgccgaagtagtaaagctcgttaaaatacataagatgcccacccttttctgttgtttttaatcgtcatggtttgcagatttaattagacacaggcgtgcaagcatcatctccggatctgatgacaaaggcacccacctagggatgcccacccaggcctgcttcttcctttaggaccaaaggcgcaggcgacgacaccccctccccagcttaacccccatccttgagatcagctgtaggccagcactagcgaagaatgctcagtgaaaccttattccatgaataaattaatgccacccatgtggctggtcccgggcgcccagtcctttagagcagcgcagtccaatggaaatagaatgccagccacatagctaattttcaatttttcagtagtcacatttgagaaagtcaaaaaacactggtgaaattgattttaacatgttttatttaatacaatagctccagaacagcgtgatttcactatataatgaattgaaaggaattattaataagacactttacattctcttatcatacgaagtcttcgcaatccagtgtgtgttttatacttacaacgcattttaattcagactagccacgtttcagcgctcagtagccaccatagctaggggtcaccgtattgaacagtgcagggctgcagctactagcggagggctcctgcgacggacacaccgggtactgactctgactcccccacccactggctgtttgactaggcctccatttcttcggggcaagaatccagatctcagtggcaggcccggtcctttctatgagtgctctgaaccgatctatttccatattgttatttaagaaccggggtctccctctgtcacccaggctggagtgcagtggcttgatcgtagctcactgtagtcttgaactattgggctcaagtgatcctcccgcctccacctccatctcaaagcactgggataacaggcgtcagccaatagcgttgtattttttccattgtccccactcctcgctctaagtccatggcatcattttaaaactgttggccgagcacagtggctaacgcctgtaaccccaacactttgggaggccgaggcgggcagatcacgaggtcgggagatcgagactagcctggccaacatggcaaaaacccgtctctactaaaaatagaaaaaattagcggggcgtggtggcaggcgcctgtaatcccagctactcgggaggctgagacaggagaattgcttgaaaccgggaggaggttgcagtgagccaagatcctgccacttgcactccagcctgggtgacagagcaagattccacctcagaaaaaaaaaatttcagctcacgcctgtaatcccagcactttgggagggcgaggcaggcggatcacctgaggtcaggagatccagactagcttggccaacatagtgaaaccccatcttaactaaaattacaaaaagtaggcgggcgtggtggtgcgtgcctgtagtcccagctactcgagaggctgaggcagaattgcttgaaccgacgaggcggaggttgcagtgagccaagatcgagccactgcactcaaacccgggtgacggtgagactccgtcacaaagaaaaaaaaaaagtttcagctgggcacgatggctcact

SEQ ID NO: 1884778 - DNA, 4001 bp, Homo sapiens
ataataaattacaaaaaacaccaaccagataaaaagtccaaaagacaaaatgtaaaacacttgtattttgactgaccttcttccagatatttttgtacacttatattaacatatgtacacacatatattcacattaggacagcactgtacttgctaaactacattctgctttttttttcctgaggggaaactatattttttggacatactttaatgcaaataaagaactttccatcagtttttaatgggtcaagagtattccattgcatgtaccaatcataattttcttaactagtgtcctagtgatggacacttgtttctagaagcattatttttaaaaaaggtggcaaatagtatccttatgaatcccttattttccttagggtatatgcctcggaaatgagacagctgtggggcaaaggctaatgcatatgttaaattttggtaaatagggttgtaccaatttcaccttcacaccaaaaatgcctgacagtaattgtatcccacacccctatcaacaatgatagacaaaaaacaactgtttggaagtgggacaactttccgtttgttaattgaatatttgtttttcttggctttttgtatttttaatagatgggatttcaccatgttggccagggtcgtctcgaactcctgacctcaggtgatccacctgccttggcctcccagcgtgctgggattacaggcgtgagccaccgccatttcccgaatgatctttttcctactgaccaataatttgtcatgtatagtttactggctaccacagagatttctggagttgtctggctccagcgtttaaaagtaatggttttgggcaactctgtgaaatggagataacaattgcacctaccttacagaaatgttagagttaaataagataacctgaaaaagtactccagtacttgccacacaaatgctcagcaaatgtgagctactgttattatactaaacacgcacacatacatgagaatttctggattctctattctatctcccatgtctcatctatgtaatccatccagcaacattccattaccaactcgctgtcctttttttccctcctcttaagagacacggtcctttctaatggcccgttttccctcatttcaacaacaacaaaatcacctctcagttgtccaataataactacagcctgaaaatcataatcttgggggtaaaaataagctgtacttcacaaagcagtgagaatcaaagcccaaccaaggcactgaacaaacgctggggatgggaaggtgtctgtttcttccaacacgtattttgaaaggctgaccgcctactttgtttcagactttggatgatcatggaagttctcaaaagctagcaactcctcttccaactattgtttacagccttaagacaagtagttccccatgtgaccccaggtgggccctgaacttgggataaccaggacaggagacttggagcaggaggtgcgggggcgaggagggctctctcccgggcgattggtcctaacccgaggttccctcgtggcaagctgagccgactccccactcgtgggctgatgcccgaggcagacgcggcaggcaggcggcttcgggagcgcatatctgcacccatggggacgatggcaggctggcgaagggagagaggtggcggcaggactaccatttgaggctctcaaatggtgtggggaagagggaaggagaggcgcgaaaaggaggaaaacccctggagacgctgtgtcgggcggaggctagggagaccggcttcgcgctccaacgacgcgcatcactcagactccaaggcaagtgcccggggctagattttccgtcccctggggctctggggatctctgagtccatcccagggccctccaggaacgccttcgggagcgcagcccggccccgccgctgccgctgtcacccgtggccgctcccgcctcggttcgtttgtctcctccctctaacggctccggcagcaaccggcgtcggtggcgtgggtgacgtcggcgtggggggtgggacttcctgcttcgcgtgccgctgggccaagggacagagcccgctcctccaggctggtggggcggtgcgatgaggcggcttctgggccatacgtcagcacgtggggtggcgccgcacccctgaggatcccggtccacgcggaggagtggggcttttcaccgccgccgccgccgccctcggacctctcccgggatacttcacatttccctagggacgggagcccgaggggtccgttcggccctcttcctctcgctgggccgacaccccgctgtaggaccgtaacccttagtcccaatgcctccgtaagcggagttgagtgggtgcctgtggttggagctgtggaggtgtccccggtggcgagcgcggccagaactgcggtcacttaagttttccgtgtgcgggttgcaaggagcgtgcgtgcgtctggtatgtaacctctctttctggggacggtgtcttgtttgtattttggaatactcattttgtccctccacaaactgcccttgaatcctttttttattttcctgttaaagtagtggaagctcgtgctagaaaagtaggcagagagacgcacgtgaaactcttcatggagcttttggatgcactctggcttggtggttgtgtagccagtttggtaattggccagacgtttaagtacctccagcttaatttacgatgaaaaagctatgctaccattttccttggctttgaagacaatttgaatgaacagtgatgtcgactgtcattactgagataaacacctaaaatatgttagcatatgctgggtttaaatactttggttaatcctcagtgtccaacttttgaccataatcaatgggcattttgctcttaagaatatccactgctaagtatttgtaaagcctttagttagctgaaatgaggaagctctttcaaatcttacagatctctaggataaggaaagacttgtctgaatttcgtgtatatgatatatacttcataatctgttcagactttaagcagctctaaaacagagtgggttgttaaagcagtgcttctgttaccaagcaacatgtctgtaaacaagtctgacatttaactaaaacacaattaaaggtatctatcctacagttacctggatttagaattttccatatttatgaatttagcctgtaagtggttagaattaatactcaccttttgtattgaggtttgatttcaaactcagtttgttcagaattgttagaatgctttatttatttatttatgactgagtctcactctgtcgcccaggctggagtgcagtagcgcgatctcggctcactgcaacctccgcctcctgggttcaagcgattctcctgcctcagcctcccgagtagctgggattacaggtgcgtgccaccatgcccggctaatttttttattttagtagagatggggtttcaccatgttggccaggctggtctcaaactcccgacctcaggtgatccgcccacctcggcctcccaaagtgctgggattacaggtgtgagccaccgcaccaggccagaatgctttaaattataagtgtcacacaggactctcctgagagttgcaaatggttttgagttgtcctttggttatttaggacagagtatgctgggtattccccttactttgagtgttttctttccagatcagatgaagtgcgcggactgtatttagaacattctcaaataatagtgaaatacaatttagaattccatgcagcactgggagaatgaaacactgattattcacaggtagtttttttttttttctttttttgagacagagtttcattcttgtcgctcaggctggagtgcagtggtgggatctcagctcactgcaacttccgcctcccagtttcaagtgattctctcctctcagcctcccgagtagctggggttacaggtgcatgccaccatgccctgctaatttttgtatttttagtagagatggggtttcaccatattgcccagg

SEQ ID NO: 1884779 - DNA, 4001 bp, Homo sapiens; identical to SEQ ID NO: 916053

SEQ ID NO: 1884780 - DNA, 4001 bp, Homo sapiens
ccagttaaaaagaaggtgaaaatgggaagacatagaggagggtgtgccctcctccaaagtggctctgaaaggcaatcctgaaggggaaccttgcaagatatgacagaaggagatcttccagtggctgcttgagggccagtttcatttttctgtctattaaaactgggcagtaatgttcccaggagcattcacaacctggcactggagggatgaggcctggcatctgatgatcttgggcacagtggtgctggccttggggatcttacagtcatcctccctgccaacattatgtttataggtgcaaagttaccccgttgacattcaccacagcaaagatcaacaagtgcaaatgactagggcaaattcagaatccaagccagttagttcatcagggaaggctgctaggagtgggggagttagagaggtgtgcaaagagaaacccaacagggcatgcaatagattaggagaagagcaggagtacctctggctgatggtgctgaggcaggtgagcaaaccacaaatgaggctgtggacagctttgctagcctggagcaacgagctggattcaggaaccagcatgaaggggaatggaagggggcaggttttgaagtcaggctgggtgatctgaatttgctgagagaaactggggcccaatggggatgcactaacgtgtcaggtagagtgtgtgagtgtgtgtgtgtgtgcactcacacttgtctggataggtgtgtacttaagtttgcatgtttttttctgtgtgcgtgtgtaggggcatatacatccaggtggctttgtgccatgtggctttgtaccccaggctcttgtctatccatctgtgtgactggcatgtggctatgcctgaatgcgtttgttcatttgtgtgtttccatgtggtcatgtgcgaatggtatctcagttgctttttgtgtattttacttggctacgtgtggcgaagggcagcgtgtgtgttttgcgcgcgtgtgtgtgtgcgtgctcgtgtctgcaggaggagtggggccggcagggagccctggctacccaagcattgccgtctgtctctctccctccactggctccatctgccgtcgctgaggtcgtgacaaggaggcaaacagcaaaacggcaaacagctacggcgggagaaacaagaacattgtaagccccgcgcagactgtccctgtggaggagaaaggcacatgagcagccaaagggacggacactcacacacacacacacgcacacactcactcctgcgcacacaggctgctccgcggacacgcttcacggagcaggtgtgcccacgcgcaataccctcctggcccacaggcctccgcacgcacaggacacacacacacactctctcctggcctccctcccgccgcccctcctctgagccctgcggcccggccttccgcacctcccaacgcctgcaggggttgggggcgctggggctcggggcgctcactcggacctcggagccaatcgccagagatctaatggctcctttggcagtgggaaggggtgtgcgtgggtgtcctctccttcactctttccccagccctgtcgcctcccaccccccttccggccgcggcagtttccgaaatcgcccggcggccgcgaattcattagtggggggcggatgtaaacgcagcgcggtggaacgttttaattaggcctgaacaataaacaagctaaacgaggcgcgcaggactccctggtgggccctcagcctcctccgcgcggcgcggactcattacggctgcagccaatttcatgccagcgccgagcactggctgggccgggagtggggtcgggggtgcgtgcgggtgcgatccgggcctgcagggtgcggagcgggggcgtcccggggcgagggcagcgggccggttcccgcccgcccggggccgcggcttccgcatttctgcaccatccacctgcctttttcagtgtccttgagatgacgctccctccccacaccagagcggccggctggagagtctagcttgctttttagggtctctctcccgcctcttttcctcccccgctccctctctccttgcggctgactccagctccccctcggtgcccgtaaccctcctttcctctttttgccgcagtctccgtctctcttccacagggtctctccctccccctctccccgtggttgtcagactttctcctggactttctccgccccgcaccgcccgccccggatgccgagcgtggtagactctgcagccgggctcctcgctgcccgctggcgctgcctacacccccttgggctcccctccaaggtcccctccgctcgcccctctctgcccgctgccgccgccgccgccgccttccaggcctctctccaccctctgtctctttctgcctgggttcttcctttgggccgtctaccctcgggtttcaggttgggcattgctcccgcaccctactaattggggctcttctggaccgatccaaccagcgaagtcgaatttggctcgtgtccttctctcccttttttgcgaagctgcagacactgcttgctggccctccggctctgccgggacttccctggttctaggtggcggtgggtctgtggctaagtttgaatcccagccctgggcctcaccatgtgagtcttaacctgggcttgctcagctgtaaaatgtaggaaataattttaggtgcttcatgttgtgggaattagcgctgtgataacgaatgtaacatgcttggcacatgggacttagtctattagctcttcccttctgcctttcctcaatctgctcctctccctagcctggagctttcttaaagggttttgaggagagaaaaaccaaggtcacagactttataggccccccaaaattgaatatcagaaattgtaaatggttcaacctaacaaatgcactaggctctgattgcaagaagtgctgctgagtgtgtacaagaagggaggaccgggattggactgaactgcagaacaaaggaaaccatgtggactggcacactggactgagcaaattaaaacctaagggacacgtcaacccgcattagtcctgcctcagcagtatggctgccctcttagggctgcagagtcatgggactgtgtcctcttgggggctgcagtggatctaggagtccagctcccccaagactcctgcaccaaggcaggaaccagactcctagaacctcataccatcatacttctctcccatctatacatcacacacacacacacacacacacacacacacacacacagagagagacacacgtgtcctttgagatttttaaaggaaaattacaaagtgtgggcctggaattctgtctctgcttcagtttctttccctagttccctcctgactcctaagaagcagaatcagcgagtcgcacaccttcccctgtgtgtgctgcccattgtattgggcactgaggggagatccagagggaggagcacaaatcctgccctgctggaactcctaggctcatggtaagatgaggctggtcgtcaagaccaaccaagaggcatggagctctgggcatgccctcaacaaaggcttatcagttgagttggtcaggagcagctggaacaagtcctgtgactctggcactggggagaccaggaatgaccaaacaagaaagggtggaggaagatctgaaggaagtctaggagggttcctagaggatagggagaatggtattcatttagttagcagggagcagcaaaactgaaagaagagaactagcaagttagagctctcagtgaagtgcattatcttggggtaagggatggctaatgtgaaccttggaggcagatggggaaggaatgcataggggtgtgtgtgtgtgtgtgtgtgtgtgtgtgtgtgtgtgtatgtgtgtgtgtctgtgtgttggggcatatgtactgaggagaccgaggcagggaggatgcagggcttgggagggcaggtttgctgggctgcagcagagagcctgggctgagatgttcttgaagacacctggga

SEQ ID NO: 1884781 - DNA, 4001 bp, Homo sapiens
taagataaaacaggagagggagggcttggagagaagccaccaagctgcatgcagggctcttaaccacatgctatgtgatccttgagcagggcatttgccaagatctggagagggaaacaatcatcttccttctggagtgaagggtgggacgggagttattttcctaatatttagagaggctgttttgtcccacgatgtgagacacatcacctggaggccaatcccctagaaaaagaatagcagttgagagacggctttccttttcctgtttggggtgtgtgtgtgtgtgtgtgtgtgtgtgtgtgtgtggtaggaaatgtgttgttggagattctatatcatttcattttccctagcatttaccaaccctaactcaaaggaaatcctttctaaagtctattctacatttcttttgctgacagtaagcccacctctttagtggaggtattatctaaagtccaggatctggctcaatgtcttttgtaaaagatgtgtgtatgtcggggaggggaaagtaaaagatggaacttgaagaaatggaatgacccagctcctggctttaattacagtaagccctgaacattctgaactttattaacctcttaagtgtccacaggggtgggatggacctggtgggttttgctccctggtcctctctgcagggcgtctctggagggtcccctctctacgctctttgcccatcccagcctttggctgcacaccatttctcctggcctcaggtggcgctataaatcacctctcccagaaaggaggctaccacctacctatccagtccatgtctcaccagctgtcttcatcttgcccaagatcctctggttctttcttctctgcaaatcccatatgctttccccagcaccagttttttggataacctgattagctgttttggagagaggggctctttttgcagggacccctttctcctcctaagtgtcttactaattacaaacagagaaagcctggtctgtgaagttagcctgcccccagctccctggcttggtggagggaaccaggagctaggggatttaaagcgcaatttcctgtggccttttcatttcctgctgggggttgtggagagcaataagcaaggtgggtggcaagggccagaaggaccggccaggtgggggatgggctgggggagccttccctccatgtactcttctaccatccccttttctggctctcgaggtaagttctttggggatgaagcacctgataaatgaggacctggaactccttacaatctccctcttacctccccaaagtaagagaacggagtagagaggagtgggaaaagatctgattattgtaataatagatgataccacaggaaggaaccttggaaatcagttggatcccttgaggttttattttattttaaatagagatgggggtcttgctatgttgctcaggctaggccttgaaatcctgggctcaggcgatcctcctgcctcagccttccaaagtgctgggatcacagacgtgagccactgcacttggcctctttcaggtttcagatgaggaaatggaggccttggagagggcaggtaacctgctcaaggttatgtatgtaagtggtgagctggtgtggctgggatttagctaactctcatgattcactgtttagtgctctttcctcagtcagagtcagagtgggctgtgggtcagtgatgtgtgtgtgtgtgtgtgtgtgtgtactggggaggggggatgagatgggaggaagtggggtagggagcaggggatctggggaggtacctggatagcaggggactccgggtcctgaaatgttcactctttggtaggtcctgtggaagagcgcaggcaagtcctgacttagggaagcttttgtgagctggctcaggaaacagatgtgtggataaaaaggaggggagagggaggaactgtggcccttggaaactattagcccaacatctcttcttcccctctccacagtcagaggtggatgaggtgggggaggggcatggcagaggacaaaggagccaattattgagtgagtggattaattgattaattgtccagaagcttccagtgctccccaacaatgacatcccctcccccgaccccagtcaggcatggcctcggttggcctggattattaattagggcttgaagtcatttaacgatgatttcattatcgacgtgctgtctgtctcgggctcagcccggttgccagggcgactctgatcgattgccttccggtcttcttggcttggccggctgcttcctttctggagcctggctgttggcgagcactccctagcggccctctctggtactgcagagcttcccggttgcaggcttgagagactcaggcgaggaacagagagctacagctgccttgggggtcttttcagctactgactgacctagctgttgcctgggaaccggcttttctccttttctcctaggttgtgaagtccttctgattctgtcccctggccttctacccatacccctttgggatgggtgtaggaataggtagggacctcagttgtttcctcgcagcctttcaatttacctctgggaggcccagataagctgtgataaagttattcctgctgctaaggagactccttaggctctgtctatcctgggacatctggcctcttggaccttgcatgaggctggcagggaaggagtggatgtggggataatttccccttagattgcctgagttaatgttcttagggtcttccccggccgtgagaggagctgggggagctggtctttgcagagctcagctacttcctcagcctcaagaaagcctggggaaaaaaggcagggtccaggttgtcatgctaagtcttaggtcttcagaaacttggctggttactctatctgtggtccctgaaaacctagattcatgcacattcagtggtctcaggatctctactctatgcctcagtttctcctttcatgggtttcatgtatatatttgtggggtctgttagtagagagttgcttgaaggcatcggtcatggcttctcagtaggtgtctaaattgttgaccccaaagtaattgggcgtcactggtgtcttatctcccttatcctttgcatgctgctaattttattctcaaatgcagatctctcctcagtccttacctctctttactcctctccccttgacccctgaccaaagactgtccccagcaccctccccagaacatgcctcccttgcctgccttcctctatttctcctcctcctctgccccacttccccttctactggttgtgccaggctgcgttagctctgaaaaattaagagctgggcttcagtcctctctggactgcagcatttttggggacagggaggcaggttgggttgtcatgtccatgtaggggtctctgcgagccccccaggttggctctgggagagagcctcagcatatcagctttctgagcacatccgccactgagcagcacctgagaggggaagcggctcagcagcgagctgagtgagattgaagaggatcataaagaaaatatatatccccctccctggcctcactccctcctcctgctccacacttgcctccttctctctctttgtctcactccctccccccttttcactgcaaccctgttttctttgttccttctttgcctccgtcaccctcacctctgtcaggcaggtctgtctgtctgtctgtcggccattctgtctatctccttgactccacatattttttggtctgagtttttctaggactgtgtccgccgtcagcctttctctctccctccccgcttccctccctcagtctgggagggtctctcataccatcatgtctttatgagtttcactgtgtgtgccttttagtctctccatccacctcccctcccatctgtctcgtttggctgtctccccatcgctcttcgcatctctcttcccatctcttgccctccctttcatctctcctttttgcttctcttctccctgtctctttcagcgtcttc

SEQ ID NO: 1884782 - DNA, 4001 bp, Homo sapiens; identical to SEQ ID NO: 916068

SEQ ID NO: 1884783 - DNA, 4001 bp, Homo sapiens; identical to SEQ ID NO: 916074

SEQ ID NO: 1884784 - DNA, 4001 bp, Homo sapiens
ctggctctgtcgcccagactggagggcagtggtgtgatcttggctcactgcaacctctgagattacaggcgtgcaccactatgcccggctaatttttgtatttttttgtagagagaggtttttgccatgttgcccaggctggtctcaaactcctgacctcagatgatccacccactttggtctcccaaagtgctgggattacaggcatgagccacacgcctgaactcttccatcttttgattctgttgtcttcagtacatgctttcgaggttgctgggcttgtctccatcaagccatcagaagggcaaagagcatgggggattgtacacagtaggttcctctgggctaggcctagagtggcacatgcctcacacacttattccactggctagaactcagtcacgtgatcatactgaactgtagcgggagctgggaaatatggtgtgaatccaggaagaaaaagaggccaggcacggtggcttacgcctgtaatcccagcactttgggaggccaaggttggtggatcgcttgcacccaggagttcaagaccagcctaggcaacatggtaaaaccccatctctacaaaaaaaaaaaaaaaaaaaaaaaaaatttgccgggtgtggtggtgtctgcctgtagtcccagctacttgggaggctgaggtggaaggatggctggagtctgggaggtcaaggctgccatgagccatgagtgcatcactgcagttcaacctgggcaacagggcaagactctgcctcaaaaaaaaaaaaataaacaacaacaaaaaagtcttggtgaacagctagccaccctctccccctctccatatgtattcacttccatcctggcttggctgtactgcactcttgtttctgtggagaaagcagctcagtagagtctgtttcttcactctttcggttgaagccgttttactgtggctcaaaagaattttttttctgcctgtgaaattaattatacctgttcattaaataaaatttctatagacccaagaaaacacagataaaaattaccagtgattccattgagataattgttctgagtccctgttacagttcccttcaatttcagaatttttaagcacttagaaataataaaatgtcactaattcttactctgtgctggcttgcaaacttcaaaactcttaagagggaggaaacaacagcctggccattttgccttttcctcacaaagatacacagggctattccggagctgtcccgaggctttattcttctggcattttcaaaatgacttagacatcttaatctccacttctccttagtaaacagggtaaatattggggctggtgaactcaatagtttattaggatggcaagggtaacattttaagtttatgatttattttctactcagttatcaggattcttttttctttcctttttctttttttttttttgagatggagtcttgctctatcgccaggcaggagtgcagtggcacgatctcggctcactgcaacctccacctcccaggttcaagagattctcctgcctcagtctcccaagtagctgggactacacgcacgcaccaccatgcccagctaatttttgtattagtagagacggggtttcaccatgttggccagggttgtctctatctcttgacctcatgatcagcctgccttggcctcccaaagtactgcgattacaggcgtgagccaccacgcctggcggggatgcttaaatgtagcccaatcctccagtaaagaatactaagaaaaagtgtttggaaccgaaccaaaataaaaacttgcgtaccagaagtttgcaggtaatacagatatgcgtacatgactggtgttcagctatttaggtggacttgcttgtctctgcttacctgtgttgctgatgctggtcagcagtggagaaaactgagattagatgctgctaatctcagatgggaggataatttcttaggaggaaggacatttcttgagtcatcagctccagattcctttaaagtggtgaggcttcagcccagagggcgactaacatgagaattcctgtttgtgaggtcattgtcatgacctcatagccaggctgttcaaaatgtttgcccagcttctggcaggatatgagctgatgcctgccccgattctacagacaccatgaggtactattttcatattctagatttgtgttgattttcttcaacttcttatagataaaaagtaaagacattgacaccaggccctctttattttgctgaaagagatcgtataatgatgagaaaattattgtgagtatcctctggcaggacttttaaaggcagaaaactccacagttgaatagaaagtgtttttactgtgtgtacgtgattagtcagtagctctatttgctacggaatttactatccattttttctgcaaataaacataaagttttttcttctgtgaaaaagtaacagtttgaaatgattagactaggttatcagtggcagaaattctttatgacccagaggtctcaattcagatgcatcacaatcgagaagttgtcaccatctgtttttgattattttgccttgtgctgtttatacctgtttcagttggagttggaagaaaaggtgttggttcgtacagatattcagaaagctagtctctgagggttaatattaactttttaaaggattgtccttctttttttttatttttgagccggagtctcatgctgtcgccagactggagtgcagtgatgcaatctcggctcactgcaacctccgcctcctgggagctgggattacaggcgcgcaccaccacacccagctaatttttgtatttttagtagagatgcggttccaccatgttggccaggatggtctcgatctcctgatctcgtgatccgtccacctcggcctcccaaaatgctgggattacaggcatgagccactgtgcctggcctaaaggattgtccctttaagtaaataaaaacttagaaaaccctgtgtttctgtattctgggtgcaaacacttgataaattgtccctttccatcttttttttttttttttttttttttgagacagcgtctcactgtgttgcccaggctggagtgcagtggcgaaatcttggctcactgcaacctccgcttcccggcttcaaacgattctcgtgcctgagcctccagagtaactgggattataggcacgtgccaccacgcccagctgatttttttgtatttttagtagagacggggtttcaccatgttggccaggctggtctcaaactcacctcaagtgatccgcccgcctcagtctcccaaagtactgggattacaggcgtgagccaccacgcccggccccttttcatcttttatttaagtaatgcagtacgtaaacaatggaacttttttctaagtttgactgtgagtttaagtggagagatgatgcaccacctcccaaataataattttcttattgctttgcacccataaagcatgtcagtgtcagagagacatcacatcctgttttttgaagtagactgtgcttttaaaagcattgccctgtgtgttctctgtttttccccctccgaaacagtcacatgtccctattttcttaaatacataaaacctagaatcttttttttttttttttttggagacagaatctcactctgtcacccaggctggagtgcagtggtctgatctcagctaaccacaacttctgcctcccaggttcaagtgattctcctggcttagcctgctgaatagctgggactactggtgcgcaccaccacacccggctaatttttgtagtttagtagagatgggggtttcaccttgttgtccaggctggtctcgaactactgacctcaggtgatctgtctgcctcagcttcccaaagtgctgggattacaggtgggagccaccgtgcccagccaagatctagactcttaaaacactttcttagagactaagagccctttatgggtccactaggtgtatgccctttcaaatgtctctcttta

SEQ ID NO: 1884785 - DNA, 4001 bp, Homo sapiens
gtcagctatatcataattaaagattatttccccatggggctatgggattatctatctggacaactgaggatggtggcatgtagcccagcagtttccttacatgctgtgacccagcaagctgagccagctctgtcttaggcacttcctggaagcaggcttattggtgttttcaacacccagagtggatcatttgttaactccttcctcctctattccgtacatttctttttcagtaataatcctgtaataatcagtaataattatgcttttcttgattcgctctttagttttataacaaataccagttttaaaaagaagaaagctgtaatttcagtgatgttacttagtcttgtaaaaatacttcatgtacttaaaattgtgtctaaaaagccaaaaatattccagcatgaagttgacactctgttttactattcaaaattttaagcacaagtaaaaactctcagtggttccatagaatgacagaagcaagcaattttggttcacttattttgtctacacaatcactgtgttatcattcttgattttgaatctgtgatttgaagaagaaacatgtggtaccccaaagactagggccatgaaataccctaagtatttacctgagtccttaagagtcagggactgtatacccgaatgtttcccataatcattttcatgttgaattcaatgtttgttaaggaacaggtaataaaaatatgcaaacttgaaagtatttatatatttaaaagctcagtggtgaccacaacaattatttagaattcaaaccaagaaaatgttttttcagggaagagtatttgaccactagtatgatttagaattatgatgcatggcaataattataccaaactgcatttcagtgactctattattttttcagattctctacagacagtgcagcctagtatctcccagacttgtacttcctatggccctgcacttggggccccactgcctggtagaaatgaaggttagtgttcgaaagtatttaaagaatcctgctaatccctattttatccataaatgtcatctgtcataaagaaacttttagcagtttctcaacttctgagaggtcttgtgggaggttttgccataaagtgctcttgttgagctcttgatatctataagctgatgccctgggcttgtcccaaatgatgcctcccacccattcatcagcaggacactatcccagttcacacacctatgccccatctccacatatgtttcaccaaaaccataaattttgaaatagagtcaatataaatgtataacatattgtattagggctcttcagagaaaaagaaccaatagtatatttgtgtgtgtttgtgtatgtgtgcgtatacagtcatgcactacacaatgacatttcagtctacaaaggattgcatatatgatggtgatcccataagattataccatatttttactgtaccttttctacatttagatatggtagatacatacatacttatcatgatgttatacatacttatcatgaggttacaagctacaccatgtagcctagatgtgtagtagtctatgctgtccaggtttgtgtagttacactctatgatgtttgcacaatgatgaaatcacttaacaatgcatttctcagaacctgtctccattgttaagcaatgcataactggatatgtaaataaaatggaaattgactcacacaattatggaggccaagaagtcccatgatctgccatctgcaagctggagaaccaggaaacctggcagtgtaattcagtccaagtccaaagaactgagaaccagggaagccaaaggtgtaactcctggtttaagtctgaaggcccactcacatccaagggcaggagaagatgatatactagatcaagaagaaaagaagcaaattttcccttcctctttttgttttattcaagctttcgacagattggatgatgcctgcccttattggtgagagccgtctgctttactaagttcaccaattcaaatgctgatctcttccgaaaacactcttatggacacacccagaataatgttttaccagctacctggtcatcctttagcctagccaggttgatgcataaatttaattatcacacatatagtcttaccaattagtgaccttttcattctttatggtatttaacagtgaagatttgtagatggtctgtctacttggttttataggttttgatcagcactcagaagctcagtttgatcaccctagtttggcctgagctgaaagcactgaaacagtgagttctttgggtcttacttctagaaaccaggaaatgagagagatagtgacttggtttctcttatgtttcccttttgttctcttctcagtggccttgctaacaagtttacctccaaactatgagatttcagaaggaaaaccaagagccatctctgcatatgtgagagcgggcaaaggaaatgtgacaaggagaagaaagaagacacacttgggcaatgatgatgggaagaaggaagcacaggagaaaatgtaagaaatgtacaggtgagagagatcaggagaaagatgggaaatgtgggagagcagcaggaatcataacaataataatgccaatttggaaacgagaaccagtgtataaagcataccaataaggccaacgaagtgccaacgatggaaagccaccctatcaggagaaagtaaagtcatagcagatgttttatgagacagctcagaacacaatgactgaccaagaaagcggcacaagttagaggtggagaaatgacccagacccagacctttaggggtcctgaacttggttcatacctcatgtcagaaggagtagtgaccaaaagaaattctctttgctttaattatagaagcaggaatatacctgattttgtatgtaacagcatatgtttaagatctgaatatttctatacccaaaagcataatgtattagggttaatcatttgaaattgccaatatgcactcattttacctataaaaactgtaattttgcatggttcaaactaatagatatgaagatattctcaagcaaacttttttttcttttgccttgaagcccatgaggaagatccaaagagaactttggccttaactaagcttcctacattctcctggagtcggtggtttatgaatgtggtgccatctggggaactgacaacccctgatgtgttcactctgctcgtcttccaggtgagagaagaagaaggcgagaaagaaagagaagttccagaatttcacaggctgagggagatggtagtaacttctgtttatgttggtttctgtttattggtttgctttttattttgaactcgtttgacttcaggttccagatttgtttttttctttgtaaacgagactttgacattgttagcaggcccatctgtttgcttttcttaaataaaatgtaaattggtttttgttttaaatttcaggtgcttttaagtttgactctgctattcatttcctaaggtagtttgggcatggtagtgctggtaagaacagagaaatcttgctttatagaatctttttgttcaaatgaatgtacatttttagtattcgaaaattatcagttttaataggtttgattttcctgtctataatctgtgttttcttccttattccctcattctttcctatcccatgggctcagatttatgctctgatcaaatttcttttcatatctttccacctcacaacacacacaagaaacctaatacaagccactatctgtttctttttcaatggaaaagaaaaggattcctatgggatcatactgattcctgtgggccccttgcataaaagattgtagtgcattaaataatgaccctccattggccaatcaatcattattgagcacctagtttatgtggaatactgttcatacaatatcttgagtaatgatgggaacagatttcatgagagatgttgaaatactcatggacatagactatcttggcaattatgctcttgagattcttttataatg

SEQ ID NO: 1884786 - DNA, 4001 bp, Homo sapiens; identical to SEQ ID NO: 916085

SEQ ID NO: 1884787 - DNA, 4001 bp, Homo sapiens; identical to SEQ ID NO: 916094

SEQ ID NO: 1884788 - DNA, 4001 bp, Homo sapiens
aagagtttctagctgaacattttccaaagttatatgaaatagttaagatccagagcacagaatacatcaggctagcacctaataaacagttccaccagaatatgtatattttagtactagatctaagtttttttcaggcctaaaaggattcctataaccaccaaaacaaacaaacaaacaaacaacaacaacaacaaaaaaaaacagcatatgtgagagcagcaagagggactgcccaggcaaaattttctggaagaatctatttgcaaagtttaggtaatataagtctctttcttaaatgagtccaaagtaataagctacatctcacaggagaaagcctcttcacttgactggaacccaaccttctgctaaaggtcaaggaatcaaaacctccagtaagatggtcagggctaccatctgtagctgggttggaaggaaggcttgctgctgtgttaccataaacctgaataaaatgacctgccctgtttctccttttacaagatactgtggttgtttctcatataccatgaatttcatggatccatgtgtctttgtgatcaccaggatcatgaacttacaaagcacccaagtgaaaaccccccgcttaagttaggtgtttaaagaaagccgtgcactcaccacccccactccccgatttttacccattcactaacacaaggttagaattttccatgcctaaactaccatcgtgtggaagacagatctttgtgggaactggaacatgatgctgcattaactctcaaggatatccagtcatttataacaccggcacaaccaacatcctggctttgtggatttgcaagacagaaagccagtgaagaaaaaaatctgaactatgaatttaccttgaactgaaaactgcaggacaaggggacagtgttgtcttgtggggataacttctagcatttcattctgaagaacagtttgtgtgtcacactgccactctcaacccctttaaaaggatgaatcaagaccacagcactaaaagggacgggtggcagttggctgcgtaattgggcctatgaaaaaagatcaagctagcaaccagggcaattgatgctttcattttcccacacgacgccagaaatatgggagacatcaggaaccggagcgaagggacatgtcaagtcaccagttccttttaatgaacactcctgccgaacccttcagctctcggcccacttccctctgattcctgctaaccttcccgctcattccaatcctctgcagcccctacccagccttccgcatcccttcctgcctgctactcacaaattcccaaccactcctcccacattttcctctgttccccctccccttccttcactttcctccatcctacatcattctccactccattccgaactcaatcctcatctgcaatcctgcaggcttccaagccgcccatcggtctcccgcgagctgcccccgcagtccgggccagcgtcctcggtgcccctcgctcccacgcctcttcccgactcggttccttcccaacggcacccgacctccccgccccccgaccgctcccgtccgagcctctcatttctgacccctccatccgcacggctctgggcttgaccactcctccacggccgcccgagggccgatcccgagaaaggacgaggcggcaccctccgccccgcacccctaggcccattaccggccccgccgcagctgcctcctcccgtgatggtctctgccgcccccgctgccgccgccgccctagcccggtgggaaggagggaggagcgagcgagtcccgggccccgcggcgacggccggggagctcccagggcggcagggcggggagggagggcggtgggcagcccagccggcaggcagagagggccgggcgtctccggcaactcgggcgcccccggcagcagacgcccagaaccgccccggctccggctaacaataggatccggccgcagcgcactggctcttataggcgccggcacgtcctgaccgagacccggggctggctgggaaatggagtctacgggccggcccacacccagcagcatgccgggagttgtaggcggtaactgctgcaaagccgaagccggcgcgcaaaccggctcccgaggcggcagctctgctgcaaccttttaatgggggaagagaggagactcagctacagatcttaaataaacgaattctcctccaaagctccctttttctttcgtgtcctgaccacacgccattaggaacatgatccccccttctcctcgctcatggggtcttagtcttcagcaatatgacttattgcagcctgcgcaggttataaagaatacaagcaatatcttgagttatctacttatatgagggagtgctttgagtgttttctttaaaaaaaaaaaaattgctgccgggcgcggtggctcacgcctgtaatcccagcactttgggaggccgaggtgggcggatcacgaggtcaggagatcgagaccaacctggctaacaaggtgaaaccccgtctctactaaaaaatacaaaaattagccgggcgtggtggcgggcgcctgtagtcccagctactcgggaggctgaggcaggagaatggcgtgaacccgggaggcggagcttgcagtgagccgagatcgcgccactgcactgcagactgggcgaaagagcgagactccgtctcaaaaaaaaaaaaaaaaaaatcttctcaactttgcaaactaatttatttatttaaatagaaaaggggttttcgccatgttgccccggctggtcttgcactcctgggcccaggcgatccgcccgcctcggcctcccaaagtgctgggattatacgcatgagccaccgcgcccttccgcaacctatttttaagaaagggcgccaggcgcggtggctcatgcctgtaatcccagcactttgggaggccgaggcgggcgggtcatgaggtcaggagttcgagaccagcctgaccaacatggtgaaaccctgtctctactaaaaatacaaaaattagccgagggtggtagcacgtgcctttaatcccagctcctcgggaggccgacccaggagaatggcttgaacccgggaggcggaggttgcagtgagccaagactgcaccattgccctccagcacggtcaacaagagcgaaactccgtctcaaaaaaaaaaagaaaaagaaaaagaaaaaaaaggggaaaaccaagattaagaagtcaaaagttgtatgtgatttgccaaggacacatagccttggtttcttctttgttgtctttcccttgaactataaggctcggcaagctcgagctgcattctcttgtcccccgacccccaccccgccccctcattttgttctgtcatcttgtttgcttctactttcccccttccatactctgcttgaatacactggcctcattgcagctccttcaactgggcaatcattctcttacctcagggccttttgtctggcttccaccagctagccacatacttactccctcacataatatctgctcgaatgtccccatatccgagatcttccctaaccatatttctttttccctgcattaagagacaggatttcactctgtcacccaggctggagtgcagtggcgcaatcacggctcacagcagcctcaaactcccgggcacaaatgcctaaccatatttctaaaatggtgcttctccttagtttctatccctgtgccttatatttcttcttagcatccacgtatttgtttttgtcttgtctcacttgactaaattcggtgagagcaaggaattgttttgtttactgtatcctcaacacacagtacaaagcctagtagttgacatttaagagtatgatagatatttattggatagatggatggacagcaggatttaaactcacgttaggctggttccaaaacctggtacatttttcactgcaaccaagaaactatgaagccagatccactagctaccaagccatctcagctttagaagtgagaggctggatggcttgggaaaa

SEQ ID NO: 1884789 - DNA, 4001 bp, Homo sapiens
aaggtttgcaaacacaccaatcagcaccctgtgtctagctcagggtttgtgaatgaaccaatcggcactgtgtatctagttaatctggtggggacttggagaacctttgtctagctaagggattgtgaatgcaccaatcggcactctgtatctagctcaaagtttgtaaatgcaccaatcagcactctgtgtctagctcacggtttgtaaatacaccaatcgacactgtgtatctcgctaatctagtggtgacctggagaacttttgtgtctagctcagggattataaacgcaccaatcagcaccctgtcaaaacggctcaatcagctctctgtaaaacagaccaatcagctctctctaaaatggaccaatcagcaggatgtgggtggggccagagaagagaataaacacaggctgccctaagacagcagcagtaactcactaggattttcttaccacagtatggaagctttgttctttttgttttttaggtctgcactgcctttatgagctgtaacactcactgcaaatgtctgcagcttcactcctgaagctagtgagatacacgaacccaccggggtgaactagcaactccagtacatgccgtcttaaaagctgtaacactcaggcgaaggtctgcagcttcactcctgagccagcaagaccacaaacccaccagaaggaaaaaactccaaacccatcggaacatctgagggaacaaactccagacacaccgcctttaaaaactaacaccgcgagggtctgcagcttcagtcttgcgttagtgagaccaagaacccatcaattctggacacactatcaactttgtttctccaagggtgcttcttaaactggatgatgcacaccctaggagtgtgtgtgtaggatggggtttgaagcagtagggtaaaaaacctagcatacattctattccagaggtgtcaatttaccagacaacagttattttaaaacttttttatgcaaaaacatgttatagggtggaatgcaacatttttatgggcctgtgggccatttgtatacatctttggagaaatggctatttaagtactctgcccattaattctaaacttaaaactaagacttcaaagtccctctaaggattttgctgggccacatcccaagaccctgaagggtattacttactcgccctctccaaactgccgaagtcggaagcaggtgacaaaaaagctgaccctggaatcaccttttgtaaatttcccacctccaagcttttcgatagtttgtaacactggctcctctccccaaaagcctttccttcaagtcccagcaactctccctgaccctgctgggaaggcgcaccaattacctgtcattccaggaaagctcatagcataagatgatcccattggtcatctcccagaaccagactttctgaaaagtcctcaaggaccagctagtccaatccctcactgaataaaggagaagcaaagtctagggaggtgaggtgattcgttgtcctcctaattagcaggtgagctcctggcagggctggggtttcatcttctgggctctctgcaaggtcgtgcccggcacgggccaggaacaatttcataaactcgtcatctagacggcctttgactgacaccatctctccgtgtggaggagccgctggggtgcacggggcaggtgtcgtccgtttcaaaggtaaaataacccagctgcagacctccagaggccgactagagccggggtcagaaaacaggttttccctctcggggacagcgcccaggggaccggcattagaacatcggctgatgtttcatctggtcagggaaccatccagcgcttagtacacctggcgctaatcggcggggattaatctcacaccccgcagctggcggaaagcagcgggaggaggcacctagccctggggttgagatcccagttcccgcgtgcgcaaaccacgcccctgtagattctcgctgctgcgtgttcgcgcgcgtcccggagtgcgcatgcgcagcggcgggggttgttccggctgcctttcactgaggggacccgccagtttctaactcagtggcgtttgccctgattcccggggcctggctttcagcgtagcaattctgccggcgaagaaggtgagcgcagtgctgtgtggcagcagagctccttaggacgaggagcagcgggacgaggaagggcagactggtgaaatcgcaaactgggcgtctgttccggcgccggacccctatttgcaaaggtgggtggcccgtccggagcgggaaaacattccggaagtggagggccgggccagcgtgattgacaagcgggaacccctgtgtggggacgggtaggcctaggaaggttgtgcctgcggtggaactgggcggtgcgcagaagtgggcattaacagcagccgcgtgtctgggtcttagatttggcccagctgtgttgagcttttcatggattatcttacgtagataagacactgcaacagtgagtgagcgcttgtaacccacctgtctcttacggaaactgagccccagcgatgctaactttagcaaggatacagctgggatcctaaacttggcaatcagagcccagagccgataaagttagctgcatgagtctagcttcccccagggcgggaatcgaggcggagcagggtacagtacggaggccaggaatgagtgcacttgaccagattgttgacggaagtgtcataaaaatggacttaaatgctgataagcagctgtttgggttccacacagggtgcgagctcaggatgcacgttggaggggacacagggccagagcaaggtgggaatgcgggtattatgggccaggccatcctccagctggtggagcaccgcagtactgcagtgtgtggccctggcttaacagcagtgcggaaaagcttttttcttggggctgtggtgctttccaggtgtgtgaagttaaaacattttagggccatacggtagatagtacctgccacatagttgtcttggtcagccccggctgccatgacaaaataccataaactgggtggcttagacacagaaatgtgttttctcacagtcccagaggcttgggatgtccaagatcaatgtggggaggacacaactgagcccacaacaatagtctgtactcagtaatgagtgataattggggactgaagaaaatgaacacgttaagaactaatatgttcctgaagtgctttcacaactctaacctcgttttatgagcgtgagctttgctgtcctggtgtgtgccttggcactgggaggtgatggttgtcctccacacagccaacctgaagagggctgaacaagtcactgcaaatgtttttaatagggcttagtgaatccgttatactcagatttatctaaacctctatgatttagcctgtgctgcttctggaataatgagatccataattaccactgatggggaagtgaaataatacttacgtttcttctgtattgtttagtgttgtcattctagagtttggtaaccaagtctgtcttttttatcccacttatcctggtgggaggaaaagtgaggagatagaaagtttcaggtggcttgggggtctggcagatgtggttcaaatcctgagttcaagcacttgctgagtgaccttgggcaagtcatataagtttactgagtctcagtttctttctctataaaatagagcttataaaaataccacacagggtttttgtggggttatctgaaaacggtttgaaaccattaaagaactggccatttaactaataggtattcaagtcatgggacctccgttacccagcctcggaagagaaaccttcacttacagccccgatgtctggctggctactcattcgttcatcagatttttgttgaatgcctatgaggtgtcgaagcacctagttctgagtcctggagccagagaagagcaagacagacaaggttcctctatttatggaacgtatattccagtgaggaagaataaataggttcagatggtgctaag

SEQ ID NO: 1884790 - DNA, 4001 bp, Homo sapiens
aagtcactttttaaaaatcacattactctgtatttaatttattcatagctcttagcaccatctgaacctatttattcttcctcactggaatatacattccataaatagaggaaccttgtctgtcttgctcttctctggctccaggactcagaactaggtgcttcaacacctcataggcattcaacaaaaatctgatgaatgaatgaggagccagccagacatcggggctgtaagtaaaggtttctcttccgaggctgggtaacggaggtcccatgacttgaatacctattagttaaatggccagttctttaatggtttcaaaccgttttcagataaccccacaaaaaccctgtgtggtatttttataagctctattttatagagaaagaaactgagactcagtaaacttatatgacttgcccaaggtcactcagcaagtgcttgaactcaggatttgaaccacatctgccagacccccaagccacctgaaactttctatctcctcacttttcctcccaccagggtaagtgggataaaaaagacagatttggtgaccaaactctagaatgacaacactaaacaatacagaagaaatgttaagtattatctcacttccccatcagtggtaattatggatctcattattccagaagcagcacaggctaaatcatagaggtttagataaatctgagtataacggattcactaagccctattaaaaacatttgcagtgacttgttcagccctcttcaggttggctgtgtggaggacaaccatcacctcccagtgccaaggcacacaccaggacagcaaagctcatgctcataaaacgaggttagagttgtgaaagcacttcaggaacatattagttcttaacgtgttcattttcttcagtccccaattatcactcattaccgagtacagactattgttgtgggctcagttgtgtcctccccacattgatcctggacatcccaagcctctgggactgtgagaaaacacatttctgtgtctaagccacccagtttatggtattttgtcatgacagccggggctgaccaagacaactatgtggcaggtgctacctaccgtatggccctaaaatgttttaacttcacacacctggaaagcaccacagccccaagagaaaagcttttccgcactgctgttaagccagggccacatactgcagtgctgcggtgctccaccagctggaggatggcctggcccataatacccgcattcccaccttgctctggccctgtgtcccctccaacgtgcatcctgagctcgcaccctgtgtggaacccaaccagctgcttatcaacatttaagtccacttttatgacacttccgtcaacaatctggtcaactgcactcatccctggcctccgtactgtaccctgctccgcctcgattcccgccctgggggaagctagactcacgcagctaactttatcggctctgggctctgatcgccaagtttaggatcccagctgtatccttgctaaagttagtatcgctggggctcagtttctgtaagagacaggtgggttacaagcgctcactcactgttgcagtgtcttatctacgtaacataatccatgaaaagctcaacacagctaggccaaatctaagacccagacacgcggctgctgttaatgcccactcctgcgcaccgcgccgttccaccgcaggcacaaccttcctaggcctgccccgtccccacacaggggttcccgcttgtcaatcacgctggcccagccctccacctccggaatgttttcccgctccggacgggccacccacctttgcaaacaggggtccggcgccggaacagacgcccagtttgcgatttcaccagtctgcccttcctcgtcccgctgctcctcgtcctaaggacctctgctgccacacagcactgcgctcaccttcttcgccggcagaattgctacgctgaaagccaggccccgggaatcagggcaaacgccactgaatttgaaactggcgggtcccctcagtgaaaggctgccggaacaacccccgccgctgcgcatgcgcactccgggacgcgcgcgaacacgcagcagccagaatccacaggggcgtggtttgcgcgcgcaggaacttggatctcaaccccagggctaggtgcctcctcccgctgctttccgccagctgcggggtgtgagattaatccccgccgattagcgccaggtgtactaatccctggatggttccctgaccagatgaaacatcagccgatgttctaatgcccgtcccctgggcactgtccccgagagggaaaacctgttttctgaccccggctctagtcggcctctggagatctgcagctgggttattttacttctgaaacggacgacacctgccccgcgcaccccagcggctcctccacacggagagatggtgtcagtcaaaggccgtctagatgacgagtttatgaaattgttcctggcccgtgccgggcacgaccttgcagagagcccagaagatgaaaccccagccctgccaggagctcacctgctaattaggaggacaacgaatcacctcacctccctagactttgcttctcctttattcagtgagggattggactagctggtccttaaggacttttcagaaagtctggttctgggagatgaccaatgggatcatcttatgctatgagctttcctggaatgacaggtaattggtgcgccttcccagcagggtcagggagagtcgctgggacttgaagggaaggcttttggggagaggagccagtgttacaaactatcgaaaagcttggaggtgggaaatttgcgaaaggtgattccagggtcagcttttttgtcacctgcttccgacttcggcagtttggagagggcgagtaatacccttcagggtcttgggatgtggcccagcaaaatccttagagggtctttggagtcgtagttttaagtttagaattaatgggcagagtatttaaatagccatttctccaaagatgtatacaaatggcccacaaactcataaaaatgttgcattccaccctataacatgtttttgcataaaaaatttttaaaataactgttgtctggtaaattgacacctctggaatagaaggtacgctaggttttttaccctactgcttcaaaccccattctacacacacactcctagggtgtgaatcatccagtttaagaagcacccttggagaaacagaaagttgatagtgtgtccagaattgatgagttcttggtctcactaacgcaagacagaagctacagaccctcacggtgttagttttataaaggcggtgtgtctggagtttgttccctcggatgttccaataggttcggagttttttccttctggtgggtttgtggtcttgctggctcaggagtgaagctgcagaccttcgcctgagtgttacagcttttaagacggcgtgtactggagttgctcgttcaccccggtgggttcgtgctctcactagcttcaggagtgaagctgcagacatttacagtgagtgttacagctcgtaaaggcagtgcagacctaaaaaacaaaaagaacaaagcttctatactctggtaagacaatcccagtgagttactgttgctggcttagggcagcctgtgtttattctcttctctggcccaacccacatcctgctgattggtccattttacagagagctgattggtccattttacagagagctgattggtctgttttacagagtgctgattgatccgttttgacggggtgctgattggtgcgtttataatccctgagctagacacaaaagttctccaggtcaccgctagattagctagatacagagtgtcgattggtgtatttacaaaccgtgagctagacacagagtgctgattggtgcatttacaaactttgagctagatacagagtgccgattggtgcattcacaatcccttagctagacaaaggttctccaagtccccaccagattaactaga

SEQ ID NO: 1884791 - DNA, 4001 bp, Homo sapiens
gagttccttccgagaaggcaaaagacagctgagcagggcaagaaagccgtgcctttgggaggagcagagttcatggtctaattcctgttgctttagcctccgattgttacttgcggggagagccgataacatcggatgggtacagggctgcggaactggagcgccttggctatttacactgacctggaaaatgtcaggataaatgacagaaggcgggggttggtgactgcactccttctagaagtctcaacgctttgtgggtattgagttgtgttttttccccctcacggttgacttgtcactaagtcactaaggatggcctgtaaatggggtgacggctgggggaagggaggaccttaaagtgagacaggcacccccacacaggtcacagtttaaaagacgatggttcagaccgttatgcgaaatgatctcagagcggctgttcaccttccccaaagctgcattaaaagaaataaggatgggtgacaacccctttagaagacagacccccacactgaggctagccctcttatcggctggccagggcgaggaggggtgtgtgcagggtcgccctcgatgccgcagccggggccagtgggcacgaatgcggccccacgccaggcttggcctccgaacccgctaggcgcgcgcgcacggtagaagcgcgcgcctccgtccctcgcgagcgcgccccccacccctctccgtcgcacgcgccgagccccggcgcccccgcccgccccgcgctcccacagcccgagcgccgctcagctgacccgcgggcgccagacgcggcggctctcagctcgcgagcgcagctgcggctgcgagggcctctcaggccgacactccccccgcgcccctcccccacccggccgggctccggacccgccgcgcgcgagcccgcggccgcttcccccgcgccgagcgaggaggcaggctgcggcggcgagaggcggctgcgcggccatgggcgcgccagtgtcgccctagggcgggcgcacagaccacagccggagcggtggtggcagcctccgcagaaagccttcccgggcggcggcggcggcggcccctggagcagcgcggccgggatgagcgggagctgcgcggcgcccggcccgggctcgggctcctccccggccgcctgccgcttcgcgcactacttcgtgctgtgcgggatcgacgcggacagcgggctggagcctgacgagctggcgggtaaggccagggctgcggcggcgctgagccccctcaggggcgcgggggacgctgtggggacgcgcgggaggcggggtgcaggctccagacaaagtcagctcccggtggcgccctcccgccgctttctggccgaactggcgctcgggcgcgatttaatgacattgttatttattccgcgtgcgggctttgcggctgcgcccaccggggctttcgcctccaggcgctgggttattaataacaggcgcgggggtggccccaagggcacggaccccgcctggcgcgccggccccttcgcttgcagccgcactcggaggcggccggtgagtcaccgggcgcgcgggctgccccccgaccgccgtgcctgcctcccacccgccagccacccggccccggccgcgaagtttcggccccgcacgtgacgcggctttcgggcctcttcgggagacggggagtcggactcagctcggctcccgccggggtagcgtccgcggaggagccggtggccgtgcggagcgagcgcggggcggggaccggtcggactctgccctctgcgccgcctgccgctctgcggtgccggccaagtcaccttttggaatcctgtggatttggccgcgtctgggagctggcagggacctttggacgctcgggacccagcaccgcgctttgttgacactgcctacactgttcccgagtttaaattcagttgggtgcaccgtgtgttagtgcctggttttcccggaggggtaccggtccttccgcttgactcatttgatggcgcagtgcggggctgtgctgggcaaacgacgccgttaaaaggggccgctaaagggcgatgggcgggggcagggcagcggagtgcgcagtgtcgagaggaggccggggagaaacaactgatttcatttttcacgcctgttcctttctgcttgcctccgcgggatctgaatcttgatttgttgttgttgttaaatgggtgagagaagtgacatctaccgcctgaactttgtgttaaagacttaggtcatagcctttcagaacaacttcctttggacaaataattccttattgattgcactaacgtaaatttttcgcttttcctttggtgggggtggggagactgggaagaatatattaaataataaacaatagtaaacaaaactgttcagccttaaaatacagtccccatcaacccacgtcttggctatcttcttcttaactcagcttcagagcaaaacattttctttttttcatattcttcggaggtagaaacacaaaacattttcaacaaaaactgtaagtctagttttagttaaaaaaaaatttggagagataatagaataccaagtttttccgtatgtgtaattatgtaatcacattgtttcttcaactaagatttcatgtacatgttaagaatggctttgttaaaggatatgaagaaaaaatgtctgcagagagatttggagagattcttctcgagattggtgaaggaatattgttatttttctagactcctttcttccctaaagatcctaaacatttgtggcaccagggtcacttggaggccttctgtcagtgatgactaatgaaaggaaaaaagcctgtatttttcttttccgtttgcctactgaagctaaaactgtaccttttaggtgtgacctaggactctttaggcacagagagaatgatgttaacaaaaccatcaattagactttaatgcatttttaagaaacaaactatgatgtctctttttgcaaaactgtgtgagtgtgggtgattgggatttctgcttctcataatatttaatgtattcaggtaataatgtattttgccttgtaatatttcagtatcattcatccaacagttttgaaagcatctatctgtagtcggttttttaggcactggggacagctgtgaagaaagcagtcagaaatccctgccatcatggagcatacgttctagtgtaaagagataatgaaaatacaatcatctctccgtaaccatgggggatggattctagagtgtcccccacaccaaaatcctcggatgctgaagtctcttataataaaatgttgtagcatttgtatataacctatgaacattttcctgtacactttgtcatctctagattacttacaatacctgttacgttgtaatgttatgtaaatagttgttatactgtattgtttagggaataatgacaagaaaagaagtctgtacatgttcagtacagatgcaaccattgtaggcctaactacattttcaatctgtgcttggttgaatctgtggatgcggagtccacgtgaagtgccgactgtatatagttctccagatgttaataagtgctatgaggaaaaataaagcaggggagtggatttagggacatgccagcagagtggtgggatggtggggttgtgattttaaataagatggttagggaaggcctcacagggagggtgacatttgaacagagccttgaaggacatgaggaagcaggccagatggatcacctgggggcacagcattgcacgcagaagaaacagcaagtgcgaagaccctgagtgggacagtcactagtttgtgctggtaacagcaaggagtccagtatggctggagctgagggagagggagagtagtaggtaagatcaaagagaaagggcaggggagattgtatagggcctcatgcagtttttaggcttttaactctgagatgggaaagtattggaaggttttgagcagagtaatgacaagatctgatgtgccttctaaaatgactgttgtggctgcca

SEQ ID NO: 1884792 - DNA, 4001 bp, Homo sapiens
ccgtgctctctgaaacatgtgctgtgtcaactcagagttaaatggattaagggcggtgcaagatgtgctttgttaaacagatgcttgaaggcagcatgctccttaagagtcatcaccactccctaatctcaagtacccagggacacaaacactgcggaagtccgcagggacctctgcctaggaaagccaggtattgtccaaggtttctccccatatgatagtctgaaatatggcctcgtgggaagggaaagacctgaccatcccccatcccgacacccgtaaaggttctgtgctgaggaggattagtaaaagaggaaggaatgcctcttgcagttgagacaagaggaaggcatctgtcacctgcctgtccctgggcaatggaatgtcttggtataaaacccgattgtatgctccatctactgagatagggaaaaaccgccttagggctggaggtgggacctgcgggcagcaatactgctttgtaaagcattgagatgtttatgtgtatgcatatctaaaagcacagcacttaatcctttacattgtctatgatgcaaagacctttgttcacgtgtttgtctgctgaccctctccccacaattgtcttgtgaccctgacacatccccctcttcgagaaacacccacaaatgattaataaatactaagggaactcagaggctggcaggatcctccatatgctgaacgctgcttccccgggtccccttatttctttctctatactttgtgtctttttctttcccaagtctctcgtcccaccttacgagaaacacccacaggtgtggaggggcaacccacccctacagatatatttagggctgtttgcatatgtttatagagtatttagtttactctaaaagatgacaagacagctcccctcagtgagaccctggcctaaatatatttgctttatttatatagcaagaggataacattaaacgtggaagctttcaatttgtggcactgaatgatgatctacacagggcatccttcaaaggctacaattaaggatccactggccaggcatgctggctcacgcctgtaatcccagcactttgggaggccaaggagggcaaatcacgaggtcaggagttcgagaccagcctgaccaatatggtgaaaccctgactctactaagaatacaaaaattagccaggtgtggtggcgcacgctataatcccagctactcaggaggctgggcaggaaaatcacttgaacccgggaggcagaggttgcagtgagccgagatcctgtcactgcactccagcctgggcgacagatcaagactccatctcaaaaaaaaaaaaaaaggatccacctaacttttcagcagtacaagcccgattgagatcttctggtccgtttgtttgccattcatgttttatgccttgaaatttctttttgattgcatccttggagcttgtatagatcattttacttttcaaaggtgctagttctgatgcccacaagaaaacatcaattcttctggattcttttgtttcaaagcttgcatcatacaaagcatagcaacaatctttttcaggaagcattcccacaaaatgcttgaaaggctcacttatagttacaccaacatctccaaccaagatctctttgccttctacatgatgcactttttgtctgcactgagacaaaaaaatgacagcctttgttcttttcttgatttcttctggtgtggagcatttacgaactctcatgtcataaaaaatgcgacacacttcatcagcaacttgcactcctgaggcacgttgttcagagttctgctctgccgagcttccagtctttacattcaatttcctatctcacatctccagttgtatgtctcaaaggcatctgatgcacaacaggtcatcttcgcccaccaccacagggacgcgggggagggagccggcgggtagtgagtctgggcagcgtcctcctcgtggctgcgggactgagagggcgggtagtgagtctgggcagcgtcctcctcatggctgcgggaccgagagacccagcgcgaagctgatgcagcggctcgagcctacccgttttttttttttttaagcgtcctcttctacagcttccttggctctttgtgcctatatgccgaagagctgggcatttgcatgggccatacagagactaacaaggcctggaagttttcctcctagtcagcgatgactctggctttctccttgtagacattgccgatgggcatttctggtcctgtcagctgagtatccagttcgagttcttcagcagaactgtctcccttcttgggggccaagggcttcctggggaagaggatgagtgaggagcggtcctccttcagcctctgcaccttggcctgcagggcctgggtggactggttcctcctccttgcatcctcagagatgccaatggtctgggccaccttcttgtaaatgccagccacccttaactcctccaagctgaggcccctgccagcttgtgctttgtagtgatgcctcagcatggggcaccttactatgggtggatgggcccatatcagtgggccatgcagcctgcttttgctggccaccttgcttctgcaggtctgccccatgggctggctgagccacatggccacaccactgccagtccttgtggaagttgggcttcaggatcatgccattccggctgggtgccctgcctccctccagcccagggggtagcgaaagagaggagggagcaattgagggaccacccacagccatgtgcactcacctggccactgccaccgccctagtcctccagcctggccgcgcccacagatcctggtctggcaagaggccttcttcgacaatgaagaggccccagcttgggccgaggtccctctatggctccgttggtgacaatgctaggcctatggcggtggacagagcccgatgacccccgacagtgctggaactctgaatgatttaatttctgaataaaatgtccctatggaaagaaatcagaaaattgcatgtggttaaatctatatgttgtaatcccttattacccagcaattctgcacatagttttgcacccaagaaaaatgcatgcctagctccaccaaagacttgtgaaaaaagttctctgaaaaggaatttggttttgttttgtttattagtttgtttgttttaaaagacagggtcttactctgttgcccagtttgtagtgcagtggcacattcgcagcccctgcagccttgaactcctggactcaagcaatcctcccactttggcatcctgagtactaggactacaggtgtgcaccatcacccaactaattaaaaaatttttttattggccgggcccagtggctcatgcctataatcccagcactttgggaggccaaggcgggtgaatcacctgagatcgggagttcgagaccagtctgaccaacatggagaaaccctgtctgtactaaaaatacaaaattagctgggcatggtggcgcatgcctgtaatcccagctactcgggaggctgaggcaggagaatcacttgaacccgggaggcagaggttgcagtgagccgagatagtgccattgcactccagcctgggcaacagaaaaaaaaaattattggctaaggaggtctcgatatactacctaggctagtccccaactcctggcctcaactgatcttcccatctcagcttcccaaaatactgggatcacaggctgtaaaggaattcagagggaagagactttattccagtgaacagtgtgtaaaccagcagcattccccaatttggaattttttttttttttccaaaaaataaagctctcctttgtttttcttctgcaggcctcatggtcttttgttaacagacttgtacagtaatgtacatggcaactttataatggtggaaaactggaaacaatttaaatatccattaacaggcccagtacagtggctcacatctgtaatcccagcactttgggaggctggggcaggtggatcacctgaggtcagg

SEQ ID NO: 1884793 - DNA, 4001 bp, Homo sapiens
attactatattatgatgatagtattattatagtaaaaattaaataaataataacaggggtagtgtagtgtagatatggaaaaaaatcatgaggatgatttaggaaatttccctggggtttctacttagtggagtcaccgtggctttactttagtgtcatttgcatttccagggtcctcacttgttgtcaacctatttcttcctcaagagaggtactatagtaatattataactcctcaaaccctgaatctcatcattagaaacatggaactggaaaaagctgttgatttaattgatatgcatatgttgaacctgaaaaggttctaattattgccatttttttccttttttttttttttgagacggagttgcccaggctggagtgcaatggcgcgatctcggctcactacagactctgtgtcccgggttcaagtgattctcctgcctcagcctcctgagtaggtgggattacaggcacgtgccaccatgcccagctaattttgtatttttagtagagatggggtttctccatgttgatcaggctggtctcaaactccttacctcaggtcatccacccgcctcggcctcccaaagtgctgggattataggcatgagccaccgcacccggcctattcccatctttttctttctggagttgtgtgcctctgctcaaattgttttatttttattttttgagatggggtttggccatattgcccaggctggtctccaactactgagctcaagcgatccccttgactcggcttctcaaagtgctgggattacaggtgtgagccatcatgcccagccacaaattgttttaaggagtaatgagagtagatggtcagaggaaaatgtagaaatgtaaataggaagcttccagatacatgattaacctgataacttatttatggaggttcgaaaaatacattataggcatttcagagctggttgttcaaaaccttgctgtggcctttgggatagttgtataaactgacaattattgataagattcattgatcatttactatgtgcctcacattgtgctgagagaacttcaaatgtttaatactgctaacaagcgtatgaactggtttccttttacatttagtcctcctttacttaaagaagacattcaaatagctagtaaatgacagtgctgggatttaaatccagatctgacttgtccctcaactcccccaagatcttgcttttttaaccacttcgtgtctcctccctaagccagaggggacgtcatctctctaacggccgctttttcgtccattagaatacctcctcctcagagataaatcccaaccaagaatctctcccacacaggaaagactgcctcacctgagcaagaagcttcaccctggacaaaaaccccggggctcaacactcccaaatccacccggatccccatccccaaccccttaaaggatgtccgcattgcttggcagagaccccactcttggggataatcccttaattcgtaaggaaacaccctccctccttgaagccctccctcaatcctgaggatgccctcccctaaatatttcagagcagaaccgactacaaatggggcccagtgcaaaatgaaaacgtaagggtccctcctgtgagactgcactgctggtttacccacgaagccggccctgcttcagagataccctttcagtaaagggagaggccacctctgtcgtaatcctgctaacctggggtgcgagatcatgcgacctgtcgtggtgggggggcgggggggtgggggcaggaatggccaccaacttctagagactgttgttcgagaacacaccctgggacaacctccgtgaatttggaatcacttcccttggccccggcagaagctcccttcctacctctccagacagctgggtggtcctcgtaacccggccggggctccaccttctgggtgtgtgggcctcgtagcgtgcggcccattgcccgggcaaccgacgccgtgagcggtgcattgtggtctgcaacaaaatgcaggagaaagatcctgagggaaccatggagtcaatggaccaatggaagaatgccgtgggctgcgtcaagccaatagggtcgcgcggcgaggggcggggccggcgggagcagggcggggcctgagcactaggcggcggcggctggcgtggggctgcttagatgcgccacggtttcggtagcgacggtatctctagccgggcctgagctgtgctagcacctcccccaggagaccgttgcagtcggccagcccccttctccacggtgagaaactcggggggccagggggtgtcctcgctgccttatttcgccccactccggacttagccctccgcgtagcccgcgcttcctgagaagtggggtggggggcgtcgtcccgtggtggcgccggccggggtgggggcagttagtgcctggggggcgcggcccaactcaaccccttaccccaggccttgcccactaggtaaccatgtgcgaccgaaaggccgtgatcaaaaatgcggacatgtcggaagagatgcaacaggactcggtggagtgcgctactcaggcgctggagaaatacaacatagagaaggacattgcggctcatatcaagaaggtgaggatgggcgcgggggccgatacgcagccgggagcagggggttccttccccccgatcctgctttcctaagggcgcctgacaggtcccgggaatactgctggcggcttggggcgtagaagcttccagaaaggacgcagatgcattttgcgctcctgtggagaagaccagacccccggcgtccgaagtttttttttttttttttttaattacccagctccgcggggggaaagcgccacctagcaacggtatctaagatcagggagcagcggttcccccttctgtgtggttcctgcgccgaggatccatctgggtgttccggaggggggagctgcgtgggtgtttccagccgggccgggaggagatcttgccagccttccagtggggagttgagggaaggtggtgggtggtggcggggctgggggctggggtaggggcttggtaaatggcagtctagaaagccggcaggactgccaacttctcgagcagtgtttgctggaagggaagaaagctggcagcctaagccgtgggagggttccagtcgagaatgggaagatgaaagacttcagatggaacagaaataaatgccttttttgacaaacgcagcagtgcgtgcctctagcttgcaagagcgttactccccttcatagctttaaaaggttttcgcactgcgtgcagttagagtagctaaatcttgtgtgacgctccacaaacacttgtaagaattttgcagagaaagataaccgttgccacccaatgccccccacaggcattctactccccagtacctcttagggtgggagaaatggtgaagagttgttcctacaacttgctaacctagtggacagggtagtagattagcatcatccggatagatgtgaagaggacggctgtttggataataattaaggataaaatttggccagttgacagattctgtttccagcagtttttacagcaacagtggagtgcttcagtattgtgttcctgtaaatttaattttgatccgcaatcatttggtatacaatgctgtttgaagttttgtcctattggaaaagtcttgtgttgcaggggtgcagttaagatctttgtgatgaggaatgggatgggctaattttttgccgttttcttggaattgggggcatggcaaatacagtagggtagtttagttctctacacagaacatgataaactacacctgttgatgtcaccgtctgtcaatgaatattatagaaggtatgaaggtgtaattaccataataacaaaacaccctgtctttagggctgacctttcgtcctttgacctcctcagcctccattcccatcttcgctcagactgcaagtatgtttgtattaatgtactatgtaggcggcttggagctggggaacattctt

SEQ ID NO: 1884794 - DNA, 4001 bp, Homo sapiens; identical to SEQ ID NO: 916164

SEQ ID NO: 1884795 - DNA, 4001 bp, Homo sapiens
gatctcagcttaccacaacctccgcctcctgggttcaagcgattctcctgcttcaacctcccaagtagctgggattacaggcaagcaccaccacacctggctgattttttttgtatttttagtagagacgggtttctccatgttggtcaggctggtctcgaactcccgacctcaggtgatctgcccgcctcagcctcccaaagtgctgggattacaggcataagccaccacacccagcataaataataatttttaaaagtgcattagtttagcaaaaacgtgacagggatgtcagtgaaacacctttgtgttacaactgtcattttgtacaccttggacaattccattcaacgaacaatttagttagttttgaagtctcaataacatagtcagaaaagaaactgctgtaatctccccttatccatggattcagtaaccctcggtgaactgcagttcaaaaacatgtgcgtacaatacagtaagatattttaggagagagacatcactttcacatgacttttattacagtatattgttacgactgttctattttattattagctgttattaatctcttcctgtgcctagtttatgaattaaactttatcgtagatatggaaggatgcataacaaaacagtgtatatagtgttcactactatccttgatttcaggcatccattgagggtgttggaccgtatcccctgaagataaggtggggcgactgcacgtggattgagaggtgccctcactgctgcagagctgtggtaacaacactcacttgtggttcccagacaagactctatctggtcgtgagcccccaacagccagtggtactgctgtccaatctgacagatggaaaccagcgccaatcagcctgcctggagcggcacaaataagcctaagactcaaactttcagccagttaactgtaagtaaaccaactttttggtaaggaggaaatactcacccagctcttgggcaagataagtgtctttattataaaaggcgtcaattcgcagcgtctttactgtaaaggtggtggtattattagattcttcctttccactaacacaaaactcccagtgccggaaggcccttgtcaggagcaggacccgcggaggggtccgtggtcagttctgggacagctgccgagcagcgcagcgcgtggaatcaacttcactgctcacgtgcagcgcacactaagcgcactcgtctttcctggagtgcagaccaggccccgacctcagggatcaggacagcggggccaaggggtcaagaggcagaggcggcgtcagcgccgtagacagcggtctcgcgaggctggaaccaggcgggcggcagtgacgggggtgggcaccaggggactgggtgaagggtcatgaggggaggggcggttaccgggccagacggtcacagggatcgtgtcaccggggaagggctgggaggtcgggggtttgtgtcacgggatgggggggagcggtcaccagaaaacggggtgatgcgggagagggggcggaggagggaaggcgggaaaacggcagttgccaggtggcggggggaggggtcgcagggggaggggtgggcgctcacgggcgcagggtcaccgagggatgggtgggcgtttgcggggggtcatgtcacgggggagtgttcactgagggaggtgggcgttcacgggggatcgtgtcacggggagggggtccctgagggaggggtgggcgttcgctcagccggggtcaccgggtgatgggacggagagaggggagcgcgcggccggggagcctcgagggtaaccggcggatgtgggcggtcgggggccgagggtagggccaacccctcacgcccgccacagccccggcagcggatacgcgggccgtcactcaccgcggctgccgggcgacgcagccaagggctcccggcgcggatgagcgctgcgacagcggaccgggcggcgaggccactacaaccgaccaaaccgaccggccgacgcggagccagtgcgcaagcgcgggagccggcccggcactgcgcaggcgaggctcggaccaatcagcgcccagcggacccggagggacgtggcggagggggcggggcggagggggcggggcggatagggccgggcctcggtccgcgccggcgcgcgcctctggctccgcccggaactagtttgttcattcattcgcacgtgggcactgagttgtatttgcccgccctcccgccggacacctgctgagcgctggtcacactgacaagcacagctagcggctcccctcgcgggccctacagtctaggcggggaggatagataaacatgcagttagaagagcaccaggcaaagcagccgggatggggcaggctgaggtctgttttaaattgggcaggggagtcggggtgcctagggagatgagatgttacgtgggatccgaagatccacaagactcttgcctgtgaccactgaaatggtgggacatgtccctggtttcgtcgtgtccactgtagacgggtgagctttggagctgtgcatcaggcgccttccactgcataacctgcccatctatttaagagtgaaacccgtatcacttaccacctgtccatttcttcatggtacttatcccctgaattattttatctgacctgctaggatgcaacccccttttttattttgctggcaagtatagcctagttgtctaaactgccacatagtatgtactttataaacagctgaataaaccagtaattcatccatctctctgatcagctttttttttttttttttttttttttttgagacggagtctcgctctgtcgcccaggctggagtgcagtggcgcgatctcggctcactgcaagctccgcctcccgggttcacgccattctcctgcctcggcctccccagtagctgggactacaggcgcccgtcaccacgcccggctaattttttgtatttttagtagagacggggtttcacggtgttagccaggatggtctcgatctccagatctcgtgatccgctcgcttcggccttccaaagtgctgggattacaagtgtgagccaccgtgcccggccagctttgattttcttaaacagccaagtgttgtccttccgccactccagcactagtggtaaagttggcatgaaatatgctacattaaatattcattgaatagggataaaacagagccacactacagctggagaaataagacaaatactgttgttcagcccaagatactactggaggagaacactggggagaaatgaataaatgaatgaatgaatggatgcacacttagttaagtgggagtagtcttcaaagtaggagaaatactttacaacaaaggagacgagcacaaagtcagggagacaggaaaggctgcacagggggcagaacgatgctgctctgggggctggtcggagtgtaggtggctacacaagatcaggcaggaggtcggaaataaaggttcccgagtaggggaccatgtgacaaaaaagctgatagggccttattttaaaaattaattcatggccgggtgcggtggctcacacctgtaatcccagcaatctgggaggccgaggcgggcggatcacttgagcccaggagttcgagaacagcctggccaacatggtgaaagcccatctctactaaaaatacaaaaattagccaggcatggtggtgcgcgcctgtaatcccagctacttgggaggctgaggcaggagaatcgcttgaacctaggaggcagaggttgcagtgagctgagatcacgccactgcactccagcctgggcgacagagtgagtgagactgtccccacccccaccccgcccccaccacacaaaaattcatgcacttggcaaactacctgaacagttaaaaggacgcgcataacagtgcagatcagcagccttgatccttgccccccagtctctccctccacagaggcagtgctaacacaacgtacaatcgtccctcagcacctcccatggatgccaaactccgagagg

SEQ ID NO: 1884796 - DNA, 4001 bp, Homo sapiens; identical to SEQ ID NO: 916181

SEQ ID NO: 1884797 - DNA, 4001 bp, Homo sapiens
tagcactaaatgcccacaagagacctctgcctgagaacgtgggtttcagcctaagagttgtaatatgtgtgcccattcacaggtgctgcatcagagtcccaggtgggaagaaggcaagcatacacaaaaatggtaaaaggcagaaaggagcccagtctcgttctttttaagaagttttcctaagaatctccacccagcgacttgctctcacatcttcttggccagcactggaccacacaacttcttctagatacagaggagtcctaggattctatgagaaagaaggggagggtgggcaaagggcagccagctgtgcagcatctgctggagacacctaacccttggtggaggggttgtggtgctgggagaaggctttctggacggtgtgacagcagagataaacttaaaggccaagtaggagttaccctggtgaagcagggcagggttacaagcattccagcaacttgaagcagcaggagtgttttaattaaaagaaggcagttgctgtaaccaactataaacaaataaaggcttaaacacaatggaagtttatttctcactaagggaacatccaaatccatgatactttaagtcagggacccaggttcctcccatctatggttctgccatcactaatctgggtcttccacaattgccgtgctccttggaggtgggaagagcaggtggaggacacgtgggaggttttagagacaagcctggaggcagcatgcgtcactcccatgcagagtccattggccaatgctggctccgatggccacatctcactgcaggggcagctgggaaatacagtctggctgtctacccaggaggaagagcagccagtttctgctgctgatgatcaggaggtagagaaaatgttcagtcgggcagggagtgggaatagacaagaccacaagcagcttggtgcctctgaaagggagaggggtggaggggagactagagaggtgggtaggaatactggattccactgaccacatgctggatgtcacgcttagccctcctgctctgtgccgggttaggcacctggtgttttacgtacataatctcaattctgtgagggcatccgacctgtgggaaaagagctgtttgtttcaaatgctactcctgcttcctaacaagtgtttagagcttaatcgtgttcaaaatacatatacaatgtttaatacttacaagaatttggcggggaaaatattaccatctttcccttttatgattggagaaaaatgaggctttgaagggtttaagaacttgcccaaggttggccaggtgcagtggctcatgtctataatcccaacactttgggaggctaaggtgggaggatcgcttgaggccaggagttcaagaccagcctgagcaacatagtgagactttgtctctataaaaaataaataaataaataaataaaaagaacttgtccaaggtcagacaggcagcctcttagtaagcacacatatcctctatattatactacctctcatggaggatctcctgtgttctacaaatagtctggacttgagccagaatgtgttataatcctgggatcacagccagtgggcttagaagaagccatctctttctcatgccaagatgaggctcccccagatttgctcagacttacctatagtcagcagcatcgggggtcaggaaagacttcatgaagccataaatgcatccttctcggggcagcacctggctctcccaggtgagagaggaatccattttcacaggcaggtgtgggagcttcagcacccatctctgggcccagaatgacccactggagaccttacagctctcctgtcacccccaattcctgccccctctgcagccttggaggagaatggagctgaagggcctgccctctgtagggtgagaaagggaggctaaagcctggtgcccactgccctggctgctccgcattgcaggagctgcgcccttcctttcctggcacagggtccacagccccgaaaccccgttgtgtgggagctgggcacagggcagcaggactaatccttggaacagctcagggaggattatcccagccactgtcagcagcggtgcagctggctcattcccatatagggggaggccagagccaggggcctgccacaagttggaaggctggggaaggggaggccagcagaggtgtcctggctgtgggtggctctgagggggctctcaggggtggggctaaatctcaggggcaggattatgtaaatcaaaccaattctagccacagatttaaagtttggaaaaaaaaaaaaaaacccagcctggcggaaagaatttaaattataaaaacttagaagtatggaatgtgaaatcatcctgtaggtgcttatttaacaacgaaatcatcccgacacaatgagccatatgtgaaaagtcctccttccccaacacatcccccaacaggcactcctcaaacctctaccacccaagtgctggcatcctccctgtcctgcttcacctgagacaccccttgtctcattagacatgcaactacgggaggggtgacaggaagacaagacactatttcctcaggcccagtttggtgtggggagaaagcctcctgatcctgaaagcaagaatttgaccagagcagaagtaatcagtatgcagattgactctgtggtatgttaatgtttatgcatagattatgaggactagatgaaaagtgggccaggggagacagatgtgtgtgtgagtcatgggtggctgagatggggacaggagggaaactggttcggaggctgctggcgatgggatgggggtgccaggaggaagggaggcagttgtttgaatgtctgcatgaaaaagcggaggacggcggggtctgggtgaattcgggcaaccatttggacggtggagaaaactgcctgcgtgcggctgaggacctgaactattaatttgttttttagctaatgcaaagataaatataaaaactgatactccatccagttaccagaaaacatttaggtatgtgtgagacaacttgggtatgtgaacctaccttttcaatgtaaattcagtgaaatctaagtacagatcccatatttccaataaaaaggtaacatccaaactcagatgtcctatgagtataaaatacacaaagatcttctggacttagtatgaaaagggattttttttgtcaggtacctcactagttatttttaaaataggattgcatgttgaaatgataatcttttggatatattgggttaagtaaatgtattattaaagttaatttcacttaaaaatgtttaatgtagctactagaaatgttaaaattaagcatgttgctcaccttatgtttctattggacggctctctctagatacaaaggctgccaagaggtacctcactctagcttcagggagaagagaggaattagcaaggccaagcagaagctcctgagggcagagccaagggcggcttggtggggtggggatgggatgcacagagataactccaacccttaggaaggtgtttcctagagcaggctgtgacctgtcagtttatacactgaggcttaggagcctcttggatgcctccagatctgcacccctgaattgccctgtgcccctgccgtctttgttcctgtgctggcatagtggtctcacctcaggcagtatcaccaccactgggcacaagcttctccagcacagcaactgtgtcttatttctccttgtactcccagtgttcacaccatgttgcactcacagaagactcttcggtgatattttgtggacagagagaatgcctgtgagagtgggctgaagtgtgcgttgggctccagagaccttaaggaggggagaccaggtcctgagtaaagttgaaggggaggggctgagtcctgctagccaggagtctcatcccctggggaagttccagggaccctcagaagtgcaaggggacggtgttagtgttagtccagtaacacagcccagagcctgccttccacgtgggtttgacaggaacct

SEQ ID NO: 1884798 - DNA, 4001 bp, Homo sapiens
aaatagtattgtctgtacagcagggaggtatctgacttgttactgctctatgccgattgcctagtccaacatctggacaactgaattaattaagcagaatcaacagctctgtcagtcttgagggcagctgagggaccactgaactaagagcttccaagcatggggtagtatgcagggggcagggcacataccaataccatcttcttccaacactggagcatccagcacacagcacacaggtcctgtgatgggatgactctgagctgagtggggggtagcacttagctttagggtttaatgcagctggcccacacccaaatggctgcaccagttgctcacagctggcatcagggcccatgcagtaaaggtcattcagtgctttgaatatcacccaggggtgctctataaaatagctaatgtgggtttgaatttagtttctatcctgcacaaaaatgagatgtcataatggacccgtgacttaggcttcatcatatattcagctaatgtcatgatctgtgatgtttggacacttctgtgtctgcccctcaggagcatggaggtgatgtgctgtgacacgagtggtggaatgcttcactggagaaggggatgtgtcctgtgctgtccctgtgctcgccacccacactcccctcccagaggaggcacggtgcccagcctgcaaactcaccccagtcacccagccagcggagaatgtcatacaggtgcttctccttcatcatagcatctttggagaaggaggcaattttttccagcaagatgaatctcttcttgccctttggatctctctgctgagatttggcattttcttttaaatcatatcctaattcttcctggaagcggttgatgacacaattgacattgtccaaaatgtctgagagctgggtagaaatatcctatagagaagcagcagattgtagtgttagggctgtggacttgagccagaagccacatgctagcagcgtgaccttggacaagtcgcttagcctctttgggtctcagttttcttatatttaaagtgggaatcattatagtacctatgtcacagggtttctgtaaggattaaatgaattaaatattttaaagtgcttttaatagtacctggcacattacacaaaagtggtagcttttattatcattgtgattattaagaaggtcaagaaagtatagaacaccaaaaccccacagcaaacatttctttagaatttcagaggttgctgggggtttctggatgtctttcctcacaaggatccacaggcaacagaagcttggaaaagtgaggccccaagaaactctaggatcagaggctcaagtaaaaaatgtactagagcctcgtgtacagggtgatttgagcctttggacatttccccaacccctatgaacttcctgggctcagcttgggggattctggagggttgccaagaacagattctgggtcctttctcctgccctctaaaacccaccacaccaccacgatgtgcctcagggctatcctcgagcttcctgcccccttcccgggccccagccctgcctcaggcgggtggttgctttcagctcaccctgtatatgccaagtttaggagagagataatttatactaatctgtctgcagacccaggttgctgaatatcccagggcctctgaggacccagagctggaatctcactcaaacctgggatcagcccccagtctccgcatcagatcccaatgtaagagtgattccttcatctcaggggctacctcttgagcccgagttagctgggcagcctcaatcctcaggatgatggctttcactgatgtgggagtcaccaactgtggggggtcatccttctccattttggatcactctgtcagtcacaaaacatcctgtgtttctggtccacaggcctggacacacaatgttgcctgctttggaggttaagggcaccagggtgtctcctgggtaccctctgcccaggcacagctcctctggtaactgccaaacaccaggttccaactgatcctcttttccccagtgacatcatcagtttgattagaagaattaggagatgagactccccactatctagctttttgtccattacctaacatatatttacttgacttgttgccttttctttttttttttttttttttgagacggagtctccctctgtagcccaggctggagtgcagtggtgtgatctcggtcactgcaacctccacttcctgggttcaagtgattctcctggctcagcctcctgagtagctgggattacaggtgcgtgccaccacgcctggctaatttattttttgtatttttagtaaagacggggtttcactgtgttagcgaggatggtctcgatctcctgacctcgtgatccacccaccttagcctcccaaagtgctgggattacaggtgtgagccaccgtgcccggcctacttgttgctttttaaaaattactaaatgttatgctcccaaacaaaacattaatgtctacaaataagaaaaagcaattagcaaaagttattttcctgaataaaatattttaaatttgtaaaaattagagccaatcaataaccaaatggaagccaggctcagtggctcacgcctgtaatcccaacaatttgggaggctgaggtgggaggatcacttgagcccaggagtttgagaccagcctgggcaacatggtgagagcctagctctacaaaaaaatttaaaaaatagccaggcatggtggcgcatgcctgggatcccaactacttgagaggttgagatgggaggatcacttgagcccaggaggtcaaggctgcagtgagccatgttcacgccactacaccccagcctaggtgatagataccctgacacacacacacacacacacacacacacacacacacacacaaacatacagagggaggaacatcccataatgctaaagatgtcaattaataaggagaacataattctaaatgtgtatatacctaataacattgcttcaaaatacatgaagtaaaaagcttccagaactgaaaggaggaataggtaaatccaaaattatagttggagattccagcacttctcttgcaggagttgatagaagtagcaaaaaataaaaagtatagaggttttgaaaaatactatcaaccaacttgactccattgacagtcatagaacacttcacccaacaacaggacacatattattccctacgcatatggaacaatgatcatataaaccataatttgggccataaaacaagtatcaattaccctaagaagtctaaaataatacaaaatatgttctctgaccactatggtattaaactataaatcaataattgagagatctttggaaaattcccaaatattttacaaattaagcaacatacttccatataaccctgagtcaaaaaagaaatcacagggaaagttatgaaatactttgaaccgagcaaaaatagaaacatatcacaattttgaggatgctgccaaatcagtgcttagaggaaaaaactagaaaaggaagaacaaaaaaacccaaaataagcagaaggaaggaaataataagaataagaatagagaccaatagaaaacaaacaaaaatagaagaaaatcaatgcaactaaaatctgatgttttgaaaagattaatgcaattgataaaactctagccatatttaccaggaagaaaagagagaagacaagctaacaatatgaagaataagagactacagactctacagtgggaataatatgagagagcaatatgaaaaacctttatgccaataaagttggtaaattagatgaaatgggcaaattctttaacatacgtaacctatcgatgctcactaaagaaaaaaaaagctttgaatatccgtaaatctactaaagaaattggattcataatataaaaaacctttccctcaaagaaaactccagccccagatagtttaattggtgagttctgccaaacatttaagaaaaaaaagatacggttctataaaa

SEQ ID NO: 1884799 - DNA, 4001 bp, Homo sapiens
tacccagtccacagaagaggaaacagaggctccgagaggaagggactgtgtccagggcgggacccaggcccttctgcactgggtcaatgagccaagcacatcaccccagcccctggggagcaggagccgggccctgcagggtgaggagctgggaaaagcagagctccatggaaggcaaccgggaatcatcacaaataggacataactagtataaactgcaattgacagagtgcttttctgacctcacttgagtctatcaggtagatgataaaatcaggcccattttacagatgaggacacaacctgaccaacggccacgaggatgttgagagggagcgaggtgttctggctgcaagccccacccccaccctcattcataatcaaagcccgcctgggtgcagccggaacccgggggagcctggacggggcaagcccagcaggcccagcctctgcagtgagctagacttgggttccaatcctgataatgccaccgtgagtgaccctaaccaatccatttcccaagggggggcggcaccagaaccagagatggaattcaagcagacaaaagcacagtgtgagcactcggggagggagtggggcaggaaaccaaggtctagggccaggtgttacactgggaggtggcctatgtctcagctgttcccaggtgtcaccactggggccacccaagcaccaacttggtcacccaggtccccatgtccttggtcaactgccaggcgtacccacactggggcatcaggagaggggaaacgggagaggctggagccactctccatgcccggtccctcatatttggatatcagagcaaaggatgcacctgctatcctggaaaaacctcctcatcctccacagggtggggtctgtgtgcgtggcaatgtaggggcgcatggcacagtctgggtctgggcccaggaacccagctggggctctagccctgactacctgtgcctccttgggcctcagtttccccatctaggaactgggctggctgatctcaaagtgccctccggtggccattctagcatggtttctttatacaatcaatcacctttgattaccacattgatggggggaggacaggtgacgaaagcattgctatcactgctacaattactgagatcccacacttaactacaggcagaccagataccaggctcggggctaaacgttacttgtgcctcacaaccactcggcgcaacagaggtgcatgcacccacattacagacaaggttagtgagacccacagaagggcaatcactttgcccaaagtcacacagctgaggatgaagaatggagaagtggctgggatagaacacaggcctgtctgattctgagtcctagttcccagctgcaaccctttgcagagaatagaaaacaactgtcaaccgccaaatgtggccaatttggctccagaacccaggcacagccttggatcccagagccccaactgcccagacatcccggtgggtgagggagaaagagaggagaagccaccatctcatccaggccccgggcaggagctgcagtccttctctaggtctctgttctgacactaggatccttctctctctacttagctgtcctgggctcacaccctttaccacggagctgtccaatacggtagcctggtgtgcagaaaacctcggctatcacttcctgtcatagtgaccattagaagatcaccccaggtcagagacaggtgaccttacagagagatcagagctgccccagaaggccacgggggctcaggcgcagatttggatagaggaagctatgttagtagacactcacctttccagggtggctctgtgttttcttcactcatatccctgtctttatatcacaaccccatttctggagcggggaaactgagacaagttccaacttctgaacttgccatccaaacagcgactcctaactttgccctactcagctccctcggctgcagcctggactcctccacgcgcagctccacgtgtgcccagcaccactgcgcctgcccatccctcccgggcgctcttaaagggcccacaccccgtcccacccccaacgttggccggagaaggtggagtccagccagcgcgataggtgagagcaagggacgaaaggttttctgtttaaattgccaccatcaccagctcgccagcgagtggcagggggaggggaggaggcaagaaaacggaacttagtatcccactgactccacgtgtgaccctgggtgacttgtgtgcctctctgagcctcaatttccagatctgttgaaggaagtggtggcacctggaggagtgaggtggcatcaggtgatgtgtggtcaggatgatagggcagattcgtcctgtaagaggacccctctgagtgctgtgggatgtagttgtctgagggtcagaactcgttccatcctgaggctgtgtgcaggtgtgtgtgacctcaggcaagtgatcactcctgagtcatctatttcccaactgtaaaatgaggctccaacggggagctgtggctcatacctgtaatcccagcactttgggaagcaaaggctggaggatcacttgagcccaggagttcaagaccagcttgggcagtatcacgagacccctatctgtacaaacaattttaagattagctgggtgtagtgtgtgcctgtagtcccagatactcagaaggctgaggtgggaggatcacttgagcccaggaggtcaaggctgcagtgagccatgatcgcaccactgcactacagcctgggcaacagaacaagacctcgtctcataaaataaaatgaggctaatattttaatgtatgtaccatgtgaggtttaacttaggagacaggtggtcaaatcccctgggtagcacagagccattaggtaaaagacatataacaaaggtggagtattcccatccttgcctagtgcagctgacttccaagtcaccttggaaagtgggtttcccagtcaaaagagtttgagaaacagatgcctatcccggctcttggagatacacaaatcgcattaacatattaaagatgctaacagatcctgcaggcaagattcccttttaacttctttgcagtggcacagtctcggctcactgtaacctctgccttccaggttcaagtggttctcctgcctcagcctcctgattagctgggattacaggcatgctccactacacctggctaatttttgtatttttagtagagatggggttttgccatgttgaccaggctggtctcaaactcctgacctcaagtgatctgcctgccttgaaggcctcccaaagtgctgggattacaggcatgagccaccacgcccagcccccttttagctttaacccagcatttccctaacttttttgaccacctaagtttttgtttccacctatttacaccccatggaacaaacaagacttcaggaaatgctgagtcctgcctcttgtattgcaattggggaaactgggtaagtcctttctcctctctggacctcagtttccccaattacactgcaaggactcataatgagtttgtggcagagcaaggactggaacccaaccctgacctgggtggctgggtctcatttctagtacgccctaactggtcctgtccctcatattgaattaggcacaaaagaaggggaaggccctcagggaagaggaagaagccacatttgagaagtaggggtgagtactcttattttgaaagagaggaaactgaggttcagagaggggaggcaacttgcctgaaggcacacagcaacttggtcctgaacgctccagaggcagtcgaggccaccttctctccttcttggggtgagggtacgagggtgggggtgggatatttcctgtctcaaagcctcagggcacacccaacagggtgctcacagggagtcttcctgatcacatccccaggttccaagcttccttctgaacccctctgaggaggcccctgagtgtgacaacagcggcccctggtgaccaatctccgggacctca

SEQ ID NO: 1884800 - DNA, 4001 bp, Homo sapiens
attgtttttcttctcgttctagatgttcatccttgcttttgggacttgaaataaccctacacagccaaatatttatgcctattatccacttatggaaaacttatatgtcccaagtccatagggttagtattattatcagtattaaaaccattagtactagtatcatgatgatcattattcctgttaatagccatcaatatttttattactgccattgttaatatggatttttcattattgtacagcaatgaatatagtttatccattcacaaatggtgttcagttaccaaagatgtccaacaaggcatgttctacagacatatacatacacagctgtcctggagacccagctttgccaccaattgctctttcgtaagatgagatcccccaatacccaccagtttttcaggactcgacctgagctggctcagctagacctggaaaagtttcctatgcccaaatgtacttggaaaaatttaaaagtctcttcagaggcccagtaatagcttttggcagcttctaagaccagggagggtttcttggccatccagagccattcaaatattctaagtaaactcaaggatccagaaaccccacttgcagtcatgaaataccagtgaatggcctctgtgagtctcttcaagtttttcaaagatgactgcctgggaaggctggccaggaagtcacccaagcccaaccttctgcaggatgttctatgtcagccagggacccagtgaattgccattgaacagaagggaggaacagagacagcatgcctgagcttctggaaacattctaagtgtccttgttggcccagaaaagactggtgctaccatatgaggcacagacttggcaacctacctactccaggaaccacagaaggtttaaaggttcccaggaagtcccaggaagggcagccatggccctttagagccatcagattgtattctaagtctacgtgggagacagtgcgcttagcttcataaaaacaccagtggaggtgctaacacttgccccagtatccagtcttttctacctcatctcagagccaggcagccactatttcccaaagctgctgtgcaatgaaaggggaatattctaagtgctctcctgtgcccacgaaattctgtggctgtgctgaaagacaggagttgtcctccggaatgctcttcagaaatctgacagcactggtcaagattaaagaagctcaattcaacgtcatacaaaaccaatcccccccaaaaaaaaaaaaaatgcatagtgagacaaaatgaacacacctgctaataatcataaatgacaataataacaacaatgatgatcttagtgataatgccaccaacactgttaatggcaataacaataaacctgaggtaatgagtgttagggtcccgattcaccgatgtgaaggatggcgacaatttctggcctcacagaaataaaggaaaagtaaacacctggaggaggaggaggtgaacctggagctcccgccggcctctgggcgctccttggtggaaggagagggtcttggtcctgagcctgcccgggatccacctacaccagaaccccggagtcccagtccctggatgggctcagtcccacccaggccagacgccccggagccccgtagcccgggtcctccagccctcgctgccgcctcttctcgcggagccggggccgcccccgcgccacctcagcctctgcggggctctgggagggcagcgccgaggatgctccgggcccagcgcgggtatccgagcccagagtgggtatccggcctcaggcggatactgacgccctgagggcgcggaatagggcggcctgcgcagggcccgccatctcgggccttgcaaaaagagcggcctctccaacgcccctaccggaacctccccggaggccccagccccaaagccagggcgatggcgcctccctgaccatgggtgaagaaaaactcaggtcctccctggagacccggcccgccgcgggaggcagaccgcgcatgcgccctgcatggccggaaagatgagtttcattgccctctgcctgccatgaggtggcagcacaggacgtttggccttagcggtggacctgagtctgaatcactgaaattcaggggtagattattcagtacttttcttttggaagatcaaatggaaattgagtacgatatcttgtgctttaattgaagaagatggaaataaagaagcaaattcaaaaatcagtatacaaaagtcgattgattccctctatgtggagggaagatgagcttgaataagagaagcattctgtgttacgctttaataatggctggagatctgccaccatgcatttgtcaaatcccatagaatttcatagcacaaatagtacatctcaatgtggctcaggagtacatataatgtcagccacagtttgtgggtaaattacatatttaattaaatagattaaacaataaataatgatatgagctctgcctggacacagtccttgcctctccaaccagtttgccaagggcttgaatttcttgctcattatcctcacacttgacataaaccctggctgcagagtaaaatcaatcacttgtggagattttttaatatattgatttgtcaacttcaaccacggataaggccatttagccttagtaaggccgatcgtattaagattgtgcctgtttggcaaaatttcaagtcatcccacttgatattcaggaaacattttctcttgagttttaggttcagtactgaggctccttcacggacaatacattttccaattctgaggacaaggcagaggagggcccctctgtgagaactttcattttgcttcgggaaaagtacattgaatcgaatataggaaaggcttgcaaggtggctgacaggttcggctgttttatcatgctggtgttttatcttctggactgcagtaaaaggagcacagctgtgtctgtctctgtgtaataactcaggactcacctgaataaaatgtggggtgtcatgagatgaactgctacttccagttagagaggctccagggacaaaatttcaagagccttctgagggatagaagagaagagctgccttattctctgatcccaggtaactgctcagagacagaggcaagggctgcggacacccaaatgcatatactaggggtctttgatacagcctccatttccctgctaaatctatgcaatgacacactgagaaatctagcaagtggggctgaagatccctggtgtgtcaactcgagggttggatggaaacaagtggttttagtggacgttgaagtaaagggaggtgagctgtgaggaaagagctgttaaagactggggagactcagaagttggggtagaatctcgaccaagaatctcacccaaggagtgcagatgcaaatcgatttgttagggctgcataaatgaaacaagggcttcgccaacatactaagttttttcaacaacagattgtattctttcaatatttgtaagtattgatcttttggaaaagtttaatgagatttcttatataattctgcattcaatttattccctggtcactttactattatgcatttatatgccacatttttatgaatagatattttctcaaatttctgaattattttgctaaagtatgtgttaagagttttttctagaggtccaccttcttgactcacttttctgatgagaaatctatcaggtttctccacagtgattttcaagtttgatagctcctcaatgtgagaaacttaatgtcaactaagaaatgaattaccactaaagaattttctcctttcaggatgctaaccatgttttgtccagtgtgaaatctcacatgtgccacaagtgttgctctatgaagaaaggatttctcatgatttttcattgcataacttctccagtaagaagtatttggtattccaagagaattcattgcccttggaaagactttcccttcttatttagcttatgaaggctttcctctcttattttccattttagcagc

SEQ ID NO: 1884801 - DNA, 4001 bp, Homo sapiens
catgggccagctccctggttgcactggtcagccaggaattaccagggcagccatggcaccaaggtttgatgggcttgccatctgagtttaagtggaaatgcagaatgtgcccataccagcctgggttacattgtcctcttataggggcctcaagcccagcagcgaactttggctcccgagttaggcagactgtctcggctggcatgtggcacacggcaaggcacttcattgcttcagagctccttctatgccataaaaagccctacaagacctggtgctaatccctctctctggcctgttctccctcacccctggcccaccctgctcactccactccagccacactggctgccttgctgttgttcctcaaccacagctggcttgtttccaccacagggcctttgcatatcctgttccccaaacccttcccatggctggctgcttcaccactcaggccccagttcaaatgccacctctttggggaaagcttccatgattccctgactttggtgactcttctccccagttgctccattcaccatttccctgttttattggctttaaagccactctcatctggtcttttcttgtttattcatttatctgtttattctctggctctcccatgcaagcagagcctcatctatcatgggtactgctgatccatggtgcctggctcacggaaggcatttattaaacattttgagactgaataaaacactagctaacaccgacatgcatttaccatgagccaggcactgatccacaggcttttgtactcaacgctgacaacaaccctaagaggtaggtatcattatatcccccattaataagaaaacaatagcacagagagatgcagtcacttgcccaaggtcacacagggcaaggggttgggccaggattcgaagcaggcaggctgtctcctgggtctgaactctcaactacttcaccctaatcaaacaatccctctggtcaaatgtgagtgataataatagtacccacctcgtgggtgttgagggtgagcccaagttagcattcagcgtgggcatgtgaacaattatagtcaatattgaatggagacctatgatgcttttatgaaggtttctattttggattaaaaatgcacaaatttctcctgaccagaaatgatctctgagtgctaaatattttatgtcaatggaagaatgcaaatgattaagcaacaccccataaaatggggcagacccagggaggaatatatatccaaactgactcatcccagtgagctcactgcacatgaattacaaatggagcggggtgcattaagcccctctgctggcagaagggaggctgctgcctgccatgcgcctgtgctgagaatggcaggtccccagggagaggagaggccacccccttctctttctcttccatcacaggtgtgaaagcctcagcgcatgagccaattctgtgcagtgctcgacatacagatgagaacactgaggcacgaggcacagcctgtgatctggccaccgcgctcaggaggaggtggttacccgcgggcctgagggcgctgactttttagaatgggcgagtgcagctgtgtcccagtgtcccagtgaccagaacgattactgccttttaaaagtcgtgaaaaggatcgtgaactgtaccccacaccgagcgcgcgtctgccccccaaggcggtggagacacccccagcttccgccgccagctcgcggggcagaaggggtgcgagcgactctggccaggccccagggacggaaccgggtctggcggccctgaccggggagagcccaggaactcacgtagccggagcgccgggggtttcagcacggagacccatcccgtctgcccctggactcccgcgagccccgcgggcctctccgctcgccccgccgcccacatgccaggggaaggagcgcagtgtgcgcgccgccaggaagcggcgatcgaaaccctgcagcaagagttcgatcccgcgttctcctcgggcgccatgacgtgggcggggccgcagcgttgccgggagacctggaggaagccggcctggactgaagagggggcgggtccggggcagtgcgcgggggcagggagggggcggggcctggggggtagggtcaggaggtgcgtcctgggggcggactctagggcggggctaaggtgagccttaggagggcggggcctggggtggggccaggatgagcgccatgagggcgaggcctggggtagggccaggataagcctcactggggcaggtcctgggtagagaccaggttggcgggtcttggggcggggccaggatagggcgatcctggaagctgggcttcggaagcgtccaggttggtggcgtcctggaggcagtgccttgcgtgggggcaggataagagtcctggaggcgggcattagggcggggataaacgccattgggttcaggaggcgggactcagagcagagcccaggagacaggtcttagggcggggctaaggccagacccagagaagggctcaggaggcggggcaggggcggggcgttgactatgtcttggcacatggccaggcggtgcgcggactctgggaggcggagcttaggacgggcccacgtggggaggggcccagggtccgggaggcggtgccgagtcccggctgggctgcgctcaggaggcgggccctgggaggcggagcttagggaggggccggtggcgggagggacccagggactgggaggctggtcggggctgggctcagggtccgagacctagctgggcttggggcggggccgagacggagcgaggggtccagggtgtgggaaacggggaggggtttgaggagaggatcggaatgtggctcaagttcgggaggcgttacctgcggagggtttgaggcaggcccaggagcgagcccacggtctgcctacgcggggccaggggcgggccccaggatccggagcttcgggcggggcggagtccgagtttggggcccgggaggcggggccagttagggtgagggtccctgggatcgacgggtcaggtcttgggctaacgtaggcactctcgcagttcctccgccttcaggaaggtctttttagcagaggccttacgggtgcgcgcttcggtcctggaggccttatcctaacctcctctccatcagcgccacccgtctggggcccgaaacgagggagctttccctctgtcccccagcctttggactgtcaccaaacaagccattcgttcatcaaaaatacttattaagcgcctaccatgtgcctgacaagggagatgtaacggtgagaaaaagtaggtgtggtccaggccctccaggggctcaggggctcgtggaagaagtggacattgaaatacttatcacacaaatgaggataaaagtacgatagcgatatctgccacgaaggtgagcagacagagctagcggggcttgcaggaggagttttgatcttgcagggacaggaaggaggagttagctcctgcggggtgggattgggggtggtggtgatatagacgtggggacagagtggaaaacaacaaaaatataattattttagttcaaagttattgtgtcttgagttgaaaggcagggcagttagcaacacagttcagatttcagtactgcccctgaaatctgaactgtgttcaaagtctaaaacgtttaccttagcaaattcctcataaaactccatttggaagagtcccgagagcgaatttgttaagtacacttgcaaaaggtagatgaggagacagataaaatcttattacctctttcagatgagagccacttgagccctgctcagctatgagaataagagaggggaattaattctaattgaatacacttgttctcttatagctgttgttccacaccagaaccaaatgagcgcaagatctgacaaagaaaaaaaaaggttcatcttttattcctccaaacactttcatttaaatcaagaggatgggatgtggttattgctgtgtttttaggcagaatcaacggttt

SEQ ID NO: 1884802 - DNA, 4001 bp, Homo sapiens
ctctcccgatctttgatgctgggaaaagagggagtcagaaaggaggagtgagtagaagcgacactattttggcttcactcataccccatcgaggcaggcagagctgaccctagaggatgctgcctattcaggaatctgaaaattgttgatggggcccggaaatttaaaatagtcccttcctctttattaggctctgtaaccctaatcgccctcaaacatagtctgatattccctacccatccttgtcttcccttcctcctgatttatcctccaggcctggcagaaagtggaagcaggaagatgaggctgcagaggcccttatcccggcaggcctggatgtgggctctgctggattggccctgcgttcaaagagctacggaactgacaccagagagaagagaagaaaaacccggaggagtggagggagagccaggggctcctggcattggagggctgatgagcaaagctccagatcagctttagcttctttctgctccccaagctccaaaggggtctgagctccttgagctgcgcaggttttaaaatgttcgagggctcctcacagatctgtagctcagagttcactgcccccatttttaattatcaagaggcagctaaaactccaacacccggagcagccacacgctgcaggagaaaaatcaaaatggggctggcaatgcagggtgcagaaaaagcaggctgagaagggtggtcagctctatcaaaaacattggtaagaggcaaagactttttttttttttaacaaatcccccaaatgtttattttgggctcctgcccatccagataaatcaagctaacagattaggaagttcataaaattgtattcttaggtaatgacatccagagaggtaataaatattccctctgctctggtggccgctggagttctggtgttcagggatcttccatctctcattccaagcctgagaggggtctcttggaaggggaacatttaaattaaaattagctctccataggtgcagtgccagatagaagctgtggaaaacccggagcggtggttttgtgagtgcaatagcttgctcccccaggactgggcaaaaggcagagaaaaagatggtacagttgctccagcgcactgctcctccccgtcatagcacccttgatcttaagggcccctttcagagtcagtctcccctaatcctagaaaagcagagaaggacaccctggctccaagctcccagcaaaccttttaattgttttcacttccctacaactccccccaacacacacacacacacacacacacacacacacacacacacccctagctgtgggaagctgtctctggatttcaatctgccaagtccaagcagaaagaaaactgaagcacagattgcagagaaaactttgtaggaaacttcacacaaacagcagcaagagaccctcggaaaggcaaagtgccccagtccttttccctcagtctcactttctcagactctctcttttttgagccaaatttctttactccccaggtacacagactcagcacagaaccgtctttttctccaagcagaacccctccgcttacaattggatttcccgccttccctgcctaagaccgggagttgagacaaaaattgagtggcaaataagagtttaaacttttgtgctcctcacccccagagcagaccgagtgctaactacttacgtgtcaatgggatctttggcctgtggggatctcctggcgcttggagagaaggaaccctggaagattggtgtcgacatttcacccgtcttctttttacttagccattgaagagagagggatacaatgcacttacaggcattcatgcgccttgcctctcccattactctgggcaagaaatccccagtcctacaaaagcagtggcatcctatctggagaccagggctgagcaagggctggcttgggagggtcagagatgggggtgggggagaggtcagaggcgctgccgaatataaaggcaatgggagagaaaatgctgtgtcctccccgtgaacctgggctgtgtcctccccccagcctttccccactgctcaacccaacttaaataaaagcccagccctcagcttcccagcgaggctgtagcagcatcaggcagagcagcagggaccaagactgctggagcttggggccctcggcccagactggccccccacatcccaaccctgccatgccattctgggttgccaagtccaaggcaaaggagagctttggggaaaggggagaaaatggagcccactggagggaaggccagaggccaaaatcttcaaactcaaatgtaagggattttagtttgggttcatttgtcaagaattatggatttctgatgtttccccttttcagaccagaaagaacagaaggagacacatgcagaatgaccatgtatgtgagggaagaggaaggagaagaaacagaagacataaagaaggggaaataaaataagtgttctgacccttttatgctgcttttcctgaactagagtgtcccttctgcaatttcagggagaaacttaggaaataaaatgtagtaattttccccctcctcactctcatctcttccactttcaggaggagagggataaactccctgaaagccacgcgagcaaacttaggaaagaaccatggatctcaatttaccccttccctgctttccatcttagctcctttacaggcttgaaaagacaccctggtgcccttagaccttccttcccttttcctaagcacagctagaaccccctttttctgttccaagggcaatcgcctcaagacgataggggctacagtcagatttggcccctaattcacttgattacataaaaaactccagataattgttggcctgcctcctcatactgtaggcagcatgttttgttgtctccagggtaccactgagggaggaaaagtagacctaaaggactaagagactccccccaacacacacacgtgtgagggcatgcatacacacacacacacacacacacaccaagtaacaaccagcaagtggttcaaaaggaaataaattcaaagcacaccaatgtgatttgtacaacttagtcctgctgttgcctttcactccagaatttggggatagggggaaggggtatccctggcttccctgcataccctagatctcttctccctctgtcttctacttctaattgcctttcttcctgaaatatggataaatcgtccgagaagaaggtcaccaacagccctcctcccaccttctcctaacaaacaagcaaaaaattaagcaggccttgctagggcctggatctcaggaccagaattatttgggagcctttggcttgaatgtattcaggtaatccaggcaagattttttgtttcttttttagccccaaggaaacaaatttatttaattaatttatttctttacagccagagaaacttgttcaggctatccccatacgctgccaggacctgggaggttataggaagagagggtggtccttgactctccctaagtctcttcgcaacacctggcaggtccataataaaagttagagaataaaaaggtaaaagtcttttattatctccaggcatcagcctttgaggcctatccataacaagggtacctcccaggcctctggccagtcttttttccaagcctaaacaaacagagaaggcatcctgacaggtgactttgctgcttcagagtcaccagctcaaaaccttccttcttttaagaactcaaatgttgaggggatgtcttccttaatccctcatcccaaaagagccctaaaagatgaaagaaaactattctccttcccactccctaaacttgcccccttgtctacaaagtaggcaggcctactcagcacagaggagggagaagggaagagagagaaaagacaaaaagaagaaactgtacctaactatagaaaagtgagacactccccaccctcagctccactgaagtgcccccagaggagtctggtctctctgcagactcaggg

SEQ ID NO: 1884803 - DNA, 4001 bp, Homo sapiens
ggcctcgggagcgcgcgcggtcgccgggacttctccccctcccagcccgcaacgtgcgcgcgcccgtatgcaaataagttcgattcaagagaattttgtgccgggagccgcgcgtgcgcagagggaaagcggaatctacaccttcccggccagcggtagcaactgcagaactgcaggagactatctttctagacaaggcagttgaggaggagggagcgcttgagggggactggcctggcgtgcactccgcacctcggggacattattgcgcgtggaacggctgcttttggaaggtgagtgactctcaccatgcttctagtgcaaaactgtctcacgaggctttgatttcagtgtttttttttttctcttttcacctccacccacctccccccgtccttccacatacacacaggaagttttgtcttggaggtggcattgttgggagcgctgttttcgtgatcttcagaccccaggttctttggtacgctcgtgtttagtgtgtatttattaattggggagggtatttgaggcaaaccgaaagtctcggggcggggaagtgagtggagcctgggcataattgaggagtcgccggagttgagggatccacgttgaaggtgacaatgacttttctccgccgcagtgttctctcgcggaaaggagcccggcggccgaaaggcccgagaggaaagcgactcgttggccaccgcgcagcggccggggtcggtgcgtccgcgtgggcgcgaggcgcgggcagggtcgggcgccgttgtgaaacctcgtggtttagttgactgcagccctcggactagggtggacaataaacgccattcgctcggaaactaagttgccatccgcttccgagctggcggccgagggtctttaaatcggcctttgggggtcagtgctgggctctgccggagcgcacgcggcgtggcgttgtttgctcaactccggagggatgcggatgcgacaatgagagcaacacgcggtcgcttaaaaacagcccgtcttccactcgcctgccctcttcggaccgcgcccaagagcctctggtgtccggggtgctttcggagcccgaagttttgctcccggtgcgttcacctgtagcgtaggtgtgggcgacaccgcgagggcttcccgtttatgggcggccgtccgcgctgtaagatggccagggaagccaacttggctggagatggaggcggcggcgttgtgtacgccgcgggagtcagtgaactccgcagggcactgctttttgtgctctacgtgacagaccacgtgcttcgggctgcgaccctggtccttgtccgaatgtccagccccgcgtgagccgtgggatgcggccgccgtcgggcaggtccggccggcaggacaatgtggtttgctgatgatggcgtcttgccagtttaaaaagcagagtgaaagtcgccaactctccgcccgtgcggggcggatactccgggcgtttctcatcaaggacactgcaaaactttgattaaatgggcctgctcccgaggggagggtcggggggccaggctccggactcttcggggcgcggggtccggacccctacccagggtgatcgtccagtgtccggcccctgcgaaacgctccgacatccctgatgctgcacgtaggcagcgcccggctggacagaaaacaaagggctgcatgtgcccgtgcgggcccccggcgctcggggccgccgcctgggcgtagggccgtgcaggtcggaggccctcgaagttcgggcgagtttcgggaggggcttttgtccctcagccccctcgtggggaaactttggcggcgctacttgtgcgaggtgccatgctggtgcgtagggaggcggcgtgcttccccgctccgggcgtgcgggcgggcgaccgagggaggcggcagtgcccggcgcttcagccctggcgtcgggggttgcgacggccgagggttccggggagcttggcccggactgctcggccggtttctcgtggcccgggagcctgtgtctgggaggtctgtgggttcgcctttgaagtcgaactgttgccatgtttgaattacgtcagggcaaagccatgaggaggaacaagccccggcagcgcggcgtgcgggaggcgcggcctgcgggaggcgccgggccgggctggcgcggggcccgttgttccggcgcaggtgagggaggtggcggcgagcgacgcggttcacctcccgctgccctcgccctcgccccggcgagcggcccccgcaggaactttcctcccgacgcgagatgtcttatttaccaacaaatccaccagggagcattcttacttgctggctcggcgtctctctcggcagtcaccggagtgcccgagggggaagcacgatttacggaaggtggggacccgagggccctgggaggagcggggaggcattttactgctttcagagaaacgggtgagggcggcgagcacctcctccccagccgagctgtggcccgcaagtccaggggacccagccccgacgacgcccgataaaccaccgtggggaagttccggggctccctgttgccctactaagggaagtgaggactgtgggcgaattgtgcgtgcggccagtttctttgtgtgtttctagggggtggggggagcggggaagggcaaggtttgttttggtgtagggggagttggtttcttgaggtggtagggcggtgcagtttgttctggtaactatgaccctagtcagtttctttgtttttattttcttcctgtaaccttccattacttcaggcactcggaagattaggatttactcttgagttaaacagggaccctatccgagacagttttaccccagcaattctttctcccccttcttaagttgtcctaaggagggttaagaaaagcttttctttttcttttaataatttaaaaatgaatttgaccttgttattcagagtacgctgaaagcacctgtttttgaactggaatttgccagacttgaaaagccttttaaaattttatgtcgcaaaattgaacacatttagttgcccaatctaaaagtctgggagtttgtttctggtggagtttcggagaaaaccctcatggcatttaaagtatttatataatgattttgggaagggggatcttttttaggcgaaaggtatgcgtgactcagtgtttggtggttattcagtgccttaggatgaccttgaagaagcaaatgtttagggagttgggccttttggaaacattgtaaggaggctggggagctggctggggaggaagctgctcaggaagatgacacagggtaacggctagcttcttcccagatcccgtgaactgtggttgaccttctggttacctctcctagatttttcttttcaagctaaccttttctttttttgtatgtggccccaggcatagctcaaaaattatgctggtttgacacatggatgcttctttggtatttggggtttgcctgtagtctagacatccgatacccaccaccatatctgttgcttctttcctgatttctcctgcatttgaatcatgtgtaaggcctagaatctaagtgatcattactaggaaataatacccttgaatgcccctgcccccacacacctaaaaatcgatactagttgaaatccattttttttcattattttgttattaataaacctatttttcccaagttttggttgaccaaattacaataccaaaaggcaacctatattagtacatttctgtagtaaatagaaagagcatgtcaggaaaatgaaaaactttggacctatttttcccaagttttggttgaccaaattacaataccaaaaggcaacctatattagtacatttctgtattaaatagaaagagcatgtcaagaaaatgaaaaactttggatttaataactttggctttcctttcgcagctatttctctgggtcctgtatttaaaatgcatatgaggtgctttgcaaatacgctgagattgtttgagttgtttttcttaattagtatttcata

SEQ ID NO: 1884804 - DNA, 4001 bp, Homo sapiens
ttgggcccattcgtatagaggactagggccacctctcaccttgtcaaacacagagaatccaggaaccttacaagtaagtcacacatgaccacaatgttcacatattaaccttgctagttagaaaaaggagaataaatactgtaagcatcctccatctccacagttcttcaaccttcctctgggttgaacaagtaaagtggggaaggggttcagttttatttcaacaatcccagaaagtgagaggcttctatgtcatggtctccagctggaacaagtggaaagaaagaaaagagatctcctgctgctcaagataaagaaggaatattgcagctaaggatgggagacatagggaagtgatggtttctaacctgacacaaggtggagagaagtaataaactagaagatgagggaagtaattaaagtaaaacaaatatatgacacgaggtttccttaaacacacccacaaggaatatgggacttgattgcaagcttcttgttctttcatgttattattgaactcattatcattattgctgtaattgtagtggtgacccactttattcatttattataagacattcctgaaaccaaagcagaaataggcactattctaatacaatatttacctgtcattgttctacagtatctgtctctcttttgttgtggtgtcaaagtctgtttaggttatgcggtgcccatatcccctgttatcagcaccctctcatgctcagttcttctcatctacatacacaagagtccatttctctgggaaaaggattgtagataatagacaaaaggaatgtctactagagaaacagatgagcttggctaatgaaggaaatgaaaattggagccataatgagctactgtatcataaatgagcataaattattttgtcagtgctatttacaattttacatggtgcagagctttgcaattacgtctattcaattatgccattcaagggatatttcaataaggattcttcattgtggccaaacaacgcatttggaagcttctgttgtacgtgggattcaaatctagccacgaaagagtccattgctgtagattcagaagaaaactcttggttaaatgtcaaaatactagcaaattcttgaaggagaaattttcaattgtttaggaataaagcataatgaatatgacctctatctatgattgtggaaattctgagttgaattccaaatatcttggtggttaggtcagtgtattaccaacaatgacaacaacaaacaatacgaacagaacaaaatttgggaacaaaacatgatcggaagattttgcaaaggttaaaaaagccctactgagaggttttttcatagaatacgtaaatatttttatgcgtgttaaaaacataagaactcttaaaatatgactgtaatactgtaatcattcataaatagaattaaaaatataaatatcctcaaatatctagtcaatgttcaaatttccttgcatgtctgagccttttttaaacctctaatatatcatttgtacatgtttcatttttttcgttccatagataagcatggcagccttccaatccactttcttttcaccaaacttaacaaatcccataattacattcatccatgttgtactattcacagctgcacatcccatcatgaaagagcttgtttttctgtaggagtcaagctaaataacccaattgttaagacaaaaccaggctgagcttggcttaaaaattgaattgtgttaccaacctagtggaaagttccattattggactggaagaaacactgtcaccttttcaaagaatgaaagtgaatattaagcttctagttatagtagtagaggtgagagccacagccactgaggcaagaaagtgaatgttagcatttacttaccctatagaacttccaaggcaatgttgggcttgttttacatctgactcctaccccagatgtggatacattaagcctttggtcttaaatacagctggcacatactgactcatgatttcagatggtttcaggaaagaccgtctagcaaaagttgtacttgggggaattcctggcaaaataacagatgtagcaatgtctaactgcttttgtgatgtaaattgatctccctgtggcatcagtgaatcttcgtgcattccttacattgatcagataaaacttaactagaaataaaaataacacacacaaaaacatcttcaaatgctgtgtatattcattgattattttttaatttaaatgcttcaaacctgacctataaactttttgaaatgtgttcaggcagcaaatacacataccatctacccatgtccattttgtttctgaaactaaccaagcttattcttgcctcaggactttcccttgctggatcctgtgcctgcagctcctgttcttggcctgtctgctttgcaccttccctgcttagaggacagcacccccatgtcttcatctggggagccttccctgactcgctgtctcaggtggctccgtcactcccattccagtctcccttcatcaaattacccatttattatcttcatagcattttatcataacctaaaaattgtgtttgtttatttgttttcttgcatattgtctgaatccttcattgcatgtgaccatgatgagggcagggaagtgactcacattcaccatgggatccccaggtcttagaccaaagcccggcacatggtaggtgcttgtgaatgaataaatgaaagggtggatggatgggtggatggatggatggataggtaggtaggtaggtggatggggcgtggatgggtgggtgggtacgtggattgatgggtggatacatgcatggatagaaggatggatggataggtgggtaggtggatggatggatagatgggtgggtacgtggatggatgggtggatagaagaatggttgaatgaatgggtgggtgggtgggtggatggatggatggatggatttgtgtaagtatagatggatggatggatggatggatggatggatggatgcatggatggatggatgcatggatgaattagtgagtgaatgaagcacctacagagaaagttgaggagattttactcatagtgaattttatttagtacaaccaacataataaagaatttctgacaaatttgttttaaaagagttagaattttactagtgaatgacccagaatagttggtgatgactctagatctttgattttccaatgagattactctaaaactaacaatgactttaactggaaagtaagccagggaaagtttaaaatatgcttggtgtgtataaagagaacctaaggattgagttatataaaaacaatatggaatgaagcccccttctcacctcccctgctgtgtcagttgcatgtttgtcctcactttgcttgtagcatccaggatgctaagactctggaaaatcatagtcgaacccctgcagcaatccggttacatttgcttgcagcagagagaattgatttgagtgttctagcatccttaagacttgggctctttcaccaggtctcctccaaatctgttgtactgctttggacaattactctcagcctttaaaaactcccctgccatgaaggtcactgcaggacagcttcctatagactatctgttattgtgtgctgtttccacggaaaatgggtaaaacataactgatattattagaaatatgatcctgaccacaaaaagggccaatttcctttggtgatgactctctgattcaattcagatgactacatttgcatcatcgtaagcttggacatgtcactgattcccccagcaaagtctgttctttcacaagctattttagaagtaaaaagcctttatggacctctttccaaaactttgattcagggaaattggcaatgactgagcaaaaaaacaccaaaggtcattgttacgtcattccggaggacagaagttgggatggaaacctctcttgcccgtcccacgtggatatcaatgcattctctctgcaccttgctctttctgttt

SEQ ID NO: 1884805 - DNA, 4001 bp, Homo sapiens
agacaaggatgtttttcttaacgcataaaaaactcacaaatcagtaagaaaaaggctgggtgtggtggctcatgcctctaatcccagcactctgggaggccgaggcaggctgatcacgaggtcaggagatcaagaccatcctggctaacatggtgaaacccccatctctactaaaaaaaaaatacaaaaattagccaggcgtggtggcgggcacctgtagtcccagctacacgggaggctgaggcaggagaatggcatgaacccgggaggcggagcttgcagtgagccgagatcgcaccactgcactccagcctgggcaacagagtgagactccatctcaaaaaaaaaaaaaaaaaaaccagtaagaaaaaaaacagcaagaatgagcaaagcctatgaacaaaggacatataaataacttttaaatatatgtcaaccttatgcatatttttcaaacatacattaagtactcacccaatcagaaaagatcaaaaaatttgataagattctcagtaatgtgggggtaggaggaattgggcacttccttacattgctgatggaagcagaaacttatggaacatctgtggagagcaatttggcaacatgtatcaaaattttaaatgtgcattgttgacaagtaattccatgtcttagaatttattctttagctaacttccttattagcaatattacatcatatgtacaaggatatgcatattccatagatatgaaattggaagcaaacaaataatctaataatagattagagaataaatgtattgtgcacagacctgaaatggaaatctatgcagcagtaaaaaagaacgaggtggctctacttgcactgttctggaacaatctccatggtacatagtgaaaaaggaaagttcagaaggttattgtgttactgcttacgaaagtgtgtgtgtgagaatgtgcttgaatatgcataaaacatctctgaaaggatacaaaagaaaggagtaacatcggtttcctgtgggtagaagctttgagtggataggggacaaggggtggagggagacctagttttcctatgtgctttttcgtacatgttaaattttcaccttgtgcaaatattatctacttaaagtacaagtctaaacaataattttataatgttctgctccttaaaaacctttgaaaatcattgagctacatgatgcctaggattgccattagtaatgtttattattgtgatataaccactttttattaaataatatcatgattctgtaatttgtttcacacttgacaaatgtactagaaattctgctccatagctatacatgcaacaaaaatctttacacttttcaccatctgttaaattctgttgcatagacatttgtggagttcatcacatacgttatatgtagctcaaccttccccagaccttagcaacttcttggtccagatagggtccctgcagcaacaatgactcaacaccgttctcacagacatattttgaaacagggcctataaagtcctcccatccccttaactgggcaaggttttctttttatatgtatatatatatatttttttttattatactttaagttctagggtacatgtgcacaacgtgcaggtttgttacatatgtatacatgtgccatgttggtgtgctgcacccattaactcgtcatttatattaggtatatctcctaatgctatccggttttcttgaaatcttcagggggtgcctctcatgtgttcccaaacaagtatgctcccagcaggcactcccacggctctgctgaacactgcaggtcccgtgagacccactttctcacccagccctgctgcttccccgcagacgccattagagatgccctagagcccccccccccccccgcccccgaccccccgtgagaaagctgccgctcacctgggggagatggagcgaatgccacgctctgtttccattgcgttctgtcagacaaatcccacaaatatgctgcttgggctcccagattttatggaacttggtgacacagctcttcttgttttgctcacagtcactctgccctcaacaggactcctccgggaatgcagatggaaccggaatggtagacaaaactggggaaagacaatcacctctccttctgtgatgagaatataagaccaaagaagactcaaagggcttgaggaaagaaccatcttcagaaaacaagaaccatgttccttgactctgtcacctctctacaccacctattattatcatgggaagacggagccaaaactgagagagcagtttaggagaggtttgagtcactggaaagtaaaaaataatcctgactactgttcactgatacagccaccattttgcccttataatctgtaatcttcacaacacctctgtttcagttaagagtttttcaacatgagtggtagaaaatctgaccaaactggctaaaccccaaaattggaatgttagctgatatagtaaataagctgagacaaattggctttgggcgtggcctgatccagagctcacaggccctgaaagcagcctgctttctctctgtttctcagctctgcttgctgagtgttaactcttctccaacaagctctcccctcatggttacaagagagctgccagcaacaactcctgggctttttccttccaggttaaattctgttgcatattcatttatggagttaatcacataagctatatgtaacccaattttccccaaactttagcaacttaggaccaaatccagtagaaatgagtgagtctgcttacgtgagagttcaaaacaagagcctaggaattgagcttcttttcctgtggctcatccatgggtcagacaccatggtgaggaggaggaagagtgctgagtgtctgagctcaggccctgtgctccctccagggccatcactgtcaccggaagtacatgggcagaggtggaggagggctggctccccaagcaaaattaaggcaatgttgccaaagcatagtaaattctgggcagcaaagacggcaattgtccacaacaaaccctatgagattgaaattattctcattgtacagatgtggaaattgaaggtctcagatgttaagtaacttgccccaaatcatatagtggcatagattggattttacctcattaatgtgtgcgatgagaccaaaaggataggtaggtatctgccaggcagactgaagcaaggagggtgctcgaagcaaggatttatgaatacacagcagtatgagggcattagcggagtggggggccttcagggaacttggagttatgggcaaagttataagacagtgtagcaaaggaaaagctcaggctctggtgtcagatagatccagatgttatttgccagctaaataggttgcagtgagcaggttgcagtgagctgagattgcgctactgcactccagcctgggcgacagagcaagaccctgtctcaaaaacaaaaaaaaattactaagggaggtttgtttgtttttttgctttgtttcacattttaatatagatttctggactctccagggatagagagattcctaggttgaggtatcaggaagtttcctcccagaaaactgttgatcacataggggaattcatccacctccttccaactggccaaggatgtaactgctcacttcaccttcatcatctgtaatacagtgccagtaagcttcacagagctcttgggaggaataagtgagatagcacaaaggagctagtatagtgctgagctcaaggagctccaccaatggttgatattatggtgctggtgaggataggttgcacgaggtaatgaatggggaagctgtgggaaaataagacggaaaattaaccatgggtcaaatcatgctaagataaggattttagcttttaccctccagaaattgaagaaagattttgaccagagggatggcccaattagtttttcattttagaaagatcattctggcagcagtgtatagccaagcagcagagaggtggggtgggcagggggag

SEQ ID NO: 1884806 - DNA, 4001 bp, Homo sapiens
ttcttcaaagaagacaaaagaaaaaagagctgagggaaagacagccataaaattcctcccaattctccataacatttgccagaggggggtcggttgccagccagggctgagcagcgggggaccccggctgctccttagactcacacatctcaaatcccacacacaggaaaaaaaataaaataaaatatcttttcagctggggccatcaaaagagccttttcatttattagttacagacttatcttccagttgctgatttctcagaaccctcatttctctataataaagtctatttgttggtttccatctcagctggacagggcgaagcacttctgcagacatttttataaaaaacgagagaaaaaggcaatctgaagtggttatagctaaaataatgggcctgaacgtggctgaattaaaacagcacagaaaagatcaattaggaggcactttctcaaatagctcacacccagctcccggcgtttggctctcactcttgcactaaatatttctaatagttgctgagggagagacacaaaaaggaaaagaaggaaaatagggcccaggaaggacctttgccaggaaaattctagaaaagccaagtgatttccgctgaattaattttaatttaaaggtcctgaaaaattactcactagacaaaaaacaacaacaacaaaaaaaaaaacactataataaaaatggcagtctttcaaaaataaaatcatgcaacttttcacttgggaaataacacagttgaaggtggtgttctaactgcccggagtttctaccttctttttcactttctccctcaccccgacttcctccagcacctcctagtgagacccaggacacccagggacagcgacccaggggtgggtgcctgaacctgcctattaattctgggattctgggcgctcaaatgtctgttgaacggatgaatgaatgagtggaaaggtgagatttccccaagtttcttaccgatgtaaaaattgtagggcttgttttaattaaaagccaatactctccgaggaagtggccccctcctgcacggcgtgcagaaagctggtcagtgaggggggttcctggcgggccccatctccttcccgggcgcttcctagggagaccttgccccgtgcgcagcgtccccaccgcgggggcccgtgcagccgccccccacgccgggtggagcgccgccaacgcgggaagccccagcactgcctccaaagatgtccgcacactccaccctgctccctggaactatcctcaaacgggcagggggcaagcgaggccggtggacgcgggactcgctcctctgacctctccccggccccccgggaggtagcgggagattgcacacgcgatcctgcgagtttccgaactttggaagatcgtgacccggagagaccctgggaggagagggccggccacctcctaggggtgctgtttttttaagggtcaacccaggacgctacgggaagcacctggcgcatccttgggaacagtggggcttggcggtgggcgcccaccgcgaacgccctgggcgggggaagggaatggcggggggacgtcgtgtcctaagtgaccccgtcacagacccgccccaatccgaggggggatgagctcagaggacctgcccaggacgctccttctccactttccaggaaaaccgagcggcgtgcgcgcctccgtgtcctcgcgggagctgggggtccccgggcaggcgctgacgcgctcctcccacgacccactccatcccaccctactccgggtcctcctgcggggctgcagccaaggagggcgctggccgggcacatcactcgccaaatcacataaataccccacgagcgaatgacttcctataataaataaactcagccgccaagaaggcatctccagccctgctggcgcgaggccccggctctgcggcttcggagggggcgggggtcaccgcggtacaaaccaagcccgcacttcccgcggggtgggaggcggtgttcaaagtcccgggacgcttcccgcccctcccccttcccgccttcttagaggagacctcggatgagcggccctaaaatccggattctcgagcccctccccctccccttagctcgtctctttgaaatttcaaagaaaatccctcctcggagcccggagcccggggctggtagcacctccccagcctcaggaagatgcgggcaggtttacaagcaagggcctactttatggcccaggctataaaacgcaaatcccacctccctttgaaagcgccctccgcccgggactcaccataaaaggaagagaagatgcaccccgcgcccctcgccgcggaccacccccaaaccccttctcccgccagtccccgaacttcccgtaacctcggcgtcctcggggtgccggggaccatcccggggaccgccgggaaagggggcgccggcggagaggatagcgagaggcaaagttggaggccaggcagagagagggcgaggagaggcgggcgggactgccggggagggtcgcagcgcgcagagccccgcgcgccaggcgggctgtcccggggctggcgggcgacgcgggcgggactaggcgctgcgccccccgcaggctgggctgcaggccgggggggatcggcccccgcggggcccgggagcccgcggcggggcggcggggaggaggctgccccgggccgctgcgctttctcatgcaaagcagcggcggggcggggcgcgcggcccgggggcggggcctgtcagcgctcggcttttctgcccccctttgcctttttgcgagtcttctcatcccgggacgcaaacctcgaaacagctgccggctggtcccggccgaggccggcgcagggagggaggagccgcccgggctgtgggggcgccgcgagctgggccggcctcggtgtgcccgcgccgccagcccgctccagacgcgccacctgggcgctccaagaagaggccgaagtttgccgcggccgtgagttggagctcgcgccgggccgctgcgccgggagctccgggggcttccctcgcttcccggtattgtttgcaaactttgctgctctccgccgcggcccccaactcggcggacgccgggcgcggagagccgagccgggggcgctgtgcgcagcgctcgggccaggccgggcgggcatgggcgggggcccgagcaggggtggagagccggggccagcagcagcccgtgcccgggagcggcggcgctgaggggcgcggagctccccgcgaggacacgtccaacgccagcatgcagcgcccgggcccccgcctgtggctggtcctgcaggtgatgggctcgtgcgccgccatcagctccatggacatggagcgcccgggcgacggcaaatgccagcccatcgagatcccgatgtgcaaggacatcggctacaacatgactcgtatgcccaacctgatgggccacgagaaccagcgcgaggcagccatccagttgcacgagttcgcgccgctggtggagtacggctgccacggccacctccgcttcttcctgtgctcgctgtacgcgccgatgtgcaccgagcaggtctctacccccatccccgcctgccgggtcatgtgcgagcaggcccggctcaagtgctccccgattatggagcagttcaacttcaagtggcccgactccctggactgccggaaactccccaacaagaacgaccccaactacctgtgcatggaggcgcccaacaacggctcggacgagcccacccggggctcgggcctgttcccgccgctgttccggccgcagcggccccacagcgcgcaggagcacccgctgaaggacgggggccccgggcgcggcggctgcgacaacccgggcaagttccaccacgtggagaagagcgcgtcgtgcgcgccgctctgcacgcccggcgtggacgtgtactggagccgcgaggacaagcgcttcgcagtggtctggctggccatctgggcggtgctgtgcttcttctccagcgccttcaccgt

SEQ ID NO: 1884807 - DNA, 4001 bp, Homo sapiens; identical to SEQ ID NO: 916234

SEQ ID NO: 1884808 - DNA, 4001 bp, Homo sapiens; identical to SEQ ID NO: 916243

SEQ ID NO: 1884809 - DNA, 4001 bp, Homo sapiens
caccccagcaacagcctttcacagggctggcaatcgatgcttcatttgactcacactcacatttagttcttgttcctccacagcctcctttctttttctaaccccacctatttccacccaagtagctcccagccccttccttttcctgctcaatacctgcccgggggcttgccccttccctggctcataccagccctgggagccagttctgtagtctcttctaattggagcttaacatttttgaaattgtcctcttggggtgtgtgctcttttgacagcattctttttggaaaccagctcttctttggagatgaagcgctcctagagaggcttcattggaaacatggtccttcttggggtggctgctaggggtgacctgggcagctggaaccaggaagataaagggaatggggggcagagtgagagcacatggtgagaagcagtcagccatcccatgtcatgtcccttaacatgtggagtctatcagggttgagtcattgcctaattaacatacaagtaggactgaggtcccgtatcagaatccaaatctatgagcacctgaaaggcacatctctgattttgaatgccattgattaggaattccactttccccagcaaatttaccttcccaatgagaagggattaactttgcaaacataggtcccattgtctggcccattggaggagttcagtaaatattgtttttctttttttttcttctgaattctgggtattgcttgaatctgccttctctggcttctccaaggtagattgggggaagctagcctgagattaaaccatgtctatggataatacacaaagcagaatcctgaaatgttcatggtttctgggctgtggcagtggggagcctggaacggatgagccactccaacatcctcacctccatgagctgaaaccttttacctgctagcacttgggtgtgaggtgtagtccccattcctatctccaatgactagccagcagaaagggctattcaaatgattcctggccctcacatcttggtcaataagtgcagcaggaaggattaaggttcaatactaggagggcttatctttgctccacttctttcccaaagggagaattcatcatttactggacaatcttttaccaccagtgacttactctaaaggatgccagcatgagacttacaggcatctgcaggctgagtctccgagtgaatttcaccttctggctctgaaaaagaagaggttaaagtcttcagaggtctcaagacagttaatatatgagtttttccctctgtaacccctcctgccccagcattttcaatcttccttaccttgctttacatcctccttagcatttcaaacatactttgtaatttacttaatatgttcattgtttgttactttatcttagaatgtaatttcaatgatgactgagtttctattctattagtgtatccaagtgcttagaactacgtgtctggcacagagttagtgctcagtaagtagctatggaatgaatatgtgtgtacatattgtacagagggaggcacggaagtccagagaaaggtagtgactctgcctggattatccagcatcaccagaggctggaatctgatctgaacctccattgacccagagtgcatcctgatttggcccctctggctcctgctccaggctttctaggttgcagaattcccgggatcatatgccctagtccctcacctccatacctaggtcatcccaggtgtgaacttttggttctgcagctttccacctctccacacagcatattacaaggattaaggaaggccctttctagtgctgaggtctctccagctgacagctcaataacccttaggggactgagagttgtggaaggaggccagattcaacatcaaggatggcgagagaggtggcggctaggctggctggcagcaggaccatgaagaacttcatggtggagctgtagcaggatcagtttttcctgggggaggctgcttagagttgctgaagaggcagcctggcaggggctttatttattttggggtagggatggactctggggaaactggacctgggaacatactaggtttcccctcctgagtttcccattctgaataggtttgtttttgggaactggagtttctgggaaaccggttaactggaaagtaaggcccccagccttccccctggctcggaccatgctgaaggtgtgtcggctccagcttttacccccagaagtccatggaataaggacatgggtgtgagtttccctctttcatggtactcattactgtgtaattttactttcattagtatgatcatttaattaacatctatctcctccagaagaatgaaacttccaaaatggctgggattatatctgttttgcttgccattgtttttccagtacctagcaggtatgtggcacatagtagagttctaggaaatattagtggagtgaatgaatcaaggaacggtcaggctgtcctctagggcagcggtccccatcctttttagcaccagggaccagtttcatggaagacaatttttccacagccagggggaggatggggatagtttcaggatgaaactgtttcacctcagatcatcaggcactagttagattagcgtgcaacctagatcccttgcatgtgcagttcacaatagggttcgcactcctgtgagaatctaatgctgctactgagctgacaggaggcacatcatggtggtaatgctcacttggctgttgctcacctcctgctgtgtggcccggttcctaagaggccacagactagtaccagtccgtgacctgggggttgggaacccctgctctagggtgcagataaaactccccatcagttcaggaatgaaggagtgaggcagttacagaaattctgactatatgccaggtagtgtcctgagtttgttcctatgggatatctcatttaattcgtgatggtttgggaggtatgtgttatttaccaaggaaaaaaaaactgatgttcatagaggtgagattacttgcataaggccacatatatgggtggatttgaacccaggtcagtctaactctacatctggggtctagtggctctaaaattggacaagatggagcagcgggatgcccagagaggcatctggagagcagatgagggttgtgcgtagggcctgggtcttggtcgtgggcctaggaactgatctagttgatcttgtttcctcctccagctggaagtttgatattctctctgaaacctctccaagaaggagaaggctgctgtaccctaacactgagtctcttatcctcagcagggggcatggcttgctgggcatgtgagtaggtaaggtaacgcctagagaccacagttggctgtgctagccagtgtgaggcctttgcccgggagagccctaaggggctggcagttgtcctccaattgttccagcaaagctctctccttaggcaaggtggtgcagtgaaggaagtttgtcttgggctgcctccaagcaccccttcctccctgactccccctctcaccagcaacctctcctcccatagcccagggcacttgggaacaggacgggggcagatgagggcattcacagcaagtctatgagggtagggtttcagcactgcaagcttatttcctaatatacataattcacatgttgaggctctcatcatctccagactaggctattttagtttttcactgctcttctggcttccagtctgtctccactacagtccattcttcatgctaatgctggagggatcccacaaagttcatgccacttctgtactcaaaagtctttaaccactatccatcaccatgtgatcaaagtccaaactccttggtcttccaccttcacagcctcatttcctacccctgtgaattattccctactcctggagtgttatacttgggttcatgccgttgctctgtcaggaatctctttcctctccatctgtctgctatgttcccacagcatgatccagatcagatgtcatctcct

SEQ ID NO: 1884810 - DNA, 4001 bp, Homo sapiens
cccacctcagcctcccaaagtgctgggattacaggcatgagccaccgctcccagcccagagagccaatcttcaagggacagagttgatcagacaacggcccgccatcttatgccagcctaccatcttgtgctctgtctgcctcatgaattcccatcatcatctgcagaaacgtctacccacaagcagtggctctgttttgaaggatatgtctctgtctcagttctctccaggtgcagcaccaactccccaccactcactagttaaggtggcatttgcagtttcagaactggttgcttacttattcagaattggaggaaaaggtcaagaagttgagctgtgaaatgcagaaaaaaaagtgaagaaactcagttttctctcaaaacaaaaaataaaggagttaaaatatacaaaaatgcaactgaaatctctgaatgtaattcacactctagtatgctcttttaaaaaaagatgaaagcacagaagcatacataaagcattctttgtaagctactctttgcttactaataacaaatgtaggtaaattgggcagatgtaaataaggcaccaccacaacacgtgagcgccaaccacagagccaagatccgcacactaaatacgggaagttgtaaaagactgtgacagactgtcactaaaaaacttgtcttcaggaattcggacgattatctgaaaagatattcaaagttcaattttgttggaggaagcaataaggaagtggggtgtctatgtcagagacgggcgcgggtatgcgagggggtaacgtatagagtaggttaaagagacgtagaaaatatttccaaaggcacaagtttagcatgagggacttccctcacaggaaagacacctggtgttttatatgtccttctgagcacagacagggtatttctatgaagttacaaagctgcaatcccgttctcatgtgcagcaccacaggttttgctttcaaatatctgcaggtgcatcctcctgcactcgttaaactaagggttttccttttctgtgctagacccgcttttacgaccacgctctccacctgattcacagaaagggttctacgaccgtcaggtcaccgccgcctttgtactttattggggagtcgaaggcctcagcgctgctcgcgatttccctaaggtggtcgggaaggtcccaaccacgttcttctgtaaaccagataaggaaggcctggggattccggccgcggaaaggcacagaggaggtgaacgctccggctgcccaagtgacgcacttgtaggcggattcggaaactcgtgctcttgagccggaggcggagcccccagactcagaccgaccccccagaaccgggcggccttgcccgaggcatgaaggctttctaggcccgcttctaaaagctgtgtacaatggagactcctggaataggcacatatctctactgtaatcagaacgagatgtaacatctaagacgcagggcagggctctggcaaagacacgctgggggaacgtgaaagaaagggccaaaactacgcagctggtcctcagagaccaaagactacgacccccagcattcaatgcagtgaacccctaggacgttgcatgccgggagctgtagtttctcaccaccgccacccccccgcccccccgccatctgaaagggttctaggggatttgcaacctctctcgtgtgtttcttctttccgagaagcgccgccacacgagaaagctggccgcgaaagtcgtgctggaatcacttccaacgaaaccccaggcatagatgggaaagggtgaagaacacgttgccatggctaccgtttccccggtcacggaataaacgctctctaggatccggaagtagttccgccgcgacctctctaaaaggatggatgtgttctctgcttacattcattggacgttttcccttagaggccaaggccgcccaggcaaaggggcggtcccacgtgtgaggggcccgcggagccatttgattggagaaaagctgcaaaccctgaccaatcggaaggagccacgcttcgggcatcggtcaccgcacctggacagctccgattggtggacttccgccccccctcacgaatcctcattgggtgccgtgggtgcgtggtgcggcgcgattggtgggttcatgtttcccgtcccccgcccgcgggaagtgggggtgaaaagcggcccgacctgcttgcggtgtagtgggcggaccgcgcggctggaggtgtgaggatccgaacccaggggtggggggtggaggcggctcctgcgatcgaaggggacttgagactcaccggccgcacgccatgagggccctgtgggtgctgggcctctgctgcgtcctgctgaccttcggtgagtgattctggaggagcagacgtcccccctccacacacgcggccgcttctcgaaggtcctgggggcgttgaacgtgggaggggggatcccggggcctgcggtgggccaagggacgtcaccattcctcgaaagagggcaagggaattacgtttattctcttcttcctctggaaataaaaaaagagagcaacatcatctaactgccctacagatctaatagtatctcgcccggaggtctcagcgacctcggggtggggcctctctgaggctctggctcccccgggagctgtgcgagtccctcccccctccccgcccggaggactttttcggccaccgcaaccttcggccatcccagctttcccgtcccctaattccccagactccgactcctcgcaagcccgtgtcccttcttagatgctggcctcgggagcgtgaggcctggggccagcggaatggcagtgtcagcgtgtttgattcagttttgctggagttcggttcttaacatttctcccccttctcatgcctctgggctcaatttcagttcccctcgccagaggttgcataaatcctatttgcattctgacctgtgctaacgaaggccgaagttttggcttgatcagttgggaggccttggctcggcctgcgcgcaacacgtgtgggtgtagaagaggcctggtatcagtctgcttaacgttatttataaatgatcggagacacactgtttagaagtggtgactgcctccgtatttcaggatctactggagacttcagcatctgaacttaaatagatgttctgtcttggctttacctttggtatttaaaccagggaatgcactctttcatccccacctcccttagttaccaactgaattttgcaacccctacccttccctatttgatcatcctccttggagaagtgtgatgttgaagagtttgcccgtgttaaatcttcagggtcggtcagagctgacgatgaagttgatgtggatggtacagtagaagaggatctgggtaaaagtagagaaggatcaaggacggatgatgaagtagtacagaggtttgtgttcatttgaacttacgtatacagataagccgtgtgaaccttgtgagttacggtcacttcttatgtatctcttctccaaaggtccagataaagtctaacaccctgtatttaaatacccggtgagttgtgtgcatacatacctcctaacttgtccctaggagtgatgaaaactgagtgaattcctttgaaaactatattgcagaatactagcaccataaactttgtaagactttatagaagatactttcagttggatttgtattcattaactgtgtacaccgagtaagtttaaaaatgggatttctgtcagttgaacaatattttaaaatttggcctcttgggacttattgacagttttgaagtcctcactgtggagcataaatgagtatgactttgctttttagtagaggaaagttgggatttttttttttctggcaattttaagaaccgagtatttccagtgtaatgttaaaggtagcctactgctgtgctaacataatgagacggtatatcagttatattttataaaggtttccattttaacccccaagacaatattcagaggcccctgtgctttcatcat

SEQ ID NO: 1884811 - DNA, 4001 bp, Homo sapiens
ggaatggattttaaaggcaaagttctcagactcagtggaaacatgaactggtaaactctcctcaagctcccaaggaaagaggatttgggtctttgttggttttggcccacagccatagaactgaaagtctgaatctggagtctctcaaagggacagtaacataaacctctagagatgaagtgtgagaaaagcccacccttctgccagcttgtaatttagaaaggtgcattcattcaacaaacatttactgagcacatatgtgccaggtatggttcttaatagcagggatacaagacagaaaaagacagacaggagcccttggccctgaggttttcattctagtgggcttttttgtttttgtttttttttttttgagacggagtcttgctctgttgcccaggctggagtgtagtggcaccatctcgactcactgcaacctccacctcccaagttcaagcgattctcctgcctcagcctctcaagtagctgggactacaggtgcgtgccaccatgcctggctaatttttgtatttttaatagagacggggtttcactgtgttggccaggctggtcttgaactcctgacctcctgatccgcctgcctcagcctcccaaagtgctgggattacaggcatgagcaaccatgcccagctctagtgggcctttaaaccttggactctgagagctaacagagacctttgatattctctaactttacctcctcaggaaatgcaagcccaaggagaagaggtggcttgttcagaatcaaagaacaaattagggactcaatcaaggtaaaaatacagggctcctgacaactagtcaggctagcacttccccaagaagcaacaaccccaggcactcaaagtaccctaggttgagatgatattaggaagattcaaactgtcaaattcaatttcccaagatctgttccacaggagataagcagatcttactccagagaccactgattgaagggcattctggtcccagaaccatggagaattcgaatatgaggtggaaaactcaaaaaaaaaaaaaaaaaagctaaactctctggagagtagaagtctgggagaaaaacaaaccaaacccattctcctattgctacccagagacactgtcaacgttttgagctcatggggaaagtgtgggcttttcacattgtcaatgtctatgctaagggagtaaggcagcttgaaacctttcgttcctagatcccatagtccccattccccttccagctggaaatctgtgctgtgaccagaggaaccagaagcagggtgagaacacttagtggactgggtcctaagatcaaaggccagtctcgtggcagtaatgacagttcctagggggactgtgatgtcactatattttactcctccctggggtgggggctggctatcagcatgaggcccgagtcaccactttgagatgtgggaggtgggtgcagggccaggacccaggaccttggagatgtcagcccaaagaccccagggaggtcaggcttggggcagcagaaggtgaagactgagtatggagcagggagccccagaagtcacccacccaaagtcaccctggtgcgactggtgagggcagaggctgggctgctgagggggaggggctggctgacaagattttggttgggggagcccagaggcactgggtggggcccagcccagtgtgcctcaggagtgccacagactctggcagcagtcctgccattggagggagcctgggacggtgggccacaacctggtgcatttacctttttcttggccatggccaatttgctctgtcaggtttcctccgatatcacagggcagggagaggcggggatggggccacatcagcatgatcccagtgacaactactaaacacttctagtagcctaccacacagctgtgtgactgagccaggggaggtgtaaacaaggtcgcactagaatgcataataggggtatggccttaatgctccaagcccattggtctatgagaaagctgaaagggaaaggaggcatggtcaggcagcagcgtgtccagagggacctgtggcctcacaaggaaagctgctcatgcaaccgctgtctccgctcactctgggagagaggcagggccagctttcattttagaaactttaaaactttaaaaaataaactttaaaaataatatgtctgtgtactttatatatgtgtgtgtctatatgtgtgtgtatctatgtgttcctccggagctgtcttcattatccagcttctgtgccaggcctatgattttggcctttatttttcatcttcaaatggagtagaagaattaccaatattccatcaattgaggtacaaatcctgtaaaaatggaaaaatccatagcacgcttgatgattaatgaagcagactacgttatccaacattccaatgagacaaaataatcatagtgatttctcttttttggaaaaagtttctcttattctcctacattattgttaagatttttttttacacaagaaacatgtctaatatctttaaaaacataaagcttttgggctgggcatggtggctcacgtctgtaattccagcactttaggacactgaggcaggtggatcacctgaggtcaggagttcgagatcagcctggctgacatggtgaaaccctgtctctacaaaatatacaaaaaatagccaggtgtggtggggtgggcacctgtaattccagctacatgggaggctgaggcaggagaatcacttgaacccgggcggcagaggttgcagtgaaccgagatcgcgccactgcacttcagcctgggtgacagagcaagactccaactcacaaaaataaattaaataaataaataaataaataaataaacaaagctttcaatttaataagcattcaaagctccttaacagtttaaagcaaatacagggcccttctaaagtaaggctaaatgctaagtgataggggagagaaaaaggacataaataactcctactctcatggggttaatcactaaattctatttttctagaatcacctggaatctctaaaccttgtaaatgaatctgaatttctcactcaatagttggctatgacttacaatcatgaaaaccaagaactgtgttatgtcattgtgtattgcttgttatgtgaattccacactaggttggtatcaatggttgaagctttcatgatttgatccataacctttgtgcttcttatcccaaaccaaactaagcttttttctagagttctacaatttgtagttagttagtgtacaagagtggttctcaaaaatgtagtctctggaccagcagcagctaagaactttttacaaatgcaaattatcaggccccaccctagaagtgatgaatcagaaactctggagtagggcccagcaatctgtgcttcaataaaccctccaggtgttcaagaacctctggcatacagcaggtagaaaaatgtgtttccttctgtaggtccaaagccagggatgctatatgttctgtcttgatatgaaacaatgacatgcaattaaaagacataaatctccttcctacttccaccctccatccaatgtgttttatttttatgagttaaattagaaaacaagtggcaatcagagatttagtctaaaaagtgtatttacaggtaacagttctcatccagcctgatctcacacaataccatttacatcctcttacatctaaagttttagaaaaggatcttcacaatgtaagtctcaggcacagtaggagttctataataaaagatcaagtagatctgaatgtccaaacttattagaaaaaaaatggaatcattggttatattttcaaattgcattcaacatgaaattaaaagttttgaaattttttcaccttcataattctaagttaatagaattaaaccagaatactccattctttcaaagcctctagccaggcaaaattttactctattacttcttgctttcaatggatacaaaggagagtcctggtaggcacattttgt

SEQ ID NO: 1884812 - DNA, 4001 bp, Homo sapiens; identical to SEQ ID NO: 916276

SEQ ID NO: 1884813 - DNA, 4001 bp, Homo sapiens
ctcaccggcaatgcgaggtgtttcaggtagaaggaacagcatcaatggggtgttggctagtgtttaacagctggctctctgaaaaagcaaaataaaacacacacacaccaaatctgatggtctgtttccatgatgtgagtacctccagctgggccgaactgacatcactgaacacagtggaaagtgatgactgcagttgtctctcctgggagcttcaacacagtacaggctgacaaaagtgggcagggggtaagggcaggtggtgggagtggcctctacgccagagaagggaatggagaggtcaggctggctagagagtggggttgagtcgtccatgcccttgaatgccaggatgagggctaaagagtcaaatggaatgggtgacttcatatgcagaagtttttacaagagaagagaactcagtttggccaagagaagtggggtcgtcatgttggtaatcacgtaacagtgatcgttcagtcatgcggaatgctttcaaggtgttggacactgttcattttttatttttagtttttgaggcagggtctcactctgtcgcccaggctggagtgcagtggtgcaatcttggctcactgcaacctctgtctcctgggttcaagcgattcttctgcctcagcctccctagtagctcggattacagttgtttgccaccacgcccggctaatttttgtatttttagtagaaatgaggtttcgccatgttggccagactggtctcgaactcctgacctcaaatgatccacctgcctcggcctcccaaagtgctgggattgcaggtgtgatccaccacacctggccgcttgcagggtgttggacactgtggatatcacctcattcattctcctaacaacccaagagaagaggaactgaggcaaagagaagttaagcaagttgcccaaggccatacggctagtaaacggcagaacgaggctcaaacccaggcactctggctctagagtgtgtgttcctaaccactgtgctctagcacctcggaaccttagtctcttcatctgcaaaatcagcactgaggtgacaaggccaacgagcagagggttggagttacccagaacaacaacaacaacaaaagtaatagtaacacatatttggtcaaggcttagattctggcgtcatggggatctgggttcaaatcctaattctgccttagccgattagggtccctatcctcttaaagccttggtttccttatctgtaaaatggggatatcatgaagctgttagatgttaaatgagaaaatgaatgagaaaattgcatgtactgtccataaagttgaaaagataataggggtgggaaggagaacagtccgagtttgaatgcaggtgggccctggggcattgtctggactgaaggacaagggtcagttgaattgccaaagagctctgagactggctgaagggacactcgtcttgtgctagctgctaagaccaaggggaagcctgtgcctcgcccgaattttagtcttgcaaacagctgctcacccagtaggagagaattgtgataaaactcatagccaccatttcttgaatatctactatgccccgggacacagcagactattttagagaatttgcgaaggaaacacagtgacatctgttggacaccttgcaaactaccagctcaggatagttaaatttgaatgttagatggagggaacttcctttccacaatgacatgattttgtaaagctgagtgtatggcagttgtcatgattaaaagcaagtgccatgcagaagttattgtgtaacaggaaatgagattagatagcgtccaatctaatctcaaggtttgagtagctgtggacagcccaacaggcacaggcctcccgttagtacatccatacgagaagttaagaatgagtgaaaatagtttttttttttttaatttatgtgcattatttttttcaagcagctaccttgttaggacatacttaatagttatcttggcctacctactgcacttactaaacaactgttcactttttaatttttaattttcagatttttttgagacggattgttactctatcgcccaggctggagtgcagtggcgtgatctctgctcactgcaacctccgcctcccgggttcaagctattctcctgcctcagcctcctgagtatctgggactacaggtgtgcgccaccacatccagctaatttttgtatttttagtagagatggggttttaccatgttggccaggctgatctggaactcctgacctcaggtgatccacctgcctcggtctcccaaagcgctgggattacaggtatgagctaccatgtccggctgttcctttttttttttttctttttcttttttttttgagacggagtttctctctgtcacccaggctggagtgcagtgtcatgatctcagctcactgcaacctctgccttctgggttcaagtgattctcctgcctcagccttccgactagctgggattataggtgcccactgacaagcctggctaatttttgtatttttagtagagacgggttttcaccatgttggccaggctggtctcgaactcctgacctcaagtgatccacccacttcggtctcccaaagtgctgggatgacaggcatgagccactgcgcccagccactgttcgctttttttctcagtggttctctagtccattgccttaaccactcaccatgactacagctcttatttgcagtgactctcaagaatgcaaatgcaaatgccattcctgacctcgagttaattcagctttgtcccctgagcatgggggaaaggcaggctgggggctggaactttctgcttgtgtacctatctctttagactctggaggctcctccccaatctctgtcattccctctccaaccaaatccacctgccgtcccagactcaaatgctcagccacctaactgcctgaggacccagcagttaatgagtttacatgctgggggcaggagtcagggccaacactccttggttcctctggctccctggaaagggaaagtcaccaagaggcagctgcaggcagcaaagagaataagcaggagaacctcaaagccacaaagggacagcacacagcatcttccctgtttagcctggacttgagaatgctgtccccagcagtaagctgctcaacctcaaagcaacttgcacgggggtttacaaaaaaatgcacttggccgggcacggtggctcacgcctataatcccaacagtttgggaggccgaggtgggtggatcttttgaggccaggagtttgagaccagcctggcaaacatggtgaaaccctgtctctaccaaaaatacaaaaattagccaggcatggtggtgtgtgcctgtagtcccagctactcaggaggctaaggtaggaggattgctcgaacccaggaggcagaggttacagtgagctgagatcgcaccactgtactccagcctgggtgacaaagtgaggctctgtctcaaaaataaaaataaaacataaatgcactggaggaaagagggtaccactctccttaaggcgggggctgccaacttgtcctgcacagcccgtccgcctgcctcaggtggacttaaagcccagctctgagggactctgagcagtcatttaacctctctgagcctctctttcctcccctgcagaagggggattataacagttcctaattcatgagttgttcttggagtgaaatacattactggccaggtgagatggctcatgcctgtaatcccaacactttgggaggctgaggtgagaggattgcttgagcccaggagttcgagaccagcctgggcaacaaagcaagacccccatctctaagaaaagtaaataaataggcagggtgcagtggctcacccctgtaatcccagcaccttgggaggacgaggtgggcagatggcttgggctcaggagtttgagaccagcctgggcaatgtggcaaactcttgtctctactaaaaaatacaaaaattagcgaggcatgg

SEQ ID NO: 1884814 - DNA, 4001 bp, Homo sapiens
gtctaggggaggggtgaggcaagaatggagggagacagggagaccgggagcgtaaggcagcgccgcagccggcccggcgagaccgaaagagccccgtatccgccgcgacagcctttggcggtgggcagtgggcaggctcagctcgaaggctcagggaggaaggatcccgaactgagatccttgatccttttcctccagggtagcactggggatgaacagagagaaagaaggagaggaaaataattggtgtggggatatctgcggaggacttacctttttcctggacctcacagctcgttttcgcctcctctgggctcatggagacattttaaggcctaatcattgctttttaaattgaaattctaatggcaagggaagggaaggatgcacagaaaacaatgatggggaattctggttcaatctgatgctccaaaagcctctaattgttgtcacctccaccctcctcaactggaaaaatggcctctgggatctgcccccacctcccactttacctttctgattgagagcacctccgggatattagggacctgagggtctaagtcccgggtgggagccgccaggagcaggggtgttggtctgtggaactcccaggcctcagtgcctggtgctctcttaccctgtgttttcatcataaaaaacaaaggaagaggatttgattatttctggtgatgttaaatgatcctggctttcaaagcagctctgaccccaagatctaaggtgataagtgtctctgccatagacgtttaatctgggcaaagtgccacttatgttacaaaatgcctgggctcaacgggctggaggggtagccgggaagccccagggagggaacagcaggctctctttggcagtatctagagttcggtggatagtattttaaacagttgaaatggactggggaggccctttcttatgtcccctcagtctgggaaggggagctccagttagtgaggtggtttatgagctggacgcttccccctagtgtgggaaagatagagatagccagacctcaccctacaaaaatgtgcttcatgtctgtgacataaaattggcaggcactttggagatttagggacttgcagagagtggggcagggccagacaacctggtgaaagcagaggctgaggtgtgattcagggtgggtgggggtatctgagggagtaagcctgggaaggtatcacccaaaaccatttcctgagagaagccaaatacacacaatgcactccaatattgaaaaacaccagatgatctgcttggaagggatataaacaggccaggcggatgcaagttaataaaacctgaaaaagcccaggcaggaacacttaaaatgccccagaaacaaagcataccatgacaaattctcacccaacacacaagtacacgcaccggaatgttccccaacacagagaaaaagagacttccctaccttgggcctccactcgtgaacactcaggcgtacctgcccagctccaagagtgtacacaaatgtgtgcactctcataaaatgacccaaagaaacccctggggcctgcgggcaggcaccggctgcacaaacaccccacagagccagccccatgtctcctgagcctcgctaatgcacgatccatacccggagataaaagtctagacaatagatggctgtttatgacaacgaggctctccaagtttggggccaggcgataaatctctggcgaatcttcctgtaactcaacttctgactgtagtgaggagaaaaccactgagcccgccgaaaggaaagcagcaaaatgggggagacttgtaaatcctgagcagaaggcactttccttgctggggcaaggaggcataggccacaacactcaccccacggagcagtcctcactgtggaagctttcggatcaagctccagagcacaggcgagtcagagttccccactgcctgcctaggcttccaggttccggaaatcagggcagaatgtgcaggcagaaggcagggcctggaggctggaacagatcccaaacaaatgattcttgctgggggcaaaagatttttttttgtttttgtttttggtgactggaatctttttgctttgtgtcacctgaagtttttcaccccatgccttcccacccctctcttttctttttccttttggattgattagctgtttgttcccttttgcattttcgacccaggcatctgatcgctaataaagagttgctgaagttgatctcataaaaatgccgcgagctcactttgatcaggaggactaggtccgagccttaatgtaggagctaaagccagagaatcagggctccggccaacccgcctctgctctgtggtgaggcgggagatctgggtggcccaacagggcaatcccacccagaaaaggtattttctgtgccactacaactggcttaggaaactgaagcccaatagcagcggctccatttccagcctgcttttaagacatttccttcattttggagcatttggtgagggggccagtgaaaccggctcgtaaaatagggcttttatgggaagaaatagggtcgggttgctagcatcctgggacaatctctccacagaggaagctgggtggggcctgtgggggcaaaggagctgtccttctccctccccactacctcctccataggtcccaggaacctctgagcagcgtccaccagcttaggtggcctgacttggggactcaggcttggggcaatggccaagtctgagaagaggtggaagccaggaactagcagtcccacccgcttcttgttccctggctggggctggggtgtcccgggtgcaagataaaccactgacctgaaaatcccaaagcatactaaagggattattgcaggcagtgatattactgtaagggagagaaatataggcaagaaggtgaaagccaatttctaatgaagtctccttgctggcccagcctgtgaacaaacgagagcgtccatgtgtgggactctctccgcttatctttttattgactccacacaggctgaatttacaatccaagcccactggagcatatgtgggccccatttcttctttcagcattttcctccccagttcatggtctgtgggatgggctcctttccctaccacgatctgctctctagaacccagagcagtggaggaggtagacaagctaacaggaggccccaacgctgtgtgcgggagtttgctctgggagccgcccagggtagaatttaggagacactgtccccttcttaagctgcccctgttgtccgtgtgttggagggaagggtgctggagtctgccttaactttggtccagctacctggacagctgcccagaccgcagccgcctgctagcagccaggctggctgatggcgctgactgaggacaccaagagccagtggggagggccggatggccctgctgcagagaatttcaggtgaaggccaggactcaaagcagatggaggggtcacaggcacccaccagataagatacaaataagccacctggagcgggcttgacaaggaagggattgggggccagggatggctcctgtacagggaggtattgatgctgtggccagaatccacaggctgagagggtgcagcctagggcaaacatctcagctgaagcgtccaggtagcctggacccagggctgggcagggaggctactccagaccatgggcatttttgccagtaaatgtctagctgacctcagtggccagggccttctttccttgaccgtagcagcaactgacagttgctagaggttttttgatttgttgaaaaactaagccatatcaacactagagaacattttaaactttatgccttacttttaaggggaggaatattactttccagaagtctctgttgggagaccccagcgtttcctagacatcaactctttgacattctttcttgcatttcttttttgtttcaaggaaatagggccgccagcagctccttgttgccgcctggctcacttttatggtggcccaggaata

SEQ ID NO: 1884815 - DNA, 4001 bp, Homo sapiens
gaaggatcccgaactgagatccttgatccttttcctccagggtagcactggggatgaacagagagaaagaaggagaggaaaataattggtgtggggatatctgcggaggacttacctttttcctggacctcacagctcgttttcgcctcctctgggctcatggagacattttaaggcctaatcattgctttttaaattgaaattctaatggcaagggaagggaaggatgcacagaaaacaatgatggggaattctggttcaatctgatgctccaaaagcctctaattgttgtcacctccaccctcctcaactggaaaaatggcctctgggatctgcccccacctcccactttacctttctgattgagagcacctccgggatattagggacctgagggtctaagtcccgggtgggagccgccaggagcaggggtgttggtctgtggaactcccaggcctcagtgcctggtgctctcttaccctgtgttttcatcataaaaaacaaaggaagaggatttgattatttctggtgatgttaaatgatcctggctttcaaagcagctctgaccccaagatctaaggtgataagtgtctctgccatagacgtttaatctgggcaaagtgccacttatgttacaaaatgcctgggctcaacgggctggaggggtagccgggaagccccagggagggaacagcaggctctctttggcagtatctagagttcggtggatagtattttaaacagttgaaatggactggggaggccctttcttatgtcccctcagtctgggaaggggagctccagttagtgaggtggtttatgagctggacgcttccccctagtgtgggaaagatagagatagccagacctcaccctacaaaaatgtgcttcatgtctgtgacataaaattggcaggcactttggagatttagggacttgcagagagtggggcagggccagacaacctggtgaaagcagaggctgaggtgtgattcagggtgggtgggggtatctgagggagtaagcctgggaaggtatcacccaaaaccatttcctgagagaagccaaatacacacaatgcactccaatattgaaaaacaccagatgatctgcttggaagggatataaacaggccaggcggatgcaagttaataaaacctgaaaaagcccaggcaggaacacttaaaatgccccagaaacaaagcataccatgacaaattctcacccaacacacaagtacacgcaccggaatgttccccaacacagagaaaaagagacttccctaccttgggcctccactcgtgaacactcaggcgtacctgcccagctccaagagtgtacacaaatgtgtgcactctcataaaatgacccaaagaaacccctggggcctgcgggcaggcaccggctgcacaaacaccccacagagccagccccatgtctcctgagcctcgctaatgcacgatccatacccggagataaaagtctagacaatagatggctgtttatgacaacgaggctctccaagtttggggccaggcgataaatctctggcgaatcttcctgtaactcaacttctgactgtagtgaggagaaaaccactgagcccgccgaaaggaaagcagcaaaatgggggagacttgtaaatcctgagcagaaggcactttccttgctggggcaaggaggcataggccacaacactcaccccacggagcagtcctcactgtggaagctttcggatcaagctccagagcacaggcgagtcagagttccccactgcctgcctaggcttccaggttccggaaatcagggcagaatgtgcaggcagaaggcagggcctggaggctggaacagatcccaaacaaatgattcttgctgggggcaaaagatttttttttgtttttgtttttggtgactggaatctttttgctttgtgtcacctgaagtttttcaccccatgccttcccacccctctcttttctttttccttttggattgattagctgtttgttcccttttgcattttcgacccaggcatctgatcgctaataaagagttgctgaagttgatctcataaaaatgccgcgagctcactttgatcaggaggactaggtccgagccttaatgtaggagctaaagccagagaatcagggctccggccaacccgcctctgctctgtggtgaggcgggagatctgggtggcccaacagggcaatcccacccagaaaaggtattttctgtgccactacaactggcttaggaaactgaagcccaatagcagcggctccatttccagcctgcttttaagacatttccttcattttggagcatttggtgagggggccagtgaaaccggctcgtaaaatagggcttttatgggaagaaatagggtcgggttgctagcatcctgggacaatctctccacagaggaagctgggtggggcctgtgggggcaaaggagctgtccttctccctccccactacctcctccataggtcccaggaacctctgagcagcgtccaccagcttaggtggcctgacttggggactcaggcttggggcaatggccaagtctgagaagaggtggaagccaggaactagcagtcccacccgcttcttgttccctggctggggctggggtgtcccgggtgcaagataaaccactgacctgaaaatcccaaagcatactaaagggattattgcaggcagtgatattactgtaagggagagaaatataggcaagaaggtgaaagccaatttctaatgaagtctccttgctggcccagcctgtgaacaaacgagagcgtccatgtgtgggactctctccgcttatctttttattgactccacacaggctgaatttacaatccaagcccactggagcatatgtgggccccatttcttctttcagcattttcctccccagttcatggtctgtgggatgggctcctttccctaccacgatctgctctctagaacccagagcagtggaggaggtagacaagctaacaggaggccccaacgctgtgtgcgggagtttgctctgggagccgcccagggtagaatttaggagacactgtccccttcttaagctgcccctgttgtccgtgtgttggagggaagggtgctggagtctgccttaactttggtccagctacctggacagctgcccagaccgcagccgcctgctagcagccaggctggctgatggcgctgactgaggacaccaagagccagtggggagggccggatggccctgctgcagagaatttcaggtgaaggccaggactcaaagcagatggaggggtcacaggcacccaccagataagatacaaataagccacctggagcgggcttgacaaggaagggattgggggccagggatggctcctgtacagggaggtattgatgctgtggccagaatccacaggctgagagggtgcagcctagggcaaacatctcagctgaagcgtccaggtagcctggacccagggctgggcagggaggctactccagaccatgggcatttttgccagtaaatgtctagctgacctcagtggccagggccttctttccttgaccgtagcagcaactgacagttgctagaggttttttgatttgttgaaaaactaagccatatcaacactagagaacattttaaactttatgccttacttttaaggggaggaatattactttccagaagtctctgttgggagaccccagcgtttcctagacatcaactctttgacattctttcttgcatttcttttttgtttcaaggaaatagggccgccagcagctccttgttgccgcctggctcacttttatggtggcccaggaataaactttggtggtcaaattcaagtgctcagtccagcagctgtctcctcacaggatacagcccctacccccatctcagtcctggctttgctgaatctgccttgggggattgggccccacatcaccctggagggccaggagggggaaggaagcagagcctt

SEQ ID NO: 1884816 - DNA, 4001 bp, Homo sapiens
gggagtgacgagagaaaaacgaatacaaatctgcaattgattttcataatgtttctgcggtgtttgcaaaccaatcgcctgaacgtccccgatcttacctaagagagaacccctcctacgtctgcgaagtgctccgaactgatatatgacaatatctactttggatcacgtgctcagagagagagagactaagacggataacgcgtcatctcgccttcccaaattttcccccctcgctagaccgggtccaaaacctccatccggagccggcaggagaggagaacgatgtttaactcggtcaacctgggcaacttctgctctccgtcgcgcaaggagaggggcgcagatttcggcgagcgagggagctgcgcctccaacctctatctgcccagttgcacttactacatgcccgagttctccacggtctcctccttcctgccccaggccccctctcgtcagatctcctatccctactcggcccaagtgcccccggtccgggaggtctcctacggcctggagccatccggcaagtggcaccatcggaacagctactcctcctgctatgcggcggccgacgagcttatgcaccgggagtgcctgcctccttccaccgtcaccgagatcctcatgaaaaacgaaggctcctacggcggccaccaccaccccagcgccccgcacgcaacccccgccggcttctactcctcagtcaacaagaacagcgtcctgcctcaagccttcgaccgtttcttcgacaacgcctactgcggtggcggcgacccgcccgccgagcccccctgctccggcaagggcgaggccaagggggagcccgaggcacccccggcctcgggactggcgtcccgggctgaggcgggtgccgaggcggaggctgaggaggagaacacaaatcccagctcgtccggttcagcccactccgtggccaaggagccggccaaaggagccgcccccagtaggtagcagcggccggggaacgggcgggcagcgagggagggagcgagagagggagggcgagagaaggggggaggcaaggggagcggggacggcctcgtgttttgggtcagtccgattttatgtggagttttataagcattcaaaggattttattataacctacaaagccctctctcccaacgactcgactttttacgatggagaaggggtggggagggagggaaaagggctctttggaaaagccgggtgaacccccctcccccgttatctccctcggtctgtgaaatttttaaaagcgcaaccattgcgggcgatattaactttgatcgtgaacttagaggagcatttaaggaagtatggggagccgggctgccgaggagtggggaggaggggaggggtggagggggagaaaggggagggcgagggaaagacagggagagatccagagagggggagaggtgggggagaggagcaatggagcagaacctgagaccggagaggcaagccaggaccgctatgatccttcttaaaactagttttgaaaatgttcaaactatgtgttcgcgggtcctcgagcagaaacccaagcaactctggggtcagcggcgacaggggaatggggcgaggcggcgcaggactccactgcgttccaggcgggggtctgggcgtttctcccgggtccgcggccttagtgcttgcctagaactgcggtgtggaaggcgctgccccgcgggcttcccggggcgccagggccccggaagcggctctctggtgtctcggtgcctgctggccggcttcctccccgcctcccgactgctctcgccagatttcactgcttcgcgcctgttctcagctttccccccagatttctgggggaggggttgggctttccgaaccactaggagggcggcccaggaagggcccgagggcggagggggagcagacagggggcccgaggggacgcacgtgtacctggagggctttccttctgtcccagaccctgtcagccgcggctctcgcctgagaactggggacggggtggcgcagtggcgggggggtggggacccgctagacctggcagggggtcgaggcttgcccgggtgctgcggctgcaggagagccagccgcctggcgggagggctgcccgcggtgggctaggagaagggccgctgagcgctcagcgggctggggtcgcccgggtctcacgtgtctctctcccccctctcctcgcacttgccccctcccctccctccagacgccccccgcacccgcaagaagcgctgcccttattcgaaattccagatccgggaactggagcgagagtttttcttcaacgtgtatatcaacaaagagaagcggctgcagctgtcccggatgctgaacctgacggaccgacaagtgaaaatttggtttcagaacagaaggatgaaagaaaagaaactgagcagagaccggctgcagtatttctcgggaaatcctctgctgtaacctgcagaccgggcccttttgggggcggggggaggggaaaattattttattttatttttattttttattttctaactcgtcttctttccgccggtggaaaactggactgtggccagggctggcccccaccgctgtggccggcactccattccggaacctcctggaccctctatctgactctcgctgtgggacagggaccgggcctggaaagggggtgaagggaagtgtctgatgcacggcgagtgaacaccgttggcgccgaggccaagactttgatttaaaagaaaacacacctcggcgacaatgtcttgctgctcggattaggtgggggaggggcgacagtagtgagcgcctgagccgaacaatcctcgaactaaaagccttcccttgcccatgtgaaaagatccgctaagacagcatgtctgccagcggaaacttctcgagctcccccctctaccccgccccaccttgcagctaaatgtgatcctgccttgctgtgaaatttctgtaccttcaacctggtgttaggtgtgcaaagtccgtgtcctacctccgtcttcgccaaggccccgcccgagcctagttgttctccccctgaatgtgtagaaccttcctttgaaatttcttaatcggtgcattgaggtttccacatctttttccaagcagtgccccacttcatggatttatagctatagtctatgcagtcgttacctcttttttttttttttttaagaaaattgaagattggggtggtggaggcagtagggagatgggattgggcacctcccccgtgctggggcctggatttttgtaaataaatttcccaagcgtttctttccacctggagggaaagggggggacgcccccagtgagattcaaatcacgcatctctactcctctgcgtgagtgcgtgtgtacatgtgcactccccaccctgctcccttcccagagggattgctgtgaaatttttttggtggcaaataaagataaatttcattctgttcaatattatgattttatttgacccttttattaacccctctcctcttaaaatcctccatgctcccatggcagcggcggaggaggaggaggcaggcaggcagagcccagcgggtgaggacaggcaggcagaggtgagataggccggtgctagccggcctggagctcctctccgctggcagggccaagagtatggccgtagtctcctcacattctcaagctgaggacattccatagctactctgaagctctcctttctcacgtgcagctcgagctgtgtccaaacgcccagcaacggctttctgtttaagtacacgtttgttgtggagttaattgtaaccatcatcgaatttaaatttataggaatttttttggctccaccgcccttctgccagatgtctccgtctgtcgcagttaaatgtgtagtgtggaggttagggcttttttttttttttctctaggagaaatctgtattggaatttttatacactgtttttaaggaaggaggggacagaaggagaaaccagccccctccctctcctctc

SEQ ID NO: 1884817 - DNA, 4001 bp, Homo sapiens
acctaagaaagccgtgggagctccattgcgggtattcaaactggggactgtgtcatgtggcttaacccaggcccctgagggcagaggtgggttctgcagggtcccccagagtggcgccagagagaggtccctccaaaggtgtagcactgaatctcccccattttccacgttttcttttgtatacctatagaaagcgcgctctccttcgcatccagggcttttagctttcccaggctgaatcttgcgcccccaccacccgcatttctttgaaaaacctcactctgagattttttatttctattacatattgaaatatcagtctattctattgcttttatttccctcgttttattctttctccatttattgccgagtatattccattgcctctcgatcccctgccccaggtgatgaattctgtatttgggggttgtcacacccctctccgcttgagaaaaatccagcgaggtaaagcagagtgtccttttcagacatctagagttttggggaatgtggctgaaggtaggaaatggaaacacaatcccggcatcaaaggctcgctacgcagcatcgggttctttccagccgcgagcggaggcgagctgccagggccagagcgctcctgactgttttctattatcttcatttattattttttaaaacctggtttcttccccacccttagcttcaagccccaatccagagacttcagcagtcacagtgatcggcttggcggtagggggtctgtctctccggtgcacatcctatgcctaggcggaggcgcccagttacagcgctctcctccctacacccctttgcgtcggccaaattcagcctcccccccctccctctccctccctggggcctgccgggggcgtctccctgtccctttaaatctcccagctcccgcctcctttggcctacctgagatccaatcagcacagactttttccctttcgccccgccccacctcgaggggagggaaccccaggagacctggccggggcatcacgtgcgcagagcgggtcacgtgggcgcgggaggggtgctgagaggtggagagcgggagccggcggatttcttaatgaagtgtctccgcatgcgtagagggaatgtagggagggaggtggaagcactaggaggaggggaggggtggagagaaaagaggggagggatggggggaggggaaacaggagcgaggtgtctccctagctcgctgcctctggcaagtggagtttttaaaaagctccagcagatcatgtcatgacgacttcgctgctcctgcatccacgctggccggagagccttatgtacgtctatgaggacagcgcggcggagagcggcatcggcggcggcggcggaggaggaggcggcggcacgggcggagcggggggtggctgcagcggagcgagccccggcaaagccccgagcatggatggtctgggcagcagctgcccggccagccactgccgcgacctgcttccgcaccccgtgctgggccgcccgccggctcccctgggcgcccctcagggcgccgtctatacggacatcccggccccggaggcggcgcgccagtgtgccccgccgcccgcaccccccacctcgtccagcgccaccctgggctacggctaccccttcgggggcagctactacggctgccgcctgtcgcacaacgtgaacctgcagcagaagccttgcgcctaccacccgggcgataaatacccggagccgtcgggcgccctgcccggtgacgacctgtcctctagggccaaggagttcgccttctaccccagcttcgccagctcctaccaggcgatgcccggctacctggacgtgtcggtggtgcccgggatcagcgggcacccggagccgcgtcacgacgccctcatccccgtcgaaggctaccagcactgggctctctccaatggctgggacagtcaggtgtactgctccaaggagcagtcgcagtccgcccacctctggaagtctcccttcccaggtaaggaagggacccgagcgccgccgccgccggggacccctccccgccctgcctgccccggggctccgcgccccaaccacccccgccgtctggccccggcgcgcccgctcggctgggctgcctatggagccggccgggcgagctgcactgaggaatgcgccggggaagaaatctgctccgacacgttctctgtagctgcccggccgagaatgaagcaatcacaggcgcccgaaagccgggccgccggctctgctctgtccggtagctcgcctccgcctccccttgcaggctccagcctcccgccgggctcttggcccctaaacctgcttccggcaagggatgggggcggggtgggcctatagtgccttggaatccaggacaaaacccccaacccaccgaataactggggagggcggagaataagaacccccactttctttgacagaattcgcaggatcgttcaggcactagacagtattttttaaataggggactaatttgctggggtctacagaaatgtgagatttatttttttcctttcctgacttattttaaaaatctggccacgaatttcctgattgttgagggaacagaagatccaaaatctctggagagggagtggagaggaggctagaatccctccccagcattgtaaagttttccttgcctctttggtatattgagctcaaacctatagacatttccactgccaactcccccatatgtggtcgagaaagagagttagttattggtgccccagacacagaaagaagggcgtggggatgagaaatgggagaggaagacctgttcaagacctgttcaggggcttctggagtccagacccaggctggggaccccttggtcttgtctggctaaggatgggaagggagaattcattcccctcttgttccgtctccagttgaagagagaaaggctcctgtaaatcccaccgctctccttgcggacaagaccagtcccaggtttcccaaaaccacaccaagagctttggatcctgccttgtgctgagaaatcaggattccggtctagggagtccagcatttgagtctgttctccctgtaagcagagctcagtgggagagcgttctcccttctgatacctacagaggtctttgggggtggggggcccagggcagccacagatgtctcccgacagtgcccagctccccgaccagctccacgtgccaagctcagggatgttttccttggaaagcatagacccaaagacctcctaagggtgggcctgaaattcctctgcatacggaattggaagaagaggtaggtggtttaaaaaaaaatactgagtgatattagagagtgtagcaaataacattcttgtgaatattatgaaattacttagtataacacaactcaataccagggtatgacctacactaggcaccctgacttctgattgccagaattaaggatggtgcaattttagtacatggtattatgcatcacctaccctgtattggctgtaatatttttatataatatgatttcttttattaactacctaatatgaaatatacaataatagatttctagaaagacaattcacatgttcataatacagcaatgtattttagagagatggccctttaattctctatctcaccaaaacacaaagcttcttaggagattggggtccagcaggaattcctggggcagggaagccaatgggctatgccaaggggctaaggggtaagggatcaggtgcccaccaaacccactgtggattgggggcacaggcccagagcaatgtgcaatgggtttagtgtgaagaggtagaagagaaggagctgttctatgtatgaatgtggtgtggagtaggggtgaaggattggagagaagctgagaaatatctttgagcaaaataaacatctcaaagattcctaggacacaaaacaaaacaaaacaaaacaaaacaaaactccactaaaaataaatacttttttgatcacagcctcctagagaaaaat

SEQ ID NO: 1884818 - DNA, 4001 bp, Homo sapiens; identical to SEQ ID NO: 916297

SEQ ID NO: 1884819 - DNA, 4001 bp, Homo sapiens
ggagattttttgattgacagctaacccaactccatcaaggccaaagagatattctgtttcttgttgtaagttgggcttcccagctcagtccagctcaagggaggggaagacagtggcgccaaggagctgaacccccaagtcgcctctccccaaccaaacacatccctcatcctcccccatgagttgaaatcccagccccgttaagccgcccccttagaccaaaaaggaaaaggaaagagccagagagggggaggagcagagacttgggagggggcctatggagctggggtcggtgctgccagctgcagctgtctccccctaactttcctccccccggaacacacatactatacacactctccccagcccctctccaccccagaggagaaagatccatagagacgcaggagaaaactagcccccgcccctacccctggcgtttggtcccctcctggggacaggagagggaaagaagggcaggcgtggccgggtctgggaagactcctaccctgctgcctccagagcctgcatctcaacctcagctcctgtctattttccctggccacagactgggactcttcctttctgaccctgaaattgcacccctcctttaaattcactctaccctgcctaagtgcaccatatttctgggggtttcacctgtccctttctccccaccccccagccaacctccatgccccctcttcttcacccaccctgataatttcctacttgactaaagcccccctttactacaccaccatgggacagtctgatgcaaagcagagggctgggcacaaaccctcaattgaaggaggagggtagcaaccaacttattggggggaggaatccaagttgtctgatattcctctgcaatcacactgccccctctggaattcctgcatccgaccccaaagaaattgctttctcctgttcctccgttgcttttttcccgttccaaaaacagcctacaattttatttaatgaaagatacatttatgaacaatcaaatgatcctcataaaaattttattgagggacgtaaaaacaagctacttgcccacgaccgaggtcgctcttttgccttgcccgctctcaccctggctctctgcagacagagcccgggagcgactttttggggggagtgggggtggggaagtgtcgcagagatggagttgggggcaaaggagggtgcgcaggaagatgggatggggacgccccacttaagttgtgtagatctctcctacacttcttcaagctggcaaagaaagataaatagatatagacaataaatttaaaataaaggcgcctgtatatctgtgccaaagcaaagagaagacttctgaggctgctgataaaggtgtatgagatcctgaggttctacccctcccacccagggaccaccttccccaggcttcccctaccccagatttggggggcagagttggccagtggcagaagaacgctccccttccctccttccctccctgtatctcagcttccccagtcccctcccaccctccctccctcaccgcccctgctgctcctgaaagaaatacatacatacacactatttaaaaacgcatttttaaaagccacgttccgaactgacaatcgctgatctcggctcgcgcagagactgcgggagcgtcggggccgacagagacggattacgtcaagaaatagttcctccacctacctcggtcggcctccccgcccctgcggggctcccgcgcccagctcggccctgggggtccgagaaccctggcttcggggactggcattttcaccccattaaaaaatcctcatggttggggggaggccatctgcttatgggtggacatgggcacaggggcttctcagatgagctaggagccgtcctgagggggtgaccggtgccttgggtccagagttccggacccccaggaaatcgcaggtcgcggggagcagcagagagaagggggtgggagagggggaaaagaaggcaaggaaaaaaaagcccctgcgcattgatccgcgccgtatttttgggtaaatacgatcacgtgggggccggggagccaatgagctgtggggaaaaggctggaaaaataattacctgacttgattgttctgtgagcagataaaaagtacatatacagttcatacaataatcttatgtatgtaaaaccccgttacgatgtcggcgacggggcccatcagtaactattacgtggactcgctcatctctcacgacaatgaagacctcctagcgtccaggtttccggccaccggggctcatcccgccgccgccagacccagcggtttggtgccggactgtagcgattttccgtcctgtagcttcgcgcccaagccggcagtgttcagcacgtcgtgggcgcccgtgccctctcagtcgtccgtggtatatcacccgtacggcccccagccccacctcggcgccgacacgcgctacatgcggacttggctcgagccgctgtccggcgccgtctccttccccagcttcccggccgggggccgtcactacgccctcaagccggacgcctaccccgggcgccgcgcggactgcggcccaggggagggccgcagctacccggactacatgtacggctcgcccggggagctgcgcgaccgcgccccgcagacactgccctcgcccgaggcggacgcgctcgccggcagcaagcacaaagaggagaaggccgacctggaccccagtaagttgggagcaattttcctttacaaccggcgcgggaggggaggggaggacgggcgggggcagccgaattacagccctcccgaaccgtgcagggagcgcgggagaggggcgagggggcgaggactcaataaaagcgaattaccttggggagctttcaggggcaggaggtctgagaatggggcccagggagacaggttgggagagggccgaggggagctcctctctcaggagctggctttgatgagagacccctgccccctcctcccagcccaggctttttggctcagtcaccactttcgaagaaaggcggacagggccaggggatggggctgggggcgaagttcagtttatgatttgagatgggacagggaagaggtgaggaggacactgggggcacagaggagatacccccagcgagaatgacccctgcttcccagtcagcgtggaggtcctcaccccactagagattcacaaaacagaaggtccatggacttctcccccaggagcactgggtgaggggtctgaggtatttcgaagcctgagaacttggagagatcaggactttcaaagagaagtggggataaaagtggggtctgagcctccttaaacttgagaaccctcttctgagggtcttggaggggaaggattgagaatggggatcagggatgaggagtgggcatctccccagattagagaattctacacacacacacacacacacacacactcactctcactcactcactccaatcagggagacaggcgccttctgaggattgcacaggagggctagggtggggggcaggtgggagctgcagggccagaaaaaggggaaagaaggagaaacagcaggggagggggtgcagacccctgggtgtgaggaagtgtctgggggagtcccaggagggggctgcaggaaatcttttcctccagccccataaggggccagggcctaattatactcctctgaaggcttccctccctgccctcagctactcccataaacctgaaattggaggcttggctcctgcagagcctgtcctggggctggcaggaggggggcactggaggccaaacaggaaaactaagatataggggagcctgtccccaaggccagcggctctctggggagaggagaaagacttttcccgtctcagcatcaccctgagaattcgcctcagcagggttgaactccaagcgggaggatggtgctgcagagggtggtgaggggtttagggattctcagggtcaggaagcagaactgctaaaatttcaggacttgg

SEQ ID NO: 1884820 - DNA, 4001 bp, Homo sapiens
agggagggagagagagggagggcgagaaggagggagggagggaaggagggcgggcggcggcggccgtggtggccggggcttccctccccaggcgggagccgcctgtcctgtatctatggccgtggggagcgaaggaccaggtaacgaaggcgcttccgaagcgggattggaccaaaccagagggacagagtcttctgggtctctctgcctgaggccctggagggagagaaggtagggagatcggcgcccgccgggcctggcaaagaggcctcgggaaatgttgaacctgtatgtgatctcaggctcacactcatgttgtgggtctgtctgcctcaggagatgcggtttgcctttctgtctgagacgccccaaaccctgagctctccttcccaaggctggaaaaaaaatcgggaaaaacggcggaatttgcactttcattcattgggttatctgcaactgagaggggctggttaaggcgtccccaagttggaagggcgctttgcttctgttttctggatgcagagtcctctgactccctctgccacgggctgagtttccggctccaggttcgcgtgtcgccctgaggtttgaggccagacagctcgcagtcgggcagggagggcgggggagagacgagcggctctggccccttaattgtacttcgggctcgtattgtctctcctttcgccacctccgcttcctcagtctgggctccaaagtcactgcaaatttccttgcgacacatacatcacacaaaagatcaggtaacaaggcgctcagggccactggggctccgggcagggcagggagcggctctagctctggggcggctccccctccagccactcccaggctggaaaaccagaccgcgttgggggagccggaaatagccccgcttgctgcggagcgtcagggcgggggcgccggcgggaatgcaggcccggcaggccgtggctttgagagagccacgttcacaggccctggggatttcactcctgctgggcctcgggacctgactcctggtgtgtagggatcccagatacccaccttgggtgggggcaggacgcgggtttcctcgcggcaggccaagagaactcagtttctgcttccagcgcaggccttagctaggaggagttgtgtgtgggtgtgtttttcccaacaaagagggatcaggagagagaaggggggaaagtagaggggaaccagggagggggcggggaggggaagagggcagtggagaggtgaaatgagcccatttcagggggagaaggaaaatgaaagcaaatggagtacggccttctccgcgcagggcgggtgctgacgagccgggagcgggctccctgcctgcggcagccgggatggcccgctggggacaccggagaaagcctgttttaaatttaatccgaacttgacggtgtggattgaaccggagggaatttaaatcactaaaaggaaggcgcggggcagggggaggggacgactctaacctgtctatctttctgtctgtccttcccacggtgctagtttggttgtggccgcagctgcccaggtttcaggtgatggagtaagggtgcccctccccctcaggggtctctcctgtgcccagtgaagtcttttgggggtgggagggaactctaagaaccagagtgaatgcacagctgcgagctaaagctggggtttccccctccccaacaagaactcccagtggcctccagtccctgggtttgccccagcggtgctgaggaaaattgaagggagtatgtgggtgaggggaagtctggagtatggcagaagattcagaaggagtaactgaaccccaggaagacagaccttccttcttggtgcccctatatcctttgtgccccgccccccgcacctacaaacctggatttgagggaaatctgcaggtccgcttcaaagccctggtctgccacccacacccctccaaatgtggagaatgggggctacaggccacatgcagttgtggacctgcggaacctccgcccagtggactccggaactcccagcctcttctagcccccctccccaaggccgcctctctccgaagggcgcagggaaaatgaggcattggctgggaaggggctgtgggcgaggcctgcttcctgatccacagccgtgcctgcctctgagtgggaagagttcggaggtcatagtcccagaaaataaaataaaataaaggaaagcgacaatctccttggtttcacaggggatttcacggcagcagggatcccgccggtgagcctcactgcccgctgctgccgcctccgcagagtgggcaggcagggtgcgcaggcagctcaagagttgaaaagaaggcggtgttcaaagggggtaggagagaagggggcatctctttacggccccaatgtctatttgaggaactctcccaaatagcagaggcccataggggaggctccttagggactctttcctccaggaaagctgaggctggggcagctggccttgtcgcttggagaagacgcaaaggaagagcaggggtgaaacctctttcctcttctgtttcttcgctccttgaatagagcagggctcagcccccagctgcctaagcggctgtctggaccaatatggggttctatatccctgaggcctagagtacccatccgagcaagtctcctgggaggggcaggagaggagccctcttccgcctttgtgtccagacagaagtggccgccgcgcccggagccggtcccgcggcaaaggcccggcaagccagcgggctgcacaatgccacggctgctccgccagctcgcccctgccccgtcctgcctgcctacggccgcccttcctccgcctccctctctgcacgcctgcctttcccggctctcctatctcttttcatcttgccttccttcttttaattctcccccttttttccctttattctaatgctccgcttccttctttcctctcttgggcctgactccatgtttcagttggtctgtcccaggctgtctcgggttcagtctctctcaggctctgtcccctgatgtcctcttggtctcagtctggccccgggccccgctgagggctaaacgtctctgctcatcgctgccagcagccgcccaagtgccgggcccggtcctcagccgccctgggctgggggaggtgctggctgtactggggatttggagaaagcctcggcagggggactggaacctcctgtcttttccttgaactagtgagggagattttttgattgacagctaacccaactccatcaaggccaaagagatattctgtttcttgttgtaagttgggcttcccagctcagtccagctcaagggaggggaagacagtggcgccaaggagctgaacccccaagtcgcctctccccaaccaaacacatccctcatcctcccccatgagttgaaatcccagccccgttaagccgcccccttagaccaaaaaggaaaaggaaagagccagagagggggaggagcagagacttgggagggggcctatggagctggggtcggtgctgccagctgcagctgtctccccctaactttcctccccccggaacacacatactatacacactctccccagcccctctccaccccagaggagaaagatccatagagacgcaggagaaaactagcccccgcccctacccctggcgtttggtcccctcctggggacaggagagggaaagaagggcaggcgtggccgggtctgggaagactcctaccctgctgcctccagagcctgcatctcaacctcagctcctgtctattttccctggccacagactgggactcttcctttctgaccctgaaattgcacccctcctttaaattcactctaccctgcctaagtgcaccatatttctgggggtttcacctgtccctttctccccaccccccagccaacctccatgccccctcttcttcacccaccctgataatttcctacttgactaaagcccccctttactacaccaccatgggacagtctga

SEQ ID NO: 1884821 - DNA, 4001 bp, Homo sapiens
atatgaaaacacaaaaccatttcaaatctcccctggccggtcctgcaagcaaatcatacactccacatttccttccagttttccggaggttcaggaacccctgcgtcttctctctccacccctggatggggaaattcggcggatttctttctgcggtcttctagccgcagcgggcttgggcctccttagaaacggtctagcctcctcactcctccactccagggcgctgggctccagtcctttccccgccaaactccagcccttcggaaagtctgaaccctaggctctgtccaaggaaaaatgtggggcgacaggaaagacaagttgttctccagattccgtttcctgaggaaggggtggagagtttagttcgctttggaagaaggcgatggagaaacggaaataactgtttgaaacatacggttccccttatttcttccttttatttaaaaacaaccacaaaaatagactggtctgtcttctttcaaacatgctcccagcccgtgcgctctgtaaaggacgcttctctgggtcgggttttgttgcgtcttgtgtgctggtttcccgtgtgatacgtgactcctccaaactgaccgaggctccgcaggttccctctttctttcccggaatattccctgttttagcgggggcaaggtcaagcggaaagcgaggaccgccagggcctgaagtaaagcagcagaaccggctccaaggccaaagccttgtgggcccctgagatggtgacccaggagccgcccaccctgccaggcccaggccacagctctcgggtcggggatcgggtgcctctggtctctggcttcctctttcccctaccccgcgtccattcggaacctccttttccgagcagccatgaagtgaccgtgaccccctccctggcccaccctagaggctggagattcccagtcaacccccacaggaaacttgcaactccagcgccgcggcccccaagcttccagccccgagggccaagcccggggaaaagaggaggcgggagagcagaaactttagtcctgtttggtattccttaactttttttcccctttctctgctcatcagatccccccaaacccccccccccacaaacctcaccccactcccatccccaaggtaagaagtgggagtcgggtccggggatatggaaaggggagatgaagagtggggagaagtacctgattcgtgtctcgaccttttaatttgaatttgactgttttgagccccgggttgcctcgctctctccctctctcccgcatttcccccctctccgcccccttctccccaggagttacaggctggttactggataaacaaaccccactcttcctagaacccccacccccacccccacccccctccacccctctacctcccctgccgcccggggggcgcttcctttgttcgcggggaagggctccggtgcccctaccccgaggcagctgctagatggcgctgttactccactctgcgcgctccgcctgccgacaacttgaccccgctgacgtcacggccgtctgaatcatcaaggccattttcaaatcccattggtctagccgtcacatggtgagaaccgaatgcgcggataattacggagctgatatttccccccctccccttctttttcctccctcccctccaaccgcgccccccctcccggatggggaaaaaaaaagatgtcagctcctccgctgtagtattgctccttaaaaacccctctctctgaaaatgacatgccctcgcaatgtaactccgaactcgtacgcggagcccttggctgcgcccggcggaggagagcgctatagccggagcgcaggcatgtatatgcagtctgggagtgacttcaattgcggggtgatgaggggctgcgggctcgcgccctcgctctccaagagggacgagggcagcagccccagcctcgccctcaacacctatccgtcctacctctcgcagctggactcctggggcgaccccaaagccgcctatcgcctggaacaacctgttggcaggccgctgtcctcctgctcctacccacctagtgtcaaggaggagaatgtctgctgcatgtacagcgcagagaagcgggcgaaaagtggccccgaggcagctctctactcccaccccttgccggagtcctgccttggggagcacgaggtacccgtgcccagctactaccgcgccagcccgagctactccgcgctggacaagacgccccactgttctggggccaacgacttcgaagcccctttcgagcagcgggccagtctcaacccgcgcgccgaacatctggaatcgcctcagctggggggcaaagtgagtttccctgagacccccaagtccgacagccagacccccagccccaatgaaatcaagacggagcagagcctggcgggccctaaagggagcccctcggagagcgaaaaggagagggccaaagctgccgactccagcccagacacctcggataacgaagcgaaaggtaaggccgcctgggccgcgggcgccactgggacgttccggcacttggtcttcgcggccggggaggggggcaggggagagggttgggcccaggaggccccagaccatttcgggaatgcgaccctggctttcgactagcgtccgctgagctccaggctggtggcgcgtcacttagctggggaaggtaagcggcgacgtggaggtgtcggccctgccccggccatgggtgctaaggcgggggcggtgcgcaccgcgggccgcctgcaggcgcagtgtgctgcaccggacgggtggctgctcccaggcgcgtgctggctgtggtttgctttctcaatgctggtgtcctggggagctgacgtcccccagctcaggtcaggggcttgcaaaaagcctaaaatggcgatcttgggccagggactagggaaggctggggagatggggggagttctctttactgcgttttcccagttgaaaattgtttcctgcgaaacgcgatttgttgtttgtgggtctgatttgtgcgtgcggcttgggctcctgcggcttttggctcggccgggggccttgggcagcgaggctggagccggaagaggtggaggtgaagggctgcccgccacgtccctccctcctccagatgcctggcttggatggcgttggaacagggcatttggaatgttgtaagttttctgtttcctcttttaattttttcttttccatttttttctagttaaattatcttttttcattggtttccaaaagcagcttacaaatgagtggttgggaaatttctgtgtgcgtggcaagaggttttctcctgaaagggaatgtggctttggttggatttcactgtaattttggttgagagaaagcccagccagagttcaagctcagggttcaagattcatttctgctgtaggagctgggggccttcgggatctttctctgatacttggggaaagaatgtggaggaaacgggagcaggggaggaaaagctgaggggaacgacttttcctgaaaagttgtagcaagagcctcagaaaaaggcccaaccaacggggaagaataaacctgctccccacaacaccggctactggtgacagtatataaggggctcattgggtgtagaggaagatgaaatactgagagcggagcaggctgggggcggcctggatctcctggtgctttgtatatggatgcgacgcacacgcatgcctacgggcgacctgtgccacactcacgcacatccatattgcatgatccttgcacactcacgcatgcccgctcacacatgcacaggcactcttttggcgggcaagggcagagcctcatccccttgggtctgcaaaggtggtcttggtaaatcatccccatagagacactgactggaagatgagcgctggtgtgttcatgaggataagggggagagtgaggcgcctacagcctcaaagcctttcgtttggcacgtgtgcagtgtgaaggtttaatcttataccctctctacagaccctgag

SEQ ID NO: 1884822 - DNA, 4001 bp, Homo sapiens; identical to SEQ ID NO: 916306

SEQ ID NO: 1884823 - DNA, 4001 bp, Homo sapiens
gatattttttcctttcatgcttgaggagtctcgaaaggtttgcacactcttccacctcctggaacttcactgtgccattcagggtgactactgctgtctggctccactcgagggaagccaggtaacctgtgttaggccgcgcttttcctggcggccttgtaaatctgttagtacatgaaaagcatgacgcacatggggattaggatgccactgcggtggagtaaatcgtgtagccaaagtcttgactgaccaagcacaccttatcatcgtttacattctgagcccgaccaaaaatggtaggtaaagtgacaaaggcggaaagaaggcagacagaaagaatcatcttcgtcatgcatttccccttctgcctcatagggtacgtgagaggcttcatgatcccaaggtacctgtcgatgctgatcacgtacaaggtcaagatccaggccgtgcagcacatgacattcatggagaagacgttacagaaaaagtgtccaaagatccacttgcccccgatgaggtcggtgacactgatgaagggcatgaccgccatggccaccgagaggttggccagcgccatggacacgatcaggtagttggagggctggcggagcttcttgacgaagcacacggagataccaccaggcagttgcccgcgatcgcagagagatgagcgtcaggacagagccgatcacaactttctcggccctttcttgatttgctccccgcggccggaggcattgcccggggttgcgtcccaggtgggcgccgggctggccgtcacctcgggggcccccgctcagcagatgcggcgtcccggagaccgcgaccggttcggcgccaccgtcggggctcaggtcgggcagcctgccccccacctccggcaggaggaaagagcagaggcgcccgtagaggtccgggtggccgctgctgttaacatccatcactgcgccgccgtgtggcgctgcccaagaagccgccccacccccctccccacccccgcggccgccacaggctccggctttcggccccggggcttcaactcgccggttcccctccgcccggcccagcttgaggcctgcaccggccgctgggcagcgccaggctcggcctcggggccccgcctgtcccagatccccggccgctgcgtgaaacgcgagagcgctgccgagcggggactccctgagggagggacctcggaccccgacggacgcccgggacgcgcgggctctcgggcgctccggcggggctcggcccgcggctccacagcccgctgcacccgcgcggctcggagcaatggaggatcaggcagcggcagaagcttccgtttcctcctttttaaatggctccaaaatatttcttgtcggtggtgtggagtagagatttattggtaaaatacttgacagaaagcaggcactcagctgagtaaatggtgacaaaattggtgagaagatttttgaacaggagtgaacgagaaaagccatgcttagaaaagtcacctggaaactgtgatttagagggatggtaggaaagagtggcagcaggaaagtggtttggatgctctttcaatggtctagaagaggtcatggggcgggggtagagggacagctaccaagacagggagcctggccgccgctgtaccagcgggatcgagccttcgggtagaggaccggagaagcgtgagcaacccggggctcggaggttggagcccaggcacctgagagaggacgttccccaccaccgctgcctaaagccactccaggcgagaatcgctttccagggccccagcggataggttagactcagaataagagaaggggtctgcggagggggacggcctgaggcccgcggccgggttccctccccagacacccgcggaaagcccgaaaggaggcggaacacggcccagcggctcgccacggcgggcccatcccttgcttagccgcctcgcaccctcgcctcaccgcactgctgcactgctgcactgctgccctgctgcccgcccttcgcatcactgacccgccctctctccgccccctcgcctcgccgccccgccctctctctccgccccttcacctcgccgtcccgcccccttgcctcaccgccgggctgaattgccgccccgccctctagccacgccctctggcccctgcctctagccccgcctctcgcctcgccgcctcgccgtcccgccgccttgccgccctgccaccctgccgccctgccgccctgccgccctgccgccctgccgccggtggtcgctgcccgtggtgctccgtcgcccccgccacctcacgtcctcccgtgcgtcgggagcgtctcggctacaacatgttgggcatgatcaagaactcgctgttcggaagcgtagagacgtggccttggcaggtcctaagcaaaggggacaaggtaggcccgcagggctgccgaggacctgaaggattgctgcctcccacccccaccctcgtcggggctgcagcgggtgctgaggggcaggtggggcaggaatgtgctatcgaaggtgcgttctggtgtctgtcgcgagtgcggctctccaccgcccagcatttggactgggaaggaaaggagtgagaggtccccctgcagccggtggtgagaggaggggggtaaacaggagagactgatccaaggagagaatcccaacttggggagttgggcactgcctgttgaatgcattctttcgtttaaaatattccaaacattccgaacagtttgatttgttgagagacactcggttgcagaaatgagtgtcgcaagaaactcccaagtactagagaactgcggatagtagccccctttatccgcgatttcagttacctgtggtcagctcttgtccataactattaaatggaaaattccagaaatacagaagtcctaagttttaagtttccggccattctgcgtagcaggatgaaatcttgattcctgggaccggaatgcccctttgtccaaggtcagcctcctatctctagtagccgcccttagtcacttagtagctagcttggtgatcggatcgaccgtggcggtattgaagtaacccttattttacttagtaatggccccaaagtgcaagcttagcaatgctggcatattgttataattgctgttattttattattgttgttcatctcttactgtgcctaattgataaagttaaactatatcataggtatgtatgtataggaaaaaacgtagtagatacagggttcagttttgtccaccgtttcaggtatccactggggggcttggaaggtatctactatagataagggggactactgtgtaaaagaacaagatctgtgcagaatagatataaatgcgctacgcagggagcacagaggcagtcaattctgccagggggctatgatggggacctcagtggagtgtcctgagctggggcctcagggatgtgtaggagtgcacacaacagagaagagcatgcacaaaggcccagagctgtaccattgcttttggccagttagatcctctggagttgggtacctagaatacagaatgagtgagaagagcataattgctgtcttcccccaaatttatatcagtgctaacatgggctaactggactgcacccctgaaaacaaggagagtgctgctagattataatctcctggtggacaggtagtttaaacagtgcagctgtatacagagctcccaatacgatgcctcatttgtgaaaggactgtattgcctgggggccaagttctgatacctagtacaatgatcttcatatcacgaaagccctcaattagactctaatctgaactctttgacaaccaaagacctttcacctgttcttatctccgtttccccagctctatgtagaatgaacagtttagccctgatcagaggtcccacatttgaatacctgcagcaaccaggcaggtaatggaaatggatgaagctggctgttttaggctataaggcatagtggggactgaggcaaatcagagagtgaactcaggtcc

SEQ ID NO: 1884824 - DNA, 4001 bp, Homo sapiens; identical to SEQ ID NO: 916313

SEQ ID NO: 1884825 - DNA, 4001 bp, Homo sapiens
gtgtgccctgtgaactgctccccctcatctctaccttcttaggttctgcccattttctagagccagccacacctctcaaccccacgggggctttcccagatgctccaaccctatgcagtcacttccttttcagaaccattatagcagctcatctgccacttagcatgtgccgtcttttatttcagatcttcttaaaacctaataatcaatacactttaaagctaggagcagttttacagaacacataatccaatttcctctttttgctaatgagaaaatggaaacctagagatacttggtaaataataggaccaagtctagactccatccctcctttgccattatctggtatcattttactgtgatatgtgtgtgtcccgagaggatgtcaggttctttctggacagcaacttgtttgaaactatagcatgttcatattggatctttaatagccatatgcacatggtgacatggtgcttcaccaaaccacatagggcaggtggaagataaataatttcttgtgtagaacagagtttaaagttaaaaaaaaattatttatgtagcggtggctcatgcctgtaatcccagcactttgagaggccgaggcgggcggatcacgaggtcaggagtttgagaccagcttggccaacatagggaaaccccatctctactaaaaatacaaaaaattagctgggcatggtgacaggcacctgtaatcccagccattgggaggctgaggcaggagaatcacttgaagtcaggaggcggaggttgcagtgagctgagatcgcgccactgcactccagcccggtcgacagtgcgagactccatctcaaaaaaaaaaaaagtattaatgtatttcaaacccttaggtgtataaagtttcctttaaaaaaggattagaaagcttctattggtcatataagatgttcagatgtttctatttttgttactacaagcaaaacaaagctaatcgctcttaactttgttcccttaattcactgccaaaggtgagctcagagaggatttatatggaccagttctgaccattgtaggttaaagacatttctttgaatttcagctgagaaacattctcccatgcagcccttttaccagttaagttgaataagcttgactttgtagatattgtttttagtttcatttcagaaaaaaagaacattaagaagtcaatttaataagcaaaattatttacgtgatttaacttaatttggcaatatggctgggaaaatacagaacaaaacaaaagcaaatgtaagaatacatacttggaactgaaccagtagtgttagcagtaattatgcaattagtagttttaattacaattaaaaaatcaccctaaattatccaagacctatgatatgtgacatggcactcaccaccttgaacaacttctctgaattcattttaaaactgagtacggcgcccatggcattttcttcccaactcatccacctgtgaccatgttaagaagaaattccctagaatagttcaatcaaagcttactgtgaacactctcacaacttaatcaatgttctacatgttcatttcaaggttattctgagatctcaggaagggtttgtgagcttcctgaaatagaagaagtctcagaggaattcatccccctgagctcagtggagacattccagccatgcgggtctccttcctcctctccaccccagccttcctccttcttcttcctccctcacagcagagatatgacaaacaccacccacttacagttggttctcctaattccacccacaggagctaaaaacctaaagaaaacacatttatttgtttaaaaatgtaatttacaaacagcattttcatgaaaaatgttctcaccctcgttgtgctagttcgttgtatctttttcttccaggcttattccttcccaaatgactacagtttttgctggcatttctctgaaggtatacttgagatctctttaagagtcagaaaagctacctgaaattgcaggcagcttcctgttgggctcacgttttgcagaatccacgcttggtgtgcagaaggtgggcaaggtgtttgaaaaaacaggaagcacctgtgaatgtgtgaatttatttctggaagcagaaggctccctctgagatggctctagatgcttcctgctgttccacctatgagcattttgcaaggcctttcagtactttggggctatgaacaggcttccgaatggcaggattatttggaaaatctgggacacggtgggaattctgtttttttaatgcaacttttctgtttttttcatgcaacttttttcatgcaactttctttttgggggatattggttgatatgcgtggaaatgaaggtagacttttaattgcaatggggaagttaaaaccaaatgagaattagagatgtatgtagctttataagtgattttgctttcataagatcatgtttgtactcattgattcctttactcagtaaacagtattgagtgcaaggcactgagatactccctaggaatccaccggagacaaaacagtggttgtgtgaagtttcagtcccctgtttcagtcccaaaatcacctacaagaaagtgttgtatttcaaatttgcatttttatatttgcatgtgtctgtatgatttagtgatgtgtttaattgaaatgctactgaaataagtctcctcctctgtatgaggtactctaaactactgttggtggctggctattccagcttgggcagcccctgcctgccttttcaggtcatgcatttggtgacattagtggctaattaggttaatcctgttccttgactggagagaccacagctaattgctatcctgtaaatacactcttggctgtagataaactggactgcaacatgtgtctggattcttgaagacctattaccagtctttgaggaaaaagtgtcaacagcttctgttctacagttttcagtagctttattttcatatctgagcaaaatctggcacagagtaaagaatacagctccctccctcttttatatgtgtgtggcctcaacaggtcacgttgcagccagtttgaaaatctccaagtaaacagtgctgatttgttggtagactacgctggagaaaatgcagaggggctggggagaaagaaacctgggtctaaagtttagctctgccacttactagctatgtgaacttgggcaagtcatttagcatttctccaagaccacctttttttcatgtgaatggaaataattctcatacttacccaagcaagtatcatgaggacaaattatataaagtttatagaacattatataatatacatccccaggttctagagatggattagggtttgagccaagaggcatgggtttgatcttggaaaggtcatcctggccctctgtgcccaagacacctctagcataaagattgaacatgtcctgtattgggctcctacggatttactgagcacccatatatggtagtcactgagccagagactattgacacagatagaagtgtcgggttcctgtcctcaacacaaatgaggttcctctattttatatccgttattggaaaaggagagggaagattttctaaggttagaatgaaatcctaaagtaattaactgactgccaatcattgttaaagggcactttccatattgtgttatcaagagcactggcaggcacgggcagaccaaggccttgactggctcttccacttcttagatgggtgacttggggcaagatacttcgttttgttaaatctcagtgttttttgcaaaatgtgggcaataggagcacgttcctcacttggttcttgagaaaattaattgaattaataggagagaaagagaaagagggaaagagagagagagagagagagagattttctgtctccaacatatgcaaattctatttgcatatgttgatacattagtctgttttcccactgctataaacacccaagactgggtaatttaaaaggaaagaggtttaattgactcacagt

SEQ ID NO: 1884826 - DNA, 4001 bp, Homo sapiens; identical to SEQ ID NO: 916340

SEQ ID NO: 1884827 - DNA, 4001 bp, Homo sapiens
aacattctactagtttctcaaatttaaaagaattcactcatttctccattctcacaacttaaaacaaaaatacttctactactctgccccattatagtttcttatcaccagccaagaacaagaagtacagataggaatcttttttcaaatgtcaaaagtttgacaatccataagaaacaggtgaatgtaaatgcttaaaacgcatacctttgtcatcagttttcccaggcctttgagtatcatcaggccttaatctattctgtgactctgaaggagactgcaaaaatctcagggttgaataaatctctccctgatcattcatctttagagtaagaaggtaagttttgcattcaaatcctgaaataggatggtttctgttgaaagaaaaattaaaatgtcagccaataagaacacaccaggatttgatgctgagagatgtatgtgtgcctgtctgtgtgtctattggcgtgtgtttattaactaagtgcctaaagcatttagagtgagcctcatttatagaagaaatgaaaaatctttcaatacttttgttaaagtcatttatacttctagtgatcacagccatgataatgagaaaatacagaaatgatgagaaaaaaatctaccaatagattattgttctattcacccagccaattttgctcaaaatattcaacatacatatacaaatgttaggtaaaattgataccactgcaaatcactgaaacactttatgagttcaacaaacaaaaaatctaataaattctggaaaaataaaaatatcttggcttttaaaaacttacatgtattctaatatacatgtaaatataacaaagttcttgcattctttccaactatacttgactctatcagagtgctttccaaaatgtatcgcatataccttctacaaaagaattatttgagggttaatattgcaaattggttaacatgccagactcagtgccttttgcaagatgtactaaataaaaatcacttcggttggagcccagataaatgtattttaaatctcaaatgattccatgtacgttaaaattttagaaataatcttccggtatattgccagagaagcctatgtgaaaataacagttgtcaacaggcagtcattaatgtccataaaagattctattgattaatgaatgtcaatatagaaaagaataattaaatagtaaatacctaaaatttacttcttatgttagtcagtataaaaagatgatatccaagaaatgagaaatatgaaaaaacaaattgcacatgtaaccatattcttttctaatttttttaatttacaaaattttctaacctagtcacattttccctaatttcctaagaaaaagaagtattttctattatagagtcattcaagatggataaaatatgtaaatcattagacttaagtaaaaagtaattaacccctcaaatctctattctttattttgataacacaaagcaaaaatcacagcatattgagaaagagaaaataactttttgttaatactggactacaatttccttcaaagtagtgcagcattaatacaatcagtagcgaatgctttcctatcatttctgttataatgctaagtcatttgtagttaaatgccgtatttctagaattagtaagactaaggataatctggtagaaagatctgagaaaataaaagtggatattacctgtatctgtgctatgcagtggtgcaggtggagaaaactgatttcaaaatgagggagaagctggcctttcgggtcctggatcccttaggggctataacatgaaaggcagaaataaattctcttcgaatgatactgtaactcaaaattttctgccccacctcttgaccaaagtgataagaggaaattgtatcatgaaagctggtactgacgggaaaggaaagatagtcaaaagctgcatattcctctatctcaactaaccaaccacttagtactctttgcaaaataatgttcaaaatcaatatttgagggctgaaaagataaaattttgtacacatctttggagaaaataaaactaatatcattaacaaaaaactaacgtactttagagaaactgctggtaaaagacattactgaaatgtctatgtataaaaatatagacatataaaagaagtgtaatgattgaactacttagctcttagtttaaataacagtctctctgttggaaatgttctcctatatgtcattattttttaaaagttcctttttctatctgtttatttcaagtaaatgtattttttaaattactttaaaagatccgtaattcctctataaaattgtggcatatattcttccagttttttttctctgtatgttgtgcttactatcaaggttggtatcattccttacacagtattttttatttattattttctaataaataatatgtattccattatttcaaagaaattcatctgaaatgttattttaaaaatattactcacagggataaaccatcatttatttaggcaatcccctactattggatacttaaattgttttcaattttttctattgtaaaatatatttggtctgtactttttttttttagggaaactttttaagcataaaattgtatgtcaaagggtatatgtatttaaagaactctaatatatatcaccaaatgccctccagaagagatgttccctttgatgttccatcagttgtgtgtgaaaatgtgcacatttgattttttaagaaaaagatactggcaaattatttctctacttgagttttcccacgaaatctcacttcataaaatctatccctaaaaccttccagcaaggcctcacattttcacctatatcgaagacttgaaaaaattcatttttgtcactccaccatgaggcagaccctgccagaatgtactcagatctctcattgacttccacttttattggattcagtctttttcaatcttctgattacagttctaggaaaccaacttaaattgttcaaatcaggtgatagtggttaataaggagtgtgggatagagaggcacagaacagcaggcgaaattgctgatacagggacatgtagtccctgaagtcggccacatcatcatgtgcaggccatcagatgaaacatctcccagaggctaattttactcaataatgtaggcaaagtttcatgcatggagtttggacgcttcaggaatacttgctgctgggcattttcttctttccctccatcctggattggcttcgtcaatcccaaatcagagtaaagacggtccatatccctttatctcaatgccaaaataataaataaaggaagttagttctgtgagagatgataggaagtgggtgacagggtcaggggctggggtgtagtaatagcggatgttgaaaaggtgacagagatactgtcacgtattggagtacctcttgtgcatataaccatattaaaacctcccaacattgacaagtattttcgtccccattttacaaatgaggaaactaaagtgaagaagttcattgacttgcataaggaaacattattgctaattcttcattcctgtttaaaatctggcctgactgaagacagagcacaatggaccgtgaattcagaaggacccgggcttccaacaaggctcttgccacaaagcatgaatcctggaaccaggcaaatctggcttgaaatgctagcccctagctcccatgtgtgacttcaggcaagttacttcatttctctaagtcttgtattcaccatagtaaaatagtgatattttttgccatccaaggttgctatgagggttaaatgaggtaagatccatctcaaagtgtctaactacaacctggcatatatatggtgggctctcataaaatgttaaaaattgttacttgaagtccaagattcaaattgttcttatctataaaaatttgaacaagtcaaccaaatcctcaagcctcacttttctcataggttcaataaaagtatcacacgcttcataggctaggactaattaaatttagca

SEQ ID NO: 1884828 - DNA, 4001 bp, Homo sapiens; identical to SEQ ID NO: 916371

SEQ ID NO: 1884829 - DNA, 4001 bp, Homo sapiens
ccatgcccggctaatttttgtatttttagtagagacggggtttcaccacgttggccagtctggtcttgaactcctgacctcaggtgatccgcctgcctcagcctcccaaagtgctgggattacaggtgtgaaccaccgcacctggccaaacctatgtctttttattgggaaaggaaagtttccctgctgacctccctgtttagtgagaaccgagttattcttgcctttgacttgtcactggccaaagagaaggagaaaaccaaagaaaaggttgaatcccatcatcattcactttctgaggctgagagagggacctgtcctccctcagattgggctcaaaggggacagaaagggctgctgggtgtgcacatatagggtggcctaggatgtagacttcttaggaacttttaaagataggagatacttaatgcttaccttccagaaggagaaatggagacacagaaaggttaatgtactggccaaaagtcacagagtatgtgctggagccagggttggaagccaaggagtgtggttccagagtctgtagacacacgctagccacaggcacgttggatacagtacactctgggatctggacctgcaggaatgcaggcccgtgttgaaaaggtgccaacccctctggctcattgtgggtcctggcaatccacattgcagggtcaccttttttttttttttttttgagacggagtctcgctctgtcgcccaggctggagtgcagtggcgggatctcggctcactgcaagctccgcctcctgggttcatgccattctcctgcctcagcctcccaagtagctgggactacaggcgcccgccactacgcccggctaattttttgtatttttagtagagacggggtttcaccgttttagccgggatggtctcgatctcctgacctcgtgatccgcccgcctcggcctcccaaagtgctgggattacaagcgtgagccaccgcgcctggcccagggtcacctttttgactgagatgttttctgttatagttgtcccttaggcaatgtgaagaggcacccctgtccattacaccgtaatttgacttggccttctggatcattttatgtgttgacatttgcccaagaggagcctggggattagactggaacttttctttgctcttgtttttttttttttttcttcccttgagccataaaattttgctggcaggtcaggggaagaaccaggggtaagggtctcttccttcccatcctcctacccaggagacgtgctttgaggagagcagaggccccagagcctgcagcctcagaggaccttggaggtggacaggttgttgtaatgatcttcctggccctcaagcaggctgcgataggtggcgatctcctgctccaggagccgctggtactcctgattctgccactcaccatcagctcgcacatcgcccagctgggcttcaatactgctgatcagtgcctggatctgcaccagctgggctccaaagcatgcctctgtttctgccagtgtgccttctaagggagctttcacgctgagctgcgagtgcagctcaatctcaagaccctggagggtgcactgcaggtcagtgacctcagacctgcttatctggagctgctctatgtggccagtgacctcctggttcagttcctcagtccagctggtgaaccaggcttcagcatccttccagttctgcttggccatgatctcatattggctttgcctgtcactcaggatcttggcaggtccgagctgaatccaccctcacatggacctggtctcccacttggcccctcagggcattgatttcctcctcatgcttcttcttcaggtaggccagctcttccttcaggcctttgatctgtgcctccagatcagtcctggccagggtcacctcatccagcacccaaacactcaaaccaaacttggttcagaagtcatctgcagccagttgagcattgttgatctgcaggacaatcctggcgttctcaatggtggcaccaagaatcttgtcccgcaggtcctcgatggtcctgtagtagtggctgtagttgtgggagggcctgtgcccctgcttctggtactagtcacggagcttcacctccagcttgctgttggctgcctccagggcgtgcaccttgtccaggtaggaggccaggcagttgttgaggttatgcatggtgagcttctcgttgcccgcaagcaatccgttggacccagacaggatgccgctgtagccccccgaaggaggacaaggacacgccgcggctgctggagcccctgtgcctgctgggggactggaacttttctagtgagcagtagagactgcagtccagctcgtaggcagccacagtgctgaaggaaggagcagccattaggatagttatgtgcttgtcctggctctgtcactacaaagatttgtgacctcaggcaaggtcccgaatcagatggtcttaagacagtgtatcatttcatctgactttgatgggcacagacatacagtccccctttttctgtctcatttccctcatctgtgaaataggggaactggagggataatctggataaaccttaacatgcttgtcagaggaaagtggggccctgaacaagagctgggaggcccccagtacttctctctgctatctgttctgtgtcttctgtccactccttcatatgagctacaaggaatctctgcaaaagaggtgaggtgggaactcaaactgagaggagtggagactgaggacaagccaggaagatacgtgccgagaaagatgccaggtgaactcgatcttagaccccacggcggcgttctctctgggccctggctagtgtcagtcagtgatctcagagtcagcagatctatttctcgcatctggatgccaaaaagcaggaaatccctggtcttggctgggatcaggggataatctcagatgtgaaggatagggcagcaagccctcagatgggcttccaggcaagtcttgtccccagtgggagcccataattccttttttcagccacttggatcttttgctttttagttttggtgactgatcttctgttccagccagggaaaaaaaattatctgcgcagaggcttgctccaggattctctttcttcttcttcttcttttaactagggactgctgatgtcgtcacttctgttttattttcttttggaatttattcctattttacagagtccttccctggcctgatgctctcaggcataagcttcgtggttaagcttcccccttccccctaagtcttgttctcttcccagacacaggcacttcccccttggctgtctgagtaaacacagcccctgcctcttgggattctacctaatagcccttttgccatttgaggcctggcctggtatcaagtttcttcttttaaaaaacagccttgggctgggcgctgcggctctgcctgtgagcacttcgggagacggaggcaggcagatggctctgggtccaggggtttaaggcccgcctgggcaacatgatgaaacctcatctcttcaaaaatacaaaaattagctgggtgtggtggcatgcacttgtggttccagctatgggtggtgggggctctggagcaggaggattgcttctgagcctgggaggtggagattgcggtgagctgtgatcgcacaactgcattccagcctgggtaacagtgaaaccctgtctcaaaaaaataaaaataaaaataaaaaaataaaaacagcctttaaaacccacatttattttgatttctaaagcaatatatgtctgttgtggaaaatttgggaaataaaagtaataaagaagacaataaagatcaaccttaatcccagtgcccagagaattaatgtttcatgcattttatttcactttcttctggaagtatgtatatacatgtgggtatgaatatttaacatagttggagccatactgtacctaatggtttataatacgttttgcttttatgttctcactaacccctgtggatatgacccta

SEQ ID NO: 1884830 - DNA, 4001 bp, Homo sapiens
agttggagctagctagggaaaaaggaggatggatgggggagggtttttcaggtcagaggagaggctcaggcaaagactcagagacaaaagaacacgtgggacatctgggggaagtgtgggactgtttggccgagcttgggagtcagataggtgttaggcaagggcagaaagaaatgagcccctggatgccatgtaagagtttgaatttgaccttgactttgaaggacgataggcagaggaacgtcataattggagtagtgtgttataaagttgccatatggagagtctgggacattcaacagtccttatggccaattctaaccatccatgagatcagctgtgcttaaggcaagcaaatgcaatggcccaatgctttaatgggaggctgctgatagacatggtgaggcgggggacctggacccacctctgccaggctctgcaagtgcaggcacagtctctgtaccaggctgatcccagccaagccctgagtcagtgttcttgctttggttccttttcctctagttccaggagctgcagctagcagccggccggcatggggatgacctgaaacacaccaaaaatgagatctcagagctgacccgtctcatccaaagactgcgctcggagattgagagtgtgaagaagcaggtgaaggggactggagccttccttactcactcctaagggaggggtgaactgcttagcaccccctgccccctccttctcttgagcatccatttcagaatccccttcttcaaatggaggtcctgctctcatccctcacccttagctcccatctgaagtttggaacaattgcagattattttcataaagctgtggggcccagcgtagcaagcctctcagtctcaggttgacaggactccacctggatgtggctgggtctctgctccaggacatggggcaggacagaggagggctcaaccattgagagcatgggagaggtgaagcgaggcccagggaggaactcagggagaaatgctacctcctgaccccagtgtgccaacctggagacggccatcgctgacgccgagcagcggggggactgtgccctcaaggatgccagggccaagctggatgagctggagggcgccctgcagcaggccaaggaggagctggcacggatgctgcgcgagtaccaagagcttttgagcgtgaagctgtccctggatattgagatcgccacctaccgcaagctgctggagggcgaggagtgcaggtgggtgggaccgagggactggaagaaactgcaagtctccaccttaaagtttcccagagtgtggttgggggcgggggggagggggcggcgagctggcgatgtgtttacttcacccacaagcatagtttcaaacagcatcctgccagataatgtgacagcaatttcctttacagttctcttttgactctttggagaaagtcttagctgggtgctgttgtgtctttaacacctctcagatggccaggcgcagtggttcgtgcctgtaatcccagcactttgggaggctgaggcgggtggatcacctgaggtcaggagtttgagaccagcctggccaacattggagaaacctcgtctctactaaaaatacaaaagttagctggatgtggtggtgcatgcctgtaatcttagctacttgggaggctgagtcaggagaatcgcttgaacccaggaggctgaggttgcagtgagctgagatcctgctactgtcctccagcttgggtgacagaatgagactccatctcaaaaacaaacaaacaaacaaacaaacaaacagacaaaacacaaaaacacctctcagacacttacaaatatcccctattgataaagagacagtagatctcaggtgcagcatctctgggaaaataatagcattatttagcccaaaagttttaaattgttttcttttcattatatttatttttactgctactttttttcttatttggttaggtaataatactggtttctatttaccctggtgataaaaaacttctttttaaaagaaatgcacttttgtcgtaaaaggcagagtcaattaaaaatactaaatatctaacagtacaagtcaaacatggtcctagcaacagtcagaagggtggcacacgaagcatgaacatttgaaaaaccctgttctaaccaagcaccattttataactgagacctggagagaagtcacttgccccaaaatcatacagttcgttcattagtagcaactcctgatcctgatctttccacatatgtatttattcagacagctgctcacagtagtaaagaaatgggttcaagagaaaccctgcaggagggaccttgggggtggtaatgttgttgggggttccaaagttgcaggttccacatctctgcagtgggaagagtagattgaggagcgagagggagggcttagagacatgcaagggcagccagtgccatctggcaagtgtggggtgcgtgaaggctgagctggtctggctggggatccccagcctgtgtttaggcagtgagggccactatgggagtccacgtgattcagactctcctgtgcttttctctcttgcaggatgtccggagaatataccaactccgtgagcatttgtgagtatttcatgactctgagggaatacttttagtccatcaacaaacacaaagtgggtgggtgtccaccgcccagccccctgaggaagagcttggctctgcctgttgaccacttggtcacatactcaccttccttgctgagacctgcggcctccccattcagagctacttcttccaggtggagctagtgcccaggacattctgatactgcacactagcctctttcatagcaatctcctgcctgctgtggtgaaactctcagcccctcccctcttctgtcacccccacaccggctctcctgcatgaaggaaactgagcacagagtggtgcctcctcaatgggagtggagactggtgtgtggaccactgtgcaagccagtttaatgctggccccacagggtttggcagtctctttcttatagtgggaccagcagaaactccctaattttaacaatcaggaaattcttttgaaaaatactcagaaggtattgtaaagctaaatgcaagaacctgctggcttatctgatgctcaagcatcatctgtcccctggggaaagcccttgctactcctgtttgttcatagaatgacaaggtgactgacttgggagtcttgcaggactggggctattcttcccgcgcttgagttgctcaaatgaacccaagttcatggttgatgggaagtgtttgcttaagaaggaggtatttaagctagtggggctgggaggttggagggggacttaaggccacctctgtcctgggatatacactgatcactcgtccctccctcctctgcagcggtcatcaacagctccatggccgggatggcaggcacaggggctggctttggattcagcaatgctggcacctacggctactggcccagctctgtcagcgggggctacagcatgctgcctgggggctgtgtcactggcagtgggaactgtagcccccgtggggaagccaggaccaggctggggagtgcaagtgaattcagggactcccagggaaagaccttagctctaagctcacccaccaaaaaaaccatgagataaaagtgcaacacagcccatttcccagtagtctgccttgccctggcagactgctccggactcttctaggaaattcctctgtctcatttgtcctcatctccttcttgctttgctttgctgtggacctctcctccttctccttgacctctctgcctcagtctttgttaatgttgaatcaggatttgagagctggagcccatctttctgcctccatccaaagaggccttttaactcagcctccccttctggaagaagacttggccttttctctgcctgcatgtccctgtgcagaggaaggctgtctctcaagggtaaccccaatctgcctgtgctgctctttcataccct

SEQ ID NO: 1884831 - DNA, 4001 bp, Homo sapiens; identical to SEQ ID NO: 916401

SEQ ID NO: 1884832 - DNA, 4001 bp, Homo sapiens; identical to SEQ ID NO: 916415

SEQ ID NO: 1884833 - DNA, 4001 bp, Homo sapiens; identical to SEQ ID NO: 916420

SEQ ID NO: 1884834 - DNA, 4001 bp, Homo sapiens
ccgggaagcagaggttgcagtgaaccgagatcatgccattgcactccagcctgggcgacacggtgagactcaaaaaaaaaaaaaattcataataaaaagtttaaaaacaaacacaaatgctttcatccctttctctcatttgatcctatttatctacatgaaaacagaaaaagcagccaattttatctctacaaattaaggataagtaatttttcaagtccatgaagctagtaataattatgataatgttcagatttgacaatgtagtttattatagtgttatgataaaagcatagagcatattatagatttggtgcaaaagcaattgtggtttttgccactgaaagccaaaagccgcaattacttttgcaccaacttataatactgttaggtaacatttagatgaaaataagttaacatttacttggcacttactagggatcaggacctgttctaggtactttacatgtatcaatttttaaagtcttcacaatcatgtgataaataggtaggttccattactcccattttacacataagaaaaccaaggaaagaggggttaattaattagtccaatcgcacagtgacgaactgggatttgaatcaggcaatctggctccagagtagacacttgacacgatacatatcttctcctagtaactaaggatctctgatttgaaacaaaacatttagaaaccaagtattatgtagggctattgccactacaacatactacctaatatagattcataacaagggttagacctcattttcctatgggtaagtcaactgatacatcacagggcaggtctatacagccacagatccctgccgtgtgcaaggcaaaaaatttctactatagccaggtgtgtggttaagaaagtacgagaacatacctatattctccctccctcatgttgctgtcataagttgtttctcataacatctttctagaaacattctcaagaagtgctaatttataggaattagtttaaggcgcaggcatttatgaaatataagatatctcggctcacatccccatagcagaacctgcaaatgatcttatttatgctaactctttgaccctgcccaagagctgattccggaatttctattgtagtttcgtttttacctttcatgaagattgtgtacaggacatagaagcgggggaaatgacgacccaagaaacgatggtatttcccattaatcgcttttgtcttggttaccacataagacatcaagttcttcacatctgcctttggagaaaggtgaagctttgaagacctacaaggaagatcaaagagactatctgggaatcagtcctagaagctccctcacgccttgagtccctaatgtaaagcaggagtctcggagattgtatcccaaggcttgacacttctgaaatccaaggaaggtcttggggtcaagaagagataggcaatcagactgtgaaacacaaatcaggcaaaggccaggcaggaaagtaactcagggtatgcctctggagagagcgcaatgcctgtgggacaatttgaactgcaggctaagtcagaaagaggtggaatcgagatagcagcggtaaaacctgagccgaaaaagtgaggctgaaagatgagctcaggacacgcggggaaaccagacaatatggggcactgagagtacagagggtcaggaagccgggtcactagtggggatcggagtttgaatcctgaacagaagaataaaaattccagggccaaggcgtggaactctgagaattaagagacagaatgcaagcaaggttgagacactgaaagagcctggacgtcaaaaatgcttttctcgctacaggtccctcaccgaggggccccccaagccaggccagagcgaccaagttgcagcctccgggtgacaaaatgtccaggggtgactgccgagccccacacagccgaccgagcccagcacaccctggagagcgccatcttcacagcgagagaagcgggagagaagaggttgtctttgggtcaaagttaaccgtacgtcgcgttcgttcgaagacgcatgcgtcttttctgagcgctgattggtagccatagcctgcttggctccagcacaagccaggagagggaaggactcaaagactaagtgcggaaggagggccaggattggacacagcagtacttccaggtttaaaggcgccggaaacagggtgtcccagagggagcgagttcttatgccactggtgtgggtttgcgacgcggagggcaccctgtccttgaggcgcccagtgaccctccgcgattccttagggcctcagggcttcccagcgccgcccttgccctctgcctggactcggggcgtcggagcctcgactgttaggtagcagatgtcagtttgccagtgcctggggctaggaggacccgcggcgccctctaatggtgccggcgtggataggccgggaactgtccactttccagtcagtctggcggcgaaggttggaggcctgggagcggcccctgtgcggactgagtacactttttcctctctttgtcgtttccagaactaagtttgtgggaaaatggttttcgttaagcacctaccgaagaccaagctctgtctcaacttaaatgttactattctgagaggatttctgtgaccaccctatctgaagcagtgccggcgaaaaggacacacttcacacttattctcatgttactctgttttgttttgttttgttgttttgtttttgtgacagttttgctctgtcgccccggctggagtgcagtggcgcgatcttggctcactgcagcctccgcctcccgggttcaagcgattctcctgcctcagcctcccgagtatctgggattacaggcgtccgccaccacgcccggctaatttttgtatttttagtagagacgggatctcactatgttggtcaggctggtcttcaactcctggcctcaagtgatccgccagccttggcctcccaaagtgctgggattacaggcgtgagccactgcacccggccttgtattttctttgtagcatctgtcacttacagtgtttatgtatttgtgtccttgtttgacagctccctgaactagaatgagggtaagcatcttctctgccttgttcattgctgcacctccaacactaggtgccttacttagcacatagtaggtgttcagtaaacatgtttgaatagattcatacttgaaactaagaaggattcccagaagtggtacttaactgcctccaagaattaacagtcctcttggatatatatgaatatttattcttcatggaaggtggtagagcatcccatgtgggttccctggatataggttcaatcttggcattgacgtttgttttagtgaatgttaccttggatatgtcactttagctctgagtttatttcccttataatagtacctactttataagaaatctttgaggatccaaagagaatacagctgtgaaagctcccacatctgtataatgctttatgggtcacagagctttatattagcacaggttattaatgactgtaccactcgtgcagtcagaggaaaagttttaaaagatggccctggatcttcacaagtgttgggtagatggggtggacgggatagaaagttgactaagacggctgggcgccgtggctcatgcctgtaatcccagcactttgggaggccgaagcgggctgattacccgaggtcaggagttcgagaccagcctggacaacatggtgaaacctcatctctactaagaatacaaaaattagccggatgtggtggtgggcgcctgtaatcccagctactcgggaggctgaggcaggagaatcgctttaacccaggaggcggaggttgaggtgagccaagatcgcaccactgcactccagcctgggcaacagagtgagactgtctcaaaaaaaaaaaaaaaaaaaaaaaagttgactaagacatggtcttcatattcaggtagtttttttttttgttttttttttttttggagacagagtc

SEQ ID NO: 1884835 - DNA, 4001 bp, Homo sapiens; identical to SEQ ID NO: 916421

SEQ ID NO: 1884836 - DNA, 4001 bp, Homo sapiens
ccaataagcagaagctgcccgggttagggattccttttccagcgggctggctggtgagtcaatgctccactctgtaaccagcactcaccaattccctgtccctagcaagatcacctcccctagatactgtgggggacagtgctaggcctgagaggaagggggacaagtgggcatccctgagccccaacacaggcatccacaaatcctgctccctcaacctccgaatccacaaaggtaagcgcagctaggagtacacacacaaacacaaatacaaacataaccccctcacacacacatacacacacacacacaaaagcctacaggagttgcataaacaaaaaactactgtttgcacaaatacacacatttgcaggcacacacacacagcgactggcacacaaacatagctcttcagaattctgcactcacaaacacaaccaagccagctcagtctcatacacacagggtctcaagcatgcacgccctcacctacacacaaacacacacattcagatttttcaaagtacaccttcacatcaatgcttgcaaacacagacacaaacactcttacgtgaatgcacacgtacacatgaaaacaccctcacatttatgcatcctcaaataagcaaacacacataggcacagaccaacaaaaataaaagtgcacacagtgataaacacaaacattagcaggaccatacacaattacaaacacacgaatctgcacacacgaaaacgcacacgcagaaatttactcacaggattgatggtactaacacaataaacagatgcaaaaatggaattctcaaacagcgagtatacactaacaagctcaggaaacacacccaaacaaacattcacagccaagtgctggcacaaacccctccagctccagcccttggtcccaggccctactccctcagccccctttccagaagcgaaaggcaaatcctggttgcccattcccggcttccccaactaggatccctggtggccacgctggccccaggggaaaggaggcctggtcccttctcctactcagacccacacaccccctcctcacgcacacctgccaacatcccccctcccccttaacacacacacactctctctcctcacactctgggcgccctgccgagcacggaacatacgtgcgccgcttctcctgcgcccaatgaggggacgaacttgcacacccagcccgcacggcgtgaatacaaacagcgctctcatagtcgctggtgtcccccgcctcagccgtacgacccactcaccacagtgccccataggctgacctggaatctggaaggtgcagcgaggaaaggagagacgtggtgagtgccacctccgagctgtctgcgggaagacccgtccaccctgaatctccccctgtccacatctccctcagagccccgtgagcagcgcactcaggcctgaaactctggagttcgggaccaggccaaatggcacccctcctgctcccccgcctccccaccctgggcctgggcctgggctcggcggccgggcggggaaaactacccaggccgcgcggtctccactagctctctccatgagaaaggcccggctgggccccagccccgtgtatgacaaaaagaagccggggccggctccaggagccgggagaaccgcgctgacgcagcttcagggcgcagagggggcgcgggggtgggggaatccaatctgggctggctgggctggagaaggggagcgaagtgtggggcgtggggcaacttctgcaagttccagggatggcgaagggggcaggggtacctcccggactaggccttggaacccgtgacccccaaatatttgtgaggagaaagagagaggaagagagacgcaattttcgtttcgcgctgcccccgccccgtcagccccaaactggaaggtaaatacttacttagcctccgaaccaggtacaagctaatactcaacaatactgatgccttgttttttttgctctgtccggacagcaacgctgtagccaatttagatatgctataaatttaagaggttgccatggccacggtgcgcccattggccgctgggccccctacgtgcagcgccacgtcaccaaatctgaataaggatgcgcgaattacgcggcgaccagacaaagatgaggatccggaccgcttgaaagtgggggaaagtgccggcgcctccgccaccggggaaagccgctccgcagcgccgaggccagcagccacccgagatacctggggaagcccggaacaggcgccggggcgtgcggcccgtggcatgaggttgtgaacgccacccgccccccaccaccccactccgggcagcccagcgccaggccagagattgcccaaggactggaccggctgagtcttggtccggaccagactcgccctgcagctgctgagacaagaggcgaagggcagcggagggcccggcaggcccgagggccaggggcccaaagggagggcaaggcggccgaagccgccggggcgcggggctatgatggtgcactgcgccggttgcgagcggcccatcctcgaccgctttctgctgaacgtgctggaccgcgcgtggcacatcaaatgtgttcagtgctgcgagtgcaaaaccaacctctcggagaagtgcttctcgcgcgagggcaagctctactgcaaaaatgactttttcaggtaagaggccgcgccgctctgctgcctgcgcgcccaccctgcgcgcgctccactggggcgctggggaaggggatacccccatccccatcccagcctccccggatcacaagcttagatggggagcgggcagcactttgctctcctcctgtccttggtccaggaaaggtcccgagcccaggcggaggaagaaggacgctgcttcgctgcctcacgttggctcgaggccggctcagagcgctggcggggcagagggaggaagccctgacaaacttgctatccactcctctccgccccttccaagcagctgcaaccccaagacagaagcttcaagccccgtcccgagagagaggaaggatttttgcatgagttagagacgcctgaaggcttctcgctccaggcagaatgtgtgagcccatcggccgcaatcccaaacagaaacttctcagctccagagggggcccagcgaggaaggtctcccctggtgatgggaggagagaacctcccccacccacctcccaaccccttaaacatttcctcccatgttgaaaagtagaaacgaaatcgaggctgagaatcaggacctctggggtctagactgggctgtggcacctccccagcccccctacccctgtgggccctgtggctggccagggcagatcacctctctgggcctcagtttccccagcctggaagccactggagtttggggcagctgagccctacctgtttcctctgggcacccagagccggctttgtgaacaggaattccccgcgctgaggaatgggggcgtgaatcacgccacagagaaaggcagcctgccggccccagcgactccgcactgagaatttgaatgggagaaaatgtcagccgctcctttacacgtgttaactccctggacccggaggcccgatgcccctaatgtagcagtgcttgcaaagtgcctaatgatttttgataaggtgcatatggccaattacgctgccggataaggccaaaagtgacttatggcttctaatgccctcactacatcaatgtcacccaaattcgccctgtttagagacatgggtgtgagtagatgtggggtccctagagtcctgggtcctcccccaccccacccccaacctgagcctcacccatctcctatttcgggggaggctggctttctccctgagctcaaagaagaaagaaaaggaatgagatcaggaacgcgggaaagcggggatttgagagattcctgtcctggccttgcaggatctatgattgtcctctattcacattcccctgctgcctgccaggccagaggtttaggggggctgaaactc

SEQ ID NO: 1884837 - DNA, 4001 bp, Homo sapiens
gaggagggattgaccggcctggggtcacacagctagaaaggccaagattgctatgccgtttttttttttttttttttttttttacaaagaaagaacagcggagcaaggtggccattttattttctcaaagccacactacctgctgctacacaggacataaaagtgcaaaattccaccaggaagggaaacaaaacagtcttgagacagccatgtctcagaggtgaagattggaggagattttaatatagggtgtgaattccaattcacatctcttccaacgggacctctttccgaagtcccgggaactaacattcatcaacacctctgacatcccagaggatcgcaacattcctgccaagggttattactcccatttcccagatgaagagattgagtccctgcagcacgcaattagacagtagcagaaccagaatttgaactctgatccaccccgattctgggacctgtggagctccaggtaccgagagctggctctcgcctggggccttggagtctgggtagctggatgctgggagaggctgcggaggtaagggcccaggggctgaggttgcagcggctgcccgggaatgcggcccttgcacgcccactttttaacacagtgccatccctgacagacacccttgtccttttcctgtgctgcccttcgtaacaccataaataaagccttagagtaacgtgacctgagccaggcagtaaatgatggcactgtcagttgtacacgactgttgaaacaaacacagactgtaatcatcgtgctgtacggggagaaagacatttggcaaatgagattccattttcacattggtttgtgctgagcatataaatttcctgcgggccggccagcattggggatgtgtaattgattgcctgcattataataaacaagctgtgacaggtgatcattcatcatattccgctgaacgttccagcacaccagaaaacggaggaagagagggaacgcgcgagcaaggggagaggagaggaggaacctgggggaggggagggggtcggaaagaccgagtattcccgacagacagaaaaaccaggggaggggcgggggagggaatccgctgagcgggcgggggaaagtgaaagcaattactataattcttttgattatctaatttgttctttctggccttcgttatatgaccctccccccctccccccactccaacatagaaggtcccccacggggacttgggaaggcacagagaacgctccctccacgatcgagggaaggaaggggggaggcaggtgggggaggggccgcgtctagttgtaaccggagtagatacattcgggaaaacctggggggagaaggaggaggaggaggggaggagcgtgtgcaggacttagctttgctcttgcactgagatgcctccagtcggatggataggaaccagcctctttaaatacatttttttaaagggtgtctgaaaaacaagtgaaaagttccttttattggagaaaaaggacagcatccaagttggcatcagatgtggttccacaagcctgtcatatggtgctctcattcctccccctcgctccctccgccccgccccagctcccacctccccacccccactgcagccccagcctctctgtctctctctctgtgcccttggcccggggctgggggtcgaacagcaactgctgggaagcaccctcctctccaggagctcccacctagacagacagaaggcggaggtacactggcatatgaaggacagaaagacaaatgcagagctctcgagccagcacacgcattaaataagtacttacattatgcaaaagccaagggcctcaacaagggggtgaatgaagaagggggacaaggagggctgcgtcccagactagtttccccagctctcaccctgccaatttccagcccccgcctccctatcccgcaagcgtcctcccattccctccctggtaccaagcgcttagagcaggtgggagcctcggacccagaaggctgggagctgaggaggcgtggcttgcgctaacatcgggggcggggcctggctggggcttagtcggggcggggcccacgccggagggggcggggcgagcacagaagaaagagcgttaggggctcctttgccactcgttgcacgctgcttcccagagtcttctgctatttcatcgtagccttaacaactggaatctgtcgccttcgagatgttcctaaagtcactgctttgggagaatctgttcaagggacctgctttccaaaagcaatgacatcagcccagcaacgtgatctgtgttgtccttgaaggattaacaactcatttgggtctcccaagagccctaggaggtagccagggcaggtgctgttgtccccgtctcacaacgacctatgaagtgcatgttggggccttgattttacaggggaaggaacacaggcacaaagaaacgaagttactctctcgggatctggcaatgaaaaagtcaaaatttgaagccaggggtcttctgacctgttcttcagcatccctatgagaacatatactttctccctccaacactctcctcccatccataagtgcatacaggtgctgaataggaggggcagagttgagtctatattgaatgattgtgcatccagatcctcactaagccctcttggttttgcctgacacacgtggctcactgtgtgccccctggtccaggccacctgcatcttcctcctggaccactgtccccgcctcatcactggccttcctcttaatgctgttctcactcccatccactacccaccagcagccatgatgatcaatgatggtcaccatccataccctgtatcaactgtctctctagcgccatcttttttttttttttttttttttttttaaagacatggtctccctctgttgcccaggctggagtgcagcagtgtgatcgtagctcactgcagccttgaattcctggacacaagcaatcctcctgcctcagcttcttgagtagctgggaccacaggtgcttgcccccatgcccagctaatttttatttttatttctgtagagatcaaatctcatcatgttgcccagactagtcttgaactcctggcctcaagcttccccagttgctggggattacaggtgtgagctgccacacctcttgccttagcttccccagttgctgggattacaggtgtgagctgccaccatcttttttttttttttatttgtttgttttgttttgttttttggaggcagagtctcattctgtcatccaggatggagtgcagtggcatgatcttggctcactgtaacctctgtctcccaggttcaagtgattctcctgcctcagcctcccgagtagctgggattacaggtgcctgccaccacgcctggctaatttttgtatttttagtagagacagggtttcaccatgttggccaagctggtcttgaactcctgacctcaggtgatccacccaccttggcctcccagactgctgggattacaggggtgagccaccatgcctggccaggtccagaagttttccatcaccccaaacagaatctcggtacccattagcagtcacttcccattcttccctcccgttggcccctggcagctgccaatctgctctctgtctctatggattgcctgttctggatatttcatgtaagtggaatcctacgatatataatctttgtgtctgcttctcccactcagcatcatgtgttcaaggctcatccatgctgtagcgcatgccagtgcttcctttcttcttatggctcagtgctgttccattgcctggatggaccacattttgttgatccattcactggctaggggtcatttgggttgtttccaccttttggctattgtgaatagtgctctatgaacaattgtgggtaagttttcatttgaatatttgcatttatttatttgtttatttatctatctatctatttatgttttggagacagagtctccctctgttccccaggctggaattcagtg

SEQ ID NO: 1884838 - DNA, 4001 bp, Homo sapiens
gaggcttggagaggaggagggattgaccggcctggggtcacacagctagaaaggccaagattgctatgccgtttttttttttttttttttttttttacaaagaaagaacagcggagcaaggtggccattttattttctcaaagccacactacctgctgctacacaggacataaaagtgcaaaattccaccaggaagggaaacaaaacagtcttgagacagccatgtctcagaggtgaagattggaggagattttaatatagggtgtgaattccaattcacatctcttccaacgggacctctttccgaagtcccgggaactaacattcatcaacacctctgacatcccagaggatcgcaacattcctgccaagggttattactcccatttcccagatgaagagattgagtccctgcagcacgcaattagacagtagcagaaccagaatttgaactctgatccaccccgattctgggacctgtggagctccaggtaccgagagctggctctcgcctggggccttggagtctgggtagctggatgctgggagaggctgcggaggtaagggcccaggggctgaggttgcagcggctgcccgggaatgcggcccttgcacgcccactttttaacacagtgccatccctgacagacacccttgtccttttcctgtgctgcccttcgtaacaccataaataaagccttagagtaacgtgacctgagccaggcagtaaatgatggcactgtcagttgtacacgactgttgaaacaaacacagactgtaatcatcgtgctgtacggggagaaagacatttggcaaatgagattccattttcacattggtttgtgctgagcatataaatttcctgcgggccggccagcattggggatgtgtaattgattgcctgcattataataaacaagctgtgacaggtgatcattcatcatattccgctgaacgttccagcacaccagaaaacggaggaagagagggaacgcgcgagcaaggggagaggagaggaggaacctgggggaggggagggggtcggaaagaccgagtattcccgacagacagaaaaaccaggggaggggcgggggagggaatccgctgagcgggcgggggaaagtgaaagcaattactataattcttttgattatctaatttgttctttctggccttcgttatatgaccctccccccctccccccactccaacatagaaggtcccccacggggacttgggaaggcacagagaacgctccctccacgatcgagggaaggaaggggggaggcaggtgggggaggggccgcgtctagttgtaaccggagtagatacattcgggaaaacctggggggagaaggaggaggaggaggggaggagcgtgtgcaggacttagctttgctcttgcactgagatgcctccagtcggatggataggaaccagcctctttaaatacatttttttaaagggtgtctgaaaaacaagtgaaaagttccttttattggagaaaaaggacagcatccaagttggcatcagatgtggttccacaagcctgtcatatggtgctctcattcctccccctcgctccctccgccccgccccagctcccacctccccacccccactgcagccccagcctctctgtctctctctctgtgcccttggcccggggctgggggtcgaacagcaactgctgggaagcaccctcctctccaggagctcccacctagacagacagaaggcggaggtacactggcatatgaaggacagaaagacaaatgcagagctctcgagccagcacacgcattaaataagtacttacattatgcaaaagccaagggcctcaacaagggggtgaatgaagaagggggacaaggagggctgcgtcccagactagtttccccagctctcaccctgccaatttccagcccccgcctccctatcccgcaagcgtcctcccattccctccctggtaccaagcgcttagagcaggtgggagcctcggacccagaaggctgggagctgaggaggcgtggcttgcgctaacatcgggggcggggcctggctggggcttagtcggggcggggcccacgccggagggggcggggcgagcacagaagaaagagcgttaggggctcctttgccactcgttgcacgctgcttcccagagtcttctgctatttcatcgtagccttaacaactggaatctgtcgccttcgagatgttcctaaagtcactgctttgggagaatctgttcaagggacctgctttccaaaagcaatgacatcagcccagcaacgtgatctgtgttgtccttgaaggattaacaactcatttgggtctcccaagagccctaggaggtagccagggcaggtgctgttgtccccgtctcacaacgacctatgaagtgcatgttggggccttgattttacaggggaaggaacacaggcacaaagaaacgaagttactctctcgggatctggcaatgaaaaagtcaaaatttgaagccaggggtcttctgacctgttcttcagcatccctatgagaacatatactttctccctccaacactctcctcccatccataagtgcatacaggtgctgaataggaggggcagagttgagtctatattgaatgattgtgcatccagatcctcactaagccctcttggttttgcctgacacacgtggctcactgtgtgccccctggtccaggccacctgcatcttcctcctggaccactgtccccgcctcatcactggccttcctcttaatgctgttctcactcccatccactacccaccagcagccatgatgatcaatgatggtcaccatccataccctgtatcaactgtctctctagcgccatcttttttttttttttttttttttttttaaagacatggtctccctctgttgcccaggctggagtgcagcagtgtgatcgtagctcactgcagccttgaattcctggacacaagcaatcctcctgcctcagcttcttgagtagctgggaccacaggtgcttgcccccatgcccagctaatttttatttttatttctgtagagatcaaatctcatcatgttgcccagactagtcttgaactcctggcctcaagcttccccagttgctggggattacaggtgtgagctgccacacctcttgccttagcttccccagttgctgggattacaggtgtgagctgccaccatcttttttttttttttatttgtttgttttgttttgttttttggaggcagagtctcattctgtcatccaggatggagtgcagtggcatgatcttggctcactgtaacctctgtctcccaggttcaagtgattctcctgcctcagcctcccgagtagctgggattacaggtgcctgccaccacgcctggctaatttttgtatttttagtagagacagggtttcaccatgttggccaagctggtcttgaactcctgacctcaggtgatccacccaccttggcctcccagactgctgggattacaggggtgagccaccatgcctggccaggtccagaagttttccatcaccccaaacagaatctcggtacccattagcagtcacttcccattcttccctcccgttggcccctggcagctgccaatctgctctctgtctctatggattgcctgttctggatatttcatgtaagtggaatcctacgatatataatctttgtgtctgcttctcccactcagcatcatgtgttcaaggctcatccatgctgtagcgcatgccagtgcttcctttcttcttatggctcagtgctgttccattgcctggatggaccacattttgttgatccattcactggctaggggtcatttgggttgtttccaccttttggctattgtgaatagtgctctatgaacaattgtgggtaagttttcatttgaatatttgcatttatttatttgtttatttatctatctatctatttatgttttggagacagagtctccctctgttccccagg

SEQ ID NO: 1884839 - DNA, 4001 bp, Homo sapiens
agggacatggatgaaattggaaatcatcattctcagtaaactatcgcaagaacaaaaaacgaaacaccgcatattctcactcataggtgggaattggacaatgagaacacatggacacaggaaggggaacatcacactctggggactgttgtggggtggggggaagggggagggatagcattgggagatatatctaatgctagatgatgagttagtgggtgcagtgcaccagcatggcacatgtatacatatgtaactaacttgcacattgtgaacatgtaccctaaaacttaaagtataataataataaagaaaaaaaaaagaaaaaaaaacttatatcttaaaatctagggaaaaccacaattttaaaaaaacagtatgatttatacatgaagagagaagatgaaatgaaatcatataaaatgctcagttaaaccagtaaatgcaggaaaagaaggggcaaaaaaaaaaaaattaacaaattcaataaagagaaaatagttacagatatagtagctattaatccaattacagttgacctttgaacaatgtgggggttaggggtgctgtccctgcatgcagttgaaaatttgtgtatgacttttgactacgcaaaaacttaactactaatagcctactgttgactggaattcttaacaataacataaacagtctattaacacatattttgtattaaatatattatatattggattcttacaataaggtaaactaaagaaaagaaaatattattaagaaaatcttaaggaagaaaagatatatttaccaatcattagatggaagtggatcatcgtaaaggtcgtcatcctcatcatcttcatgttgagtaggccaaggaggaggaggaaaataaggtatcagtcttgctgtctcaggagtggcagaagtggaagaaaatttgtgtgtaagagaagccacgcgtgcaacccgaaagtggacttccgggtcacggcggagccggctctcacgtggaggcggggaagtttggcccaccggaaagtagacctgggccctgggatcccagagaagaaaaagaagaagaaagtggtcaaagaaccagggactcaatactcaattttaaacaatgatgattactttgcccatgtttctcctataaaagccacagccccctctaagagtgtggtccacgggcaggcacctgagatgcctctagtgaagaaaaagaagaaagagaagggtgtcagcaccctttgcgaggggcacgtagaacctgagaccacgctgcgtgccagacggacagagaagtcatccagcccaaggaaccaggtgcttggccatttggagttcctcagtgggcagaagaaaaggaagtcatctctggccatctcccatgcctctggggtgaaaatctccccagaccccagacagggtgaggaggaaaccagagttggcaagaagcttaaaaaacttaagaaggaaaaaaagggggcccaggaccccacagctttctcagtccaggacccttggttctgcgaggtcggggatgctgtggacacttgctcagtggggaaggagggtgaggaacaggtagccttggggcagaagcggaagcacaagagccccagggaacacggtgggaaggcgaagaagaaaaaaaaatccaccaggagggagacgccctcccaagccactccaagccctccaggtccatggagagctgccctaggaaacgaagtaaaaagaagccagtcaaagtggaggctccggaatacatccccataggagatggccctaaaacccccgcgaagaaaaagatgaagtccaagaagaaggtaaagcagccagtcattgaggagccggctctgcaaaggaagaaaaagaaaaggaaagagagtggggtagcaggagacccttgaaaggaggaaacagacacggacttggaggtggtgttggaaaagaaaggcaacatggactaggcgcacatagaccaggggcgaaaggccttgcaagaagagactgatcgccagtcaggcaaaacggaagcttctgaaaccaggaagtggacgggaagccagtttggccagtgggatactgctggttttgagaacgaggaacagaaactgaaatttctcaaacttacgggtggcttcaaaaacttgtccccttcgattagcccccacccccacccccaccctcccgccccacccagcccgattgcaaggtccaacgtggccctcagtaagaaggtggccgacagtctgcagcagagcctgcagcgggaatatggcctggccatgagctgaaagtacagccgcggagccggcctcggcttctccaccgccccgaacaagatcttttatattgacaggaatgcttccaagtcagtcaagctggaagattaaactctaaagtttcgtctccccaaaactgccacaattatcccatttatgctggaggttgcaaattattttgtgtgaaaagtcagatcttggtaatgaccttgaacagtaggatataaataactcccataagcttagcgttccaataatggaacactaggcataaatgggttattcaattgtgaagatgaatgccatctgacagttggctcacattgaacacctgtggagattaaggacaaggacaactatcttgatgggcttggacaaactggggcggggcagctcatgtttccggagccaggagaacaagtgagtggctaaaacctcctgttttctgttaaacattccgtccctgtctgagatatcaatatgtacagataacctttgttgagtgtttaccaggtgctaggcacatactagtgttttccttaatgtatttaatcttcataattatgaaatgggtgctattattatccccatcttatagatgaggcaactgaagttcagggataaagtaataaaattgcctggggtcacccaaacactaaaaaaaaaaaaaaagagaagccacgcagttcaaacctgtattgttcaaatgtcaactgtgtatcaataattccttaaatgtgaatcgtctaaatacaccaataaaagacactattgtcatagtggataatgacaagatacaactatatgttatctacaagaaacccactttaaacttaaacactcaggttaagagtaaagggatagaaaaagatatatcatgctaaaagtaatcaaaagaaagctggagtagctaaatgaatttcagacaaagccaactacagaatgagcaacattatcaggaataaaaaggggtaccacataaggataaagggaacaattctccaagaagacaacaatcgtaaacatggaagcattaccaagagtgtcaaaatacatgaaagaagactaataaaaatgaaaagagaactagacaaatccattgttagaggcgggacttcaccatccctgtgtcaatgttatgggtggagacttcaccatccctttgatagagccagtgggcaaaaaaatcaaggctatagatgacctgagcagtattatcaatcaccttgatctaatgacatctatagattactccattcaacagcagaatatacattcatctcaagcttctgaggaacatttaccaagacagaccacattttcaccataaaacaccctcaacaaatttaagaacacgaaaattatacaaagtatgttctccaaccacggtttaattaaagtagaaatcaataggaaagatgtctagaaaattcacaaatatttggaaatataaatattaaaaagcataattctaaataatccatgggccaaagaagaagtttcaagagaaatttaaaaacatttcaaactaaatgagaataaaattataatttactaaaatttgtggggtgtagcaaagaaatgtttggaagaaaatgtatagcattaaatgcgtatgttgtaaaagaaaaatatctaaaatgtgatacttcagcttaccttagaaaattagagaggagaaacttaagcctaaaacaagcaaaaaagttaatatttcatcagaaataa

SEQ ID NO: 1884840 - DNA, 4001 bp, Homo sapiens
actatgatgttctgctgtctccttagttagaaaggcttgaaatagcaaagttgtgtgtagactgtggcacatgccaattccaggaactgcctttaaagtggaacaggtttgtaatcatagccaatccagggaaatggcagaactttatctccatcctcagtttagattcagagcctctgcatagagaaatacaatgatttacctctttcttttgggtgagcatgcccacatctgagctcttgttttaaggcatcaataaacatggtgacaatggacttagaagtgttacatttcatgtaaattttcacctgagacaaagcatccgtggtcttggcaggtctgaattctaaatgacgaatctttgcttcaagggattgaaagggagagatggatcagtaattgaaatcttcacgtacttgctttttatcctcaaatttcagtaatattttatgacataaaatagtaaaataaaaataaaaacagcaagagtaacaagttcaaattacctttaatcacattatctttcttctttttaaaacagcatgtgggataaagagcaagagcagtctttgaccatcatttcagacccagtagtaaccactggcaacattcccacttgctagtttctgttatcctctgtgatcatgcaaacatacatatatccatgtatatacatatacatcattaatagcgtttttcaaaaaatggaaatgtggtcatgctttttgtttgcttaaaaatacctcatagacttccctaggtcattatttatagatttacttcattttattttgaactcttgaacaatgttctgttacatagataataatttatctgagcaatcttactagtgggcacttggcttgtattgcgacatttgctgcagagatcatgttggtgtattcttttatactccccaaatggtgtctttttagagcatgcagcacttgcctgaagatatcaggtggttgtttttttctgtcttcaactaagtaggtaaagcctaactgaatatttagttttcagatttccagacacccttttacaaacacttcctgcttctgattctagttcggatacccataaccaacagcagtaatttatattctaaatccttaaagacaacagcatgtctgcattcccattctaatgcccaaccaagaagaaaacttggtggccaccttccaccttcctctatcttctccccactgcctagtccagcctcccactctctctacgacgagccctgagtcctttgggggttaacagagaccgaacacttggaagccattgatcaaatgaattaaaatatgcttcccagaattcctcactcatccccccacacccctcctcacacatacacaaagaaaggtccaactctttgaacaaaggttgcacttgcaaaaaacttcttcagtcttggagaaacagactttttcattgagctctcccctgcacttaaaacagaagccagtagaaaagaccaacctgaagcagaaggatctcacactccctctccaccttccaccagaaggagagaacccccaggtcccaacccatctgggccctggagattcaaccttcttctcagctctctccatgggacctgaagattggcaggtctgggaagaagggaggtggggagtgtgaagacctaccagtggctggggaaaggggaagcgcgatggatgagtgagtttcacatctggctaacctctttcctcgaagaaccaagttagaaagagcgtggagaagggatagggaggggaaagtggatgaggactgctcttattatgctgggaaacctcagtttcactgtacagtgaggcctctcatacgtctctggtctctctctctcatttgtgagcaaacaagagttctcaaaggaagtggtacctgaacgacgtgggatactttgaaagcaggccttcaccctccatctccgggggctccgcggccgcctcctccccgctgtctgagcgctgcctctcgggcgcagtagctgagctcccagagagggacggacctagatcttcatcgggcgcccctttctcatctctcgggctctgactcctcttggggtgcttagttcaaggctggacagcctagaagacacccaccaagtgtgggtggggaagaagcagagcaagggcaggccgacccgatctgcagccacactccttgtcctccgggtgaaactgcagaccgcacagcgctgggaggacacatgggccacagggcgggagctgtccgtggttctggccggcgtcgacccgtgggtatttaagggttggggcagcccgcctaccttctgctaaaccgcagggaggagtcgggggctgcagaacctggattggttttaattaacccacgcgcaggcaaggtctgagagccgcgtttctgcgccctttgcagcgcaaatcaccgctggtgagaatctgaaggtttcttttcggtttctccgtcagtgccatttctctttgaggacgtagaaaactttattcggatacgtctcatgttctcttttcacctatcccccagaatttgtccaccaccgccccacttctctccagttctctcccctgccccacaaacaaatctaggtggaaaagcgcaaggtgagggctgcagtagccaaatggtcattcccagcttcactcctgatctctaggcagtcctgctggccttggggattctgaggcaaactggggatgggactggttttaaacccaccgtccccgcctgtatgttgacgggatgccactttaagttcatcaaatataaactaaatttttggaacgatgagggttgaatctcttgaaatgaatggagcatgtttctggttccagctaagctggttctaagccaggactgatgagtggaaggcgttccttttcaggttggagagttcctggggagggaagagaaaaggaggtcgaggaatccagcggtgcttaggcaaaaagactaatatcctaaatcaactccacagggtggagcaatagaggttctgctgcatcgcccttgcagtaatcattttaatgtgtctagtctttcactgagcccaaataaaatatttattttattttcaattaaaaacttgtggaattaagcccgaaaagtgcaataatttgagttttaaaaccttgtatattaacggattatctttccccctcctcaaactatacacctggtggcagattttggcaacttttattttacaatcctttaatgagtggggatggagcagtattcctggagcaatagggtgctttcttttcacttcctcatatttgaaggactggtttgtcttgccctattttgcaagaatttttgattctacctccaaattggctttttctgtaggctgcagtgtgctcaaagggtgaaatggccacagtgccagcgacttttgtgttaaaaattgttctccacttcctgctcctggaaacacaaaaagcctcccagatctcaccaaaattaccttaaaattgggcagcaaagtgaagtcatgctttcttatgctggttccttagtaaaacaacctgtctgtagcatgatctattttttttaaatcaatgttgtttatgttaaagtgttaactatttcataaaacgtgcactgcggaacacccccagctgaaagaagtgtcttaatctgttctcgctgctaaaaggaactgcctgagactgggtgatttatagaggaaagagatttaattgactcatagttctgcatggctggggaggcctcaggaaattaacaatcatggcagaaggggaagcaaacacgtccttcttcacatggtggaagaagagagaagtgcagagcaaagcgggggaaaacccgttataaaactatcggatctcatgagaactcactcactatcatgagaacagcatgggggaactgccgccatgatctaatcaccttccatgagatctctcccccaacttgtggggattacaatttggattcaaaatgtgatttgttcggggaca

SEQ ID NO: 1884841 - DNA, 4001 bp, Homo sapiens
atttctcacacttcttgccgaagaagaataaagaatgcacatcattccttgtacaaagacaaccattgatgtagcagttttccaagggctaaaaagcattactttaatccatatataatgagtcttctctctgtgtcaggtgctgttttaaggtctgagatgcagagggggcacagtctcaatcccctttgagactaatgtcacacagcgtacatgcgccctctgcacagtgggggcctagaagatgagtctgtgtttgatggaacagattatttctttctcattgagttgataacctgtattagctccttttgctgctgcaacaaattaccactagcatagtcttacaacaacacacatgtattaccctccagttcagaaatctaaaatgggtcttactggatttgcaggtgaagtatcactgcggatggggtgactatgcttttgaaaattatgcaagcagagagagcaccatttcagagtgcattgtcagtcttttcaatttcaagagtttaaagaaaaatcctcactggcctattttgatttctcttaataagactttaactatgaagcttttcttttgtgtgggttgggcccctgggatatgtacctcatgaattgaaatctgaacaaagataattttggactaacaaaagaatcatcaacatcattatcccttaaaggtgtcttcaagtctcaatttcttctgaggctctcaggtagaatctatctcctggccgttttccacgtccagaagcttccagtgttcctttgctcatgtccacatcactcctatctctgctgcctttatcacagatcctctcactctgaccctccttcctccttctaataaggatatgtgtgattccaatgggtctgccaggatagtccaggacaagctcccagtctctccattagattaacgctcatctcagtcacatcttcacagtctcttttgccacgtaaggtagcctattcataggttccaaagattagaacatcttcgaaatgtttggagaacaattattctgcttatgtattgggggcatctttgagggaatcaattattctgcctatcacagtgatcaatatttaaataccagaacatttaccatttatacttttggttaaaatatgagctttagttaataataacaaatacaccatactaataatataccatactaacatatagtaattattgctactactaataccaatgtataatactatacaatatgtattattagtatgtattattatacatactaatatataataattattagtaacacgcatagtaatgaataatgtatgtcacacatactatgcatatgtataacactatactaatgtataatactatactaatatataataataatataccatactaatgtaagatgtcaataataggggcactgggtatccccattgggtttacaggaactctgtactatctttgcagtaattctgtaaagccaaaaataaaagtattaaaaatgacatttcctgctgccttgaaaatgtgggaaatcaattaacagtggggcatgccagcatggagacagttgactgtatgagtctttgttgggacacacccctttccgttaactgaagtccctaaaatgacctgcttcattcattgatgccatttctctagtggcttatggaatttgagattgtgactcttgagtaaagtaattgaacagacaattatgtaattacctctgcgctctgcaccatggagaaagaggtccgtaagttcccagtgtgtccttgaaggggaatcttgcctcttctcaggctcaggttggtccctcagagtccctccaagtcagatggagagtcaacgacagatgtgcaggcaggtgaaacttcttcttctcgctgtactttacagattatagtaatttcaagctctattaaatgaggatgcatctttgctggttgatgtccctgtttttctggttaagtgcatttgtttccaggagctgatgtgctaagagaattgttgcctaagatctagacaagtcatcccagttattgtgtgggagggaaggggaaaaggaggtggtgggttgttaaaagctggtggaaaatatgcctgtggctaagaataatgtaaatcctggtattataactttaagccaggtgctgagccattacagtattcaattattttgatgcttcaaggcaaatgtttccaggtctgaaattctagtctacttgacattcaacaaatgatattgtgttttcatggaaagatgcccatttatgaagggaagaattcatgtcattcagcctgttccctgcctgccatcagcacccccattaatacacctgttactaatgtaaggtagtcacctttaatgttttctaaaggagaaagagtctacagccttctgcggagatactgcaaggtcagggaaggccacatcaggagaaaatcagcctttcttcctattctattttgaactaggaatcttggaactgtaaccaaattctgtcattttccttacctttattcctgcacgtagttgcttcttagctaagttaaccttacttcttaaccttccttgatgaaaattaagaaggaagaacagagggtctgaagatctgaaagccgtatgtaattttctaggttacatataaaatatctgccttatcatcataactatcattcgctgaacacctttcacaggcaagatactgtaccacacacttctcgtatagtatgccactaacttctcatcgaaatcctttgatgatataacccacatttatcttgtgaagcagtcagcaaaccacaatcctgaggtcaaatctgccccactgcttgtttttgtaaatgaagattcattgttaacacaactgtgcccgttcatttctgcattttgtatggctattttcccatgaaaagaaaagaattcagtaactcagtggctgcagttctgtcctggtagccaacaatgttgaaaatatttcaaagtctcaccttttacagaaaagagctggtgaacccctgatctagtaccatgtcttaagaaatacatgaagactaatgcatttaatcctccctcacaacttggcaagcacatattgctattttcccagtcttgcagataagaaaatgaaagatacaaggagttaacttgcacaaggtcaaagagcttacaaatagtagagacagcaatcaaatccagccctttactccatagctggttatctttataccacagaacatgacaatcacctgcactcaacagcccaatctattttcctactaccaaacttctttatcaaatatgtgtgtttattctttccaaaagagatctaatgtgcttgcaaaaccatcagtctgtaggaattcaatatatatgggcctgtatcagcacacagacgcatgctttgtaacatgaggacattataactttaaaacttgtgtttctgtcatttttattcctctgaatagtttctttcctaatttgtttcccacacttactcatttaataaactttgaaatcaactcactaataaccatgcttaatgagaacagcacaggctcccccaggctccaaagagttacattagttagtttccttttaaagatatatcacatatttccaataattttattctagagggcagtaggatatgtttccaatagaataaagcttttggctatctgcaagtgtcacaagtgagctatgtgttgtggtacttaaaagcagggctggggctcggctgctggggtttgaattcacacttcattacttagtggctctgtgatttaagaaagttacttaatttctctgagcctcattttctttgtctgaaatgagcaccgtcaaatgctagataacaatgcctgttacatattaagaaccatgtatcggccgggcactgtggctcacgcctgtaatcctagcactctgggaggccgaggcggggggatcacgaggtcaggagattgagaccatcctggctaacacggtgaa

SEQ ID NO: 1884842 - DNA, 4001 bp, Homo sapiens
ataaggcagggtgcagagagaaagtcactttgctgaaatgttattaaaacaggttatagaaaaatgtttgtcatatccttaaaataacttaatcatgtaggtagtttgtaataaacgttcctagtaaaaaattaacatgctgcagagaaagcacacgctcctcgggtcaccgcttcactcccctgggacctgatgtaactatcatgatcaatgtcatgtacagccttccagatcttctcctgaggttttgctaacatatttacccacggataggaattggagcatataatgtttttgtctttgcttccttacaaaatatcatactgcatggttatttaataatgtactttagcactcaaaaatatggcttaggagtttttttcaacatctgtatttgtagcttttttttttttcccaactgcctcaaagtatttcatggagagataacggttttgttttgtttgtttttttgagatggagtctcgctctgtcaccaaggctggagtgcaatggcacgatctcggttcactgcaactgacgcctcccgggttcaagtgattctcctgcctcagccccctgagtagctgggattacaggcgcccaaaccacacccagctaattttcgtatttttagtagagacagagtttcaccatgctggtcaggcttgtcttgaactcctgacctcaggtgatccactcgccttggcctcccaaagtgctgggattacaggtgtgagcactgtgcccagtcagagatataaagttttatcagccacttctgtcaatgatagacactggttatttccaacttttcagtcctgccaacaatgatgggatgtgtttctgggtctctccgttatacatgcatgtgcgtttttctcaaggtattagaagaggttgacttgaaaggctagagggcttacttattaaataattcaatagatactaccgaatagttaccgcactgtaactatgccaattcaacttccaccagcagacagtaataacccataattccccacacctggccaagatttgctattattggatggttcatgattttaatgggctttctgttaactgttagtgaatgtattagtccattttctcgctgctgataaagacatacccgagactgggcaatttacaaaagaaagaggtttaattagacttacagttccacgtggctgaggaggtctcacaatcatggcagagggcgaaagtcacttcttatctggtggcgacaagacagaaaatgacgaagaagcaaaactggaaacacctgataaatccatccgatctcatgatgagaggtgacagaatgctggcagccctcgcagccctcactcgctctgagcacctcctcggccctggtgcccactccagctgcacttgaggagcccttcagcccaccgctgcactgtgggagcccctttctggactggccaaggccgcaacccgctccctcagcttgcggggtggtgtggagggagaggcatgggcgggaaccagggctgcgcgcggcgcttgcggaccagcgagagttccgggtgggcgtgggcttggcgggccccacactccgagcggccggccggcgctggcggccccgggcagtgagaggcttagcaccgaggccagcagctgcggagggtgcgccgggtctccctagcagtactggcccactggcgctgcgctcaatttctcgccgggccttagctgcctccccgccgggcagcgctcgggacctgcagcccgccatgcctgagccttcccccctcccaccatgggctcctgcgcggcccgagcctccccgacaagcgccgccccctgctccagggcgcccagtcccatcgaccacccaagggctgaggagtgccggcgcacggcgcgggactgggaggcagctccacctgcggccctggtgcgggatccactgggtgaggccagctgggctcctgagtctggtggggacgtggagaacctttatgtctagcatttattgattgtaaatacaccaatcagcactctatctagctcaaggtttgtaaacacaccaatcagcaccctgtgtctagctcagggtttgtgaatgcaccaatctacactctgtatctagctactctggtggggacttggagaacctttacgtctagctcagggattgtaaacgcaccaatcagcaccctgtcaaaacggaccaatcagctctcagtaaaacagaccaatcggctctccttaaaatggaccaatcagcaggatgtgggttgggccagatgagagattaaaggcaggctgcgggagccagcaatggtaacgtgttggggttctcttccgcaccatggtagctgtgttcttttactctttgcaataaatcttgctgctgctcactgtttgtatccacactgtctttgtgagctgtaacactcactgcaaaggtctgcagcttcaagccagcgagaccacgaacccactagcaggaagaaactctgaacacatctgaacatcagaaggaacaaacttcggacacgctggcctttaagaactctaacactcaccatgagggtctgcaacttcattcttgaagtcagtgagaccaagaacccaccagttccggacacaatgagacttattcactatcatgagaatagcgtgggaaagaccagccccatgattcaattacctcccactgggtccctcccacaacacgtaggaattcaggaagacacaattcaagttgagatttaggtggagacacaggcaaaccatatcagtgagtttcattatattttcgtatttaatggccatttgcatgtctgtttctataaattgctggtacattcttttttgccgtaacagttatcaaactgatggactagtattatcctagggtcagatagtagctaaaactgttgtgatacaaaactatgtgagaaatggtctttgtgggaagcagtaagaagatgtcatgatgattcatatttgatgggcgtttgttatgtgtggaacattctgcaaactgatttatagatgtgggtccctacgtgaattccaacagcagcctggggagggagatgctatgatcttcatattagagatgacaaaactgaagctcagagatgtaaacctacttgtctaggggcagcgttgggaagcagtaaaagcagtattaaaaccagggccctgctcttaacctgccctgtctgcaatgcccttagcaacctaactgacaccaagggactagggaatgagcagggataaagtctccaataattataagaaatcaaggaactagtacaaaaagtagccaggcatggtggtacatgcctatagtcctagctacttgggaggttaaggtgggaggatcacttgagcctgggaggcagaggttgcagtgagctgagatcatcccgctgcactacaaactggttgacacagagagactgtctcaaaaaaaaaaaaaaaattctatcttctcaatgatttttaacttttatgaagtcttcttaactctagttgcacgctttattataaagattattttgtcaaatatttttctggacacacaatctttctttggtattgtttgcatggtataattttttcaatctttatctctgttttaagtgaatctcctataaatatcatttcattttaattcaaaggggcatttatttttgtttaatcgttagattcagtctccttatatgtaatgcaattcttaatatatttgggctgtcaacttattctgcttttgtttttctgtgtcttgcctgttttttcttatttcaaatgagaaaatgtttacttacatattttttctatgaattaggaaattataaataatgttaccactctgaagtaattaccatagagatttcaatatggataattgacacattaaatgttgtatttattgagacttttcttctgtctcaaaaaaaaaagaaatcatgaatttaagaagctgaaaattttgcgctggttgcctgatgtaacttaag

SEQ ID NO: 1884843 - DNA, 4001 bp, Homo sapiens
ctcctggggctggcaggaacaccccactcttaccccaactcacagtgatcgccggagggtggtgcactctgctccagcacctgccacctgcctaacacgcacttggggacagcttccaataggatgcaagtggcagacaaaggtaccccaggagggcaggtgggggagggtgagaagcactggggaatgggcacccctcatctcccacaggctcagcggctccctcaggacaaggagaaagctgggaaccctaagacagaactggaggttctcgttgcctaaatctctcctggcttgctgcacatggaacccatttcttcccattcagggctctgcagaggcagaagatgaacagtaagatgcaaagatctggcaaccttcagagctgggtgagtcctggggtcctcaccccattacgcctaagctacaaccccatattccctgtcctcccagccctgggggccctggtcccactacgcaggggtggctcaaaagcccaatgagctggaagggtctgagagagcaccccatgtcacaggggaggtgaggcagccttggacctgggatcttgtttgcggctctttatcatggacacactcctagaactccccagtccctccacctcctcctgaagtactccaagagctggtcaacaccgagagcccacctcaggctgtggcacggctcttggtggggcctggtgggtcatgggcttgcctctcccataactcagggcccagttggagacaccgtgactgttcactaatcagacacctgagtgtgtaggagaaaggccttgcccactctattcttcagatgagaacactgaggctcggcgaggcgacaagtctttctgagggccagtggagcagaccagcctgggaggcctaagggaagtgctggcagagctgaagccgcggttcccctgcctggtcttgcagtccagccctccacctcacccttccccctccctcagccctgccctgggctccaaactccgacctgatggagtccccacaccctctcacctgggcaggcccacctcagactgcctgctctagacccacacaccccatcccctcctccctctgcaggagcatgcccctgccatcactcccttgctccatgaaacccaaaggcagacccctcgcaatcctccccattcccatagcactgcagcccctgcatctgaccacatcccttcctgcttaaaactcttcaacagctcccagcttcccttggaacagaaagctcactcctcatgtcagcattcaagagccccgcatacttttctggcttcatctccagccactgtcaccccctaccatcacctccacacgaccctcttaacaccctggtctgctttccaaacacacaactgcttgcatgtccctggctcagcctacagggccagctatgtctcacccttacaaaacttcacacggccattctagagaggccaagtgcacccctcagggctcccgtagcccccaggcttcctcccttcctggtgcgtatcctctgtgtgcttgtctgaatcctcctctaaactgtaacctctctgcaggcaggggcccagccaaccttgccaaatgattgtcctctgcacccagcacacccgtgaacccctagtaggtgttaaagaaacactgtctaacattaggctctaattatttcattgatagtgtggtctggctcccccctccatccgcatgggccaaggagacactcagccgggggtggggaagctgtcagtcaagttcccctcagctcccacctccatgctccctctctgggggacgggcctgcccccaccatggggttccggagcagtggtaggcccaccacagtgcctgaggccccagggactgtccctgggagaaatggcttaacatcttgtcaacaccaacctccccaagctccttaatcacttcagacactacacagctgatgggtgagcaagaggacctgagacctcccccatcccctctccacctgcctacaggtccctggggcctctgcagaaccacccagaagccccaaattgtgacatcaccagttcaacagccttccccactcccatcacttcctgaaacagccagagcgagaagatgatgcatgtgagccctgcccttgggaagcttccaggttgggaaatgaggaatgagcctgacacccagggcccagagagacccaggacagaggcaggtcaggaggcagacacgcgctgctgggtaatgacgacagcaccagtaatcacggctactccttgttaagtacttactaagtgcaagactccaagctaagcaattaatagaccttttcttgtttaatccttaccacaattccatagggtgagtataatccttattttatagattgaaaaaggaggctcagagagatctagcaatgtgtgcagcatcacacagctagtcagtggtagagctggaatttcaatccagatctgccagctgcaaagccggtgccctttctaccccacttcaagctctaggtaggggtttgttacttcccttccaaaaagcctcatggaagccccattaccaataacataagccccccacagctgaggctcccccagtttgacccctgcctgccttctcaccactgctcccaacacaccaccatcacaccttagattttaacactgcccttagattttaacactgccgtttttgaagtttacccctctgagtcttggcttctgctatttactcaggctcaaaagccagccccactttacagatgacaaaacagaggactaagaacgttaagtaagtagcccaaggtcacgcagctagaaagcaattgagcctggttagagcccaggtcattagagcatcaagtaatcaagcattaatttgtgttacagacaattaggggatgagaattagcaggacttgtcactaatggtgcagaagaagttaggggagaggaatcaggcaggttccagagtgaaggagggccaggataggccttgagaaatgggcaggttctgaaaggggagggcatgagaaaagtacagagatgacagcaaagagagagagagaggaagggacagggggttgtcaaaattagggagagaatgtggaatggtgaagagagctgtgactaggagtcaggagacccggctgtatcccctcaacttcctgtgtgatattgggcaaggaaggcccttccctctctggggggtgccttgtatatcaatgaaggatagatgcacctaggtggtctctggggtcccacctggccctgacatccaggaatttgtgtgtgtgtgttgctattggatcttgaaacacagaatctgaccccagaccctgacacggggcacaggcttggacaccaagggcagacagggccagctgccaacatgacacctgacagagagcacccgagggctgtcctcagccacacacagtcattcatgcaccccttctccccctgcatccgtgctactaagcatgtgtggactcgctacagtggatccaatcctgtggaagctggaacgcagcagggacgaacgagtcatatcaaggaaaggcgtttatcctcaaggaaaggcaaagggaatggaggtccttagagaaggggcagagaaaaattcctgaaagtaagggtggagttttccagattggaatacatggtctgccaaattggaggacatttgaggaaaaagaatggtccccaatcaagacagcactgcatccgaacataaagtacctttcagaccatcagcaaaggaaacagtcctctccggggggacctgtgctcgcaataacagacactgctggagatctcagagcccgtggaggcagaagatgcctcactaaagactgtggacacacatatctgggcacacacacatgatgcacacacaggtgctcacacacaagcctgaacagagaccccaccgtgggccgtccatcctcccacttcccgactgagctggtaagcagctctccctctccaggaaacacgcc

SEQ ID NO: 1884844 - DNA, 4001 bp, Homo sapiens
atttgcccaggctggtctcaaactcttggcctcaaatgatcctcctgccttggcctcctaaagcattgggattataggcatgaaccactgctcctggccagaattcttgattaaacaatagggtctaaataaatttaaaccccttttattctttttattcttacagggtagactcaaatattctatttctttccaactttatattcttgtcataacaacccagtattctctgaggcaaatggatgcttatgaccaactggcctgaaatgggggaatatagggttagtggtgagtcacatataagaaaatgcaagagaatagcagtgtatcatatttcaaaataaaatacaaactatacataaaactgaccccaacaagtatccatttcatttcctgtcgtgtatctatatgctttcctggaaagaataaacttcagttcacaaaatcagatgtagaagatacatcacttttaaaaattctacgtaattttaattccaagattcccatgccaccaggctggtgggaaatccagtttaagttgtaattaggccttttctccagtattacatatgaatttgagtgtaataccccaaaacttgagaaggccattgtatctccagtccactggggcaatgaatagcttgagcacctgatcattataatgacccagatgtgtatctttttcttttactctgcggtgagtttttctaagggaggaatcctattttgtttaattttgtattatagcatgggatattgtgcctggcagatagtaggcaatcagttagtatttcaggaataaacactcttggtcagtgatacagctaatgatttgcaacaagcatatccttaaagtaccttttcagtaacgatttccatatgaacaaagaaaaaaactagaaccaagaggtaaaattataatcctgttgtcttgttcccatagccatactctgatttcttttatgttctgtgccctggcttgatacttaatttgacagctaattataatgtttattaagctctgaaatatactttctcctggcctttttgtctgaagttgtttgaggtgtcaccatggttggaagttaagagcatggaagctagacttcttggtcttgaattctagctttgtcactaacttagtaactttgggcaaattacatgtctctgcttcaatttcatttgttaaggtagtacctatttcacaaggctgatggtggcagcagtggggcgtccagagctgccgctgccatcacgccagctgcagcagggaggggcgggcagcggcggcggagcagctgcgggagccgcagtggctgctgtgggacatctgtgcctcgcgtcccctgtgccttgagaccccaaagcagccgactgcgccgccaccatcctcgcgttgccgggtggggcgacgtgctccccggccaggagcctccaccgctccggaccctggccctatgtcgccgctctcgcccgccgccgccgcggagtgggagtggggaggaggggaacagtccttggagccggccccgggagtactcccggagcctgccgccctggaagccgccacgatggaccgggctgagtcgcccgccggaggggaagcagtgtagtcgggcacggaggggcaggcagagaggggccccaaggcggagctgggtccggggcggagcggtgttcgcacacaaagcgctggggctggacccagggttcggggccaaggcgagaagtgggagcggggcccgctttggggacccggacagcggtgtggccaccgcgcacacctccgacagcgccgcattcctgggccttgggaggaggctctgagtagggccgcctggggcgcgtcttcagggtcctcccggcactggggtgaccgccgagctagacgcgcctgagggctgagccccagggctcgtgatctgctcccggaggcgccccccaggcagggccgtgagccgggcgagggagagtcctgggctgcccctgagccccggggccacgggaagaacttgcagcgacgtcatccctgccccggacacagtcccgggcccagggaggacctggaacattcccttcctccccccccccccccccgcccccgcccatcagcccagcctgcaaggaggcgccaccggacctgcacactcaggagcaggtgagccagggacaagcaggagccccgccccttccgaactggtggagcaggagctcccagggtgcagctgcagccaccttgccgcggctgtggacattttctgtgctctcagaggcccagcaaagtcccctgcccactgcaggctccagggtgcctactccggctgcctggcttctctccactgttagcacccactctgaactcagagcaaggtcgggccgagcctgggtactgtcacagcctggccgagcgtgcacacgctcaggacagtgctgatacgccagccccctgccgtctcggccccctttggaacttgggcaccaacaagcgtgggagggaggctgagaggggtctgaagacagctggacactgacttgcaggcgctccttggcatgaacagcctgggagcaggaggcagacaggttcctgggtggaaggggatgggtccccagtgaagtcccaccctcaagctggtgagggcttgaagcctgcagaccagagaggtaacttgtggtgctgctccctgggcccactcatggctgcccatggaccaatcagcatgcatttcctccctctgaggctcataaaatcccccagactcagctagattggaagagaggatgggaagacaatggatgacctacctgtggagagaaactacccattccagaacctcctctctgctgaaagctgaacactcaatgggaagacctgtttgcagagaggagccagccactccagggtctccgttctgctagaagctgaacactcgttgggacacccttgctgtggaaaggacatccttactgtggaaatgagctactaactgcaggtctccttcctcttcatcttccttatccttctgttccattgctcagtaatgctcctcttcatctgtctcattctccacttgtctgcttgatgcaggagctgaggagctgcacagcaaggttaaaagagctgtaacacaaacagggctgcaacatgccccttgctccccacagggagagaagagctctggccctcggagaagcccagacctgggagctccttgagcccgggctgtgactccctctttggggccctggttggcgtcactgcattcgccagtgccactgttggaagctgcttgtgatgcgcctggtccagggggaagctgtttgttgtgtgcctggtccagccacctcatggagagcctgtgctggcacctggagctgcccaacctgggcagcagcttgtgtgtgtgactgcacagtggccacgcttgctcacacacccctagcacacccctctgctccacccgtctcaatctcccttggatccgggatccaggttggtagcaagtgcgagtgggcagaagcagcccagtgggcccagagcaaaactcaggcaaaggtgccactagactggccaggaaagcgacaccctaaagatcccataatgctgatatgttaattctattctataagcaccacacagaagtgatagcttttatttcttattttgtctagcctggagacagagctaaggattccttgaactgcaaagtcttttccagttcttagtttatacaatccatactcaccttctgcctaactaagcattgtcatttttgtgccaaatgaagagtaggactcctacgattgtcctcagactctcttggctcaatcctcctgctttaacctttcctacttcaaaaactcctgaagttttgcttccccttctatagaatggaaatatatgtcgcaatacttactgcaaagaaaattatatattttaaaaatagactaaagagatgttgtgagacatcagacatcaatcagatgttgtgagaactgatttc

SEQ ID NO: 1884845 - DNA, 4001 bp, Homo sapiens
aaatagagcaaatgcagctaggctgggaaatatgtgctttgagggcatgtccagtaaaattaagtaaatataaatatgatgtttattgaactgcttctgcatgcacgtctctgtgctagtattaattatggacaacaatctcttcccacaaagagtttacaatatagtgaattttttatgttaagacaattacttatcaagatgtaaattcaagtagaaaacttaaagagaatgaattaaagtactatgaacttttaatggtgactgaaaccctatttggtagtgggaagaagaatatcacaaaaaaatcttcatatggagatgatattccaccatactttagaaagagcatatccaaagtcaggaaaacccaaggcattaaattcagtgaagaaagcacccagtttggctttattataaactttttaaaggcaagaagaagcaggaattgtgactagaaaagcaggttgcacttttaaatgcaattggaggttcttgagcaggggactaattatgaggagaacttcaggaagtttcatcttattaggtagtgtgcaggaagaagcatatccaacaggtaaatggttctggatgtagttcctaggagagattttgtggcctatataatggtggtggatttaaaaatgaaaaagaggacaggtgtgaagctttgcagaggttgcatacatagtcagctagaccttccagtctgagttactagaagaatggatgcaccattcatggtcataggaacttcagaagcaactgactgagtttcatgttatacaaattaagtttcaagggacaagagacattaaagtgaaaacatttaaatggagagttggtaaatatgtatcatgagagtggttggaatgggattattttgaagacatcttcttaaaaataatactaaatcctaaaaaatgaaagcaactgaactgtatgttatatatgtagatatacatatataaaatagatagtttatacatgttagtatatatgttcaaatgtgctctttcattggattctcagtgcgatactgtgggtcaggagccacagaatttaaaagaagacaagaactattttactcagaagttggaaaagaaagaataataatgaagtatgtactctctccctctaagaaatatgaatgtgaaggatgaaaatgggccaggagggtggtggaaatggctattaaattcgaaagaatattttcctgaatttgcctaaattcaggtgtctattaatttttacctggattgatagtataggattctaactggctttcctgttttccagctcactgatgctccattcagaggccagtctgatcttttataactttagatataacctttttcccttctgtttaaacacgtctgttggtccatcctttcttataaaaatatttaaagtctcatctaatttcattctcaccaacttggactccaaactcacttcagagcacttggcatttcccaggcttaccaaagtatgtttagacctgtggaaattttctgctgtctgtccaagagcctaccccctaccaaacactcctaacaaaatcttactgaaatctacaacttccagatcaaatgctactccctgagaacctttgctcatctccatcctctaagtagatattcagtcctgtgttgcccaagtagccagcccaggaagatgttggattaataatatagttgaatattggtgttcatgggagcctatcaagtctgattcttttgcctaacatgaatgagataactgtttccatttgtttgtttttagcaaaagtattagcgttagagtaggcagatagatatacgtgagcaggagaggaagccctgagaaaagaaggtctgggaagcctcactcactcccagggaccacccaaaatctgcatgttaatagtatctctaatgatgaagtgggcgggcaattagtcaagtgtaagcaaggaaaagagaaaatacctatgcaaaaaggaacgcctcttaagatgcccagtaacggctcactctgcagtcaaaccgtcaaactgtagctagctacatactgatatggaggagaaagggcaaaggagaatttcctaagaaatgcacatgtgcaacaagtatagatttaacagctatataaccttccttgggtagcagtaattagcaaggcaaccatcacctaaaatttgtagtcaacacaagctgaagcatgctcattaatcaatagtaagggagagtcccacaaacctgggatgggaactatgtggagaaaggcagaaatggaaaaaactagacaaaagaagcccagaccgaggtaggaacttaaaaaaagattctgacatcataaaaaccccaatgcagagctctctggagggctgctggctcactctctttcagcagccagctgtgcctcatccttcaaagggtactgtatctttaaataaactctgctctctattttccttcaataaattctcttttatggctaaattgtctcttggccaaattctttctcccaagaaagacaaaggacccaggatttctgcacttcccactaacattaggatattagaaatttgaagtcgtgtctatgttaataccatcagagtagattttattgaaaattgctcggatatatatgaaacctatcaaaatgcaaccactatttttgcattctgcacaacataaacctgttcagacatgaagaaaatcatgaagaatgttagcatcagcacaaatttcctgcaaacaaaagtctgctttaatctcaatgtattatggaaaagattgtaaagtatggtcctttaattagatcctctttgttgcttactcacagtcagattaccaatacagtccataaagttatttcttaattgaagcaactgtatcaatattatgttttagaataatagtagtgttgtttgattcttttgtgacaaggcttaatatgcaatttcagtttcattgtttgaactttttattattactcaataggtatgaaccctgagcaagttggttaactgcctaccaattgaattatctaaattgatgaaaagaattctatattaatgaaaacacaatacatgccacagaaattgttagagttaccagctgttcaattgcatttaatttttgtctttttaaaatatttatatgagatccagcatatactatctcaaccagagtaaaaatgactttccaggctctcctacaaagcaataattttatgatgtagacagattctaatgcaaacatgtataaaaatagttaaactactgaagacaatttgtatgttgcactttctaggaatttttccaagttaggcaagaacaaaagatgaagtagattgttgttgttgttgttacagaactgggcaaaattaaatagatgtgatgatttggggaaatatactttccagaaacaattaattaaaacattggtgaacactgaagaaatttttataagcacaagttctgcattagaaaaaggtcacaacttcagacattaatagaatctactctatcttttgttcttccaatattcaaacaccccccgccccttggctctgtataaaagcatttccagtaagccccaaaataactattgcttttgtctcacattgtgtgtccacctcaattcttttgtcatttctattatgaaaataagcaaccccaattataactttgctacttaaatagcatctgcattgattcacctcaccttatttctactgtctctcttccattgcaggttgaaaaaaaaaaaaaacctctaaaatctattctcaaatttctcttcaattcctattactgtttttcaggacattagaaatgccatatatagatatatgtttatctatatatgataaagcctatgttttcttttggatcattcttttagaaccactattggcactacctcctcatgtgtttctcctcagcctgttcattgcatcagttttatatattctagcctccaattttgataagcctgcttaaccctcac

SEQ ID NO: 1884846 - DNA, 4001 bp, Homo sapiens
atccaagcaccctgctacaaaaaaagtgttgttatccccattttacagattaaaaaaaaaaaaacaaaaccctgagactcagcgagacaagactaggtggaagagtagaaaagctacaaagggcagaggaaagctgcaggaggcacaacgcaggcggcacgatgcagttggcagaagtgcagttttgtaatcaggaacttggatatgagggccggcttcatcacttacccgctggggggagcctctggaaagttgcttaacttctctcaatttcttcatccataaagaaacgggtctccatttcttcatccataaaattcaggctactgtgcctgtaacaagcaattcttgagagtattaaaagaaatcatgtataggccaggcgcggtggctcacacccataaccccagcactttgggaggccaaggtgggtggatcatttgaggccatgagttcgagaccagcctggccaacatggtgaaaacctgtctctactaaaaatacaaaaattagctgggcatggtaacatgtgcctgtagtcccagctactcagaaggctgaggcaggagaatagcttgaacccgggaggcgaaggttgcagggagccgagatcttgccactgtactccagcctaggcaacagagtgagaccctgtcaaaaaaaagaaaaaagaaaaaaagaagaaagaaagaaagaaagaaagaaagaaagaaagaaagaaagaaagaaagaaagaaagaagaaggaaagaaagatgaaagaaagaaagaaagaaagaaagaaagaaagaaagaaagaaagaaagaaagaaagaaagaaagaaggaaagaaagaaaggaagaaatcatgtatatattgcacttaacacagtgcctggctcaacatgtgttagctgtggtatctgttattgttattatttgtgttctgtgttcattaacctaattctatcctaccctgttataagccaggatcatctgaccatctggaaggattctgtttgctctattttgtcctctcctcaacccccagagtcgcaggtgacggaaaggagagggtgagtgacccttctgcctggagattcttgacatgaggtaacttctgaaaccagacattccatctgcttctttccatatctcaggggaaccctagcacaaggcagtgggggctcagcctgtgctcattgattacgctaatgatgatggatttcctcccctttggcacttgatcaacagctgcccagtgttttatcaccatttcccagggcagagcaggccaccccaacccctgctcacgagggccttttctttcttactccatgtgacccagaacagagcccattaaagaactcactcatttctccaccctccacccctttaattacaaacagtgctgagagttgaataacacagaacaaaagacagatttatttaccccaggacataaacaagattatcagaaacaggcattcagaagcccttagctcctgggagaattttaatttgctgacccctggcttacagaaatcttaggtcttttcacataattataaaaccccgagagttttgcctgcttgaattagttattggcacgcatccccaacccggccgctggctctcattggccaattacaggcatctccactggggctttaaaccgggctcttttgagacaatgcaggaaggctgaaagaaattctcttttccttggtgaagttttcctactggcggcttcctggaatgactgaggtacacaaacaggagggaggaggaggcataattacattgattagaacactttgggttacaaatcacttaaccccacatcgaaatggcattaaaccaaaaagggactgtattgtaactgaaaagtccaccattaaagttaccttcaggcacagctcaattcaggggctatcaccatgccagtgggctcagtctctctctacatctctcacctgtttgcctctaggtcattggcttctttctcatgggaaaaatggtacccagccctcctaagcttccaacctatcagctcctagaattaagtctcattggctcagctttggtcacgtgcccagagggaaccaatcactgtggctggaggatgaaatatgctgattggctagacctgggtcatatgcccaattttttttttttttttttttttttttttttttttgagatggagtcccgctctgttgcccaggcaggagtgcagtggcaggatcatggctcactgcaacctccacctccagggttcaagtgatcctcccatctcagtctcccgagtagctgcgattaaatgtgcctgcaccatcagcccggctaatgtttttgtatttttagtaaagacagagtctcaccaagttggccagattggtctggatctcctgacctcaagtgatctgccccctaggcctcccaaagtgctgggattacaggcgtgagccaccgtgcccagcaagcataccctatcttgtatctgcggtgggaccaattctatctgaaccatatgggctaagggcatcatggggtgagtcctcaaagaaaagtcagggtgtgtacccaggaaaagggagacggatgctgagcagataaaggcaacgaaatactttgcttttatctatccatgatagtattcctctgggttaggggttacaggacaccccacactcttcctggagcagcttggaagtggccattttagcatctgttaggggttaaattgttttctccccctaaatgtatagcttgacatcgtaacccacagtacttcaaaatgtgactgtgatggttaattttaggtgatgtgtaggggaaaactctcctcaaactgcgtttttcctctactctcacactacaaccatcatcaacacagaaggcttctgtgaccaaatgtggggggcggtttccccacataccaagcagcggacaccagctgggtgtcctctaattcagttctgacaccatctacctggagatagtatcatatcccaaaggttgagggctcagtccccaagactgcctttctacacacacacaccagttgcaagtttggaacttctggcagacgggcttcaacccccactttggatttgattagtctgctggcgtggctcacaaaactcagggaaacacctacttgcatttaccaatttattataaaggatattgcaaaggattcagatgaagagctgtatagggcgaggtaggggtagtggtgcagagctttcgtgccctctgggcaccaccctctgggagcctccatgtgtttgtgaaccccgaaactttcagacaggtgtcagttaatttagaaagtttattttgccaaggttgaggactcgcgcctgtgacacagcctcaggaggtcctgacaacatgtgtccaaggtggtcagagcacagtttggtttatacattttagggagacatgaaacatcaatcaacatatgttgtaagatgaacattgcttccttctggaaaggtggaacaactcgaagtgggaagggggctttcagatcataggtagataagagacaaatggttgcattcttttaggtttctgatgagcctctccaaaggaggccatcagatatatatttatttcagtgagcagaagggtgactttgaatagaacgagaggcaggtttgctgtaagcagttcccagcttgacttttccctttagcttagtggttttgggggggcccaagatattttcttttcacatgttcaactatctggaagctccccaaaccctgtccctcttgggttttctggaagcttcatgatatcaccattccttcccctaggatatagggtgggaccctctaatgggagggtcttaagatccacagtcagaaaggtgggggaacattagagtgaaaagagggcaggagaaagtcagaggcccacccacgaggctacccacgaggccgacacacaccattcttaaaacagcctgtaacaagggctgtgggagttatgagccaggaaccatggacg

SEQ ID NO: 1884847 - DNA, 4001 bp, Homo sapiens
cagcctcctaagtagctggggttacaggcacacaccaccacgcccggctattttttgtatttttagtagagacggggtttcactatgttggtcaggctggtctcgaactcctgaccttgtgatctgcccatctcggcctcccaaagtgctgggattacaggcgtgagccaccgcgcccggctctttttttgtatttttagtagagatggggtttcaccatgttggccaggatggtcttgatctcttgacttcatgatctgcccgcctcagtctctcaaagtgctgggattacaggcgtgagccgcagtgcccggcaacaattcatcttttaagatgtaaatcaattgtcatatctcctgtaaagcctcccctagcttcctgttttacagttattcaaacttagttattcatccattcaccctacaaatatttatgcaacctctattatgtgtgaggcatggctaggcattttgaatctaatgtagatctgctcactgcctactaaaaattcaatggctgtctataaagttaaaatgcttagcatggctaacagcatcctcaattatctggccccttcctagttttcaacgtctgcctcccagcacctctccactttaccctttatgtgtacccacgaacttggaattcacttaatatggttctctcttaggtctctgttcctttgtctgtgctatatccccttcttttttttttttttttttttttttgagacagagtctcgctctgtcgcccaggctggagtgcagtggctcgatttcagctcactgcaagctccgcctcccgggttcacaccattctcctgcctcagcctcccaagtagctgggactacaggcgcccgccatcacgctcggctaattgtttgtatttttagtagagacggggtttcaccgtgttagccaggatggtcttgatctcctgacctcgtgatccgcccgcctcggcctcccaaagtgttgggattacaggcgtgagccaccgcacccggccatcccctttttagtgaacgccaatcatcctttaacacccagttctggaagcatttcctgtgtgaagtcttctctgaaggattcccccatcctccactcccccgttcttattccaaatccaatagtatcaggtacttccttcttagtggctctagaacattccatatttaatgtaatcatacaatatattgcaatttttgtttgcacacttatctttctcatcagatagtcactttatagcagaggtcttaaccctagtcaccaacataatgccaggcacataaagcctggtgcttaacaaatgttggttaaatgagccaacgaatgactaagaatacacttatttggttgaacaaattgtgtgtctttttttttttttgagatggtttcgctctgtcgcccaggctggagtacggtggtgtgatcatggctcacttcatccttgacctcctgggctcaagtgattctcccacttcagcctcccaagtagctaggaccacaggcatgcaccaccacacccagctaatttgtgtaacttttcatagagatgtggtcttactatgttgcccaggctggtcttgaactcctggactcaagcaatcctcctgccttagcctcccaaactgctggaattgcatgtgagctactgcacctggcccaaattgtgtgtcttaataaggatattaaatgacaggagagcaaagctgaaaggatattgtccctattccacaattttaactagtgtaactgttggccttggaggataaatctctaaccccaggtaggaaaataaatagctaggaagtggctatgaagcatctaggtaaagaagtggcccttctaaccctctaccctatattccccttacttgtttcttcagttgtgttccttttcttgttctgaaaggaattttgatatcccaatagatacaagttgaagaaggccatctcagatcctccctggcctcttctggaacgtccaggttggggcactggactctgtgcctggtaaccatggtaatgtcctaagaattaccacaactgacactccctttgtctaatgaggcacaggatttataggttcacagtggagctggagtgggagtgggctaaataacttcaggaaaatggaggaatcaattgtcagtacaccttttcttgacctagtcttccagtgtaagcttcagaaggcagtgagtagaaagagcaccgacctgggctcatatcttagttatgccatattctaggtgtctgactttgaatagattaactaagcctccattttcaattttaaattaaaaaaatgacaatgacaatatctgacagttatgagaatcaaatgagataatatatgcatatttccttagaacggtgttcaacacataatggaaacttaaattttttttttttttttttttttaagagtctccctctgttgcccaggctggagcgcaatggcgctttctcggctcactgcaacctctgcctccaggtttcaagagatcctcatgcctcagccttccgagtagctgggattacaggggcgcgccactacacctggctaatttttgtatttttggtagagacagggttgaccagcctggtcttgaactgctgacctcaagtgatctgccctcctcggcctcccaaagtgctgggattacaggtgtgagccaccacgccccaccagtatttaaatgttaatagttatccagccttatattcaggaaaaaaaagaaatctgaataggatactttcaatgagtctttgtttcagcagtggtgtgccaatccatagtgacttttgaaagcttgttaaattttcattgattttgtgaattggttgttaaacaaggcattattaaaaatcaaattaactaaacttacaattgaatgttatattaaaaataaaggtagtacatcgggtgtggtgtctcacacctgtaatcccaccactttgggaggccgagacagatggatctcttgagctcacaagtttgaaatcaggctgggcaccatggtgaaaccctgtctctacaaaaaaataaaacccacagaaattagttgggtgtggtacgtgactgtagtctcagctacttgggaggctgaggtgggaggatggcttgagcctgtgtggtggaggttgcagtgagctgagattgtgccattgcactccagactggcaatagagccagatcttgtcataaaataaaataaaagtagtaaatactaacaagtcatctcttcctgattattttactcttatctatgctcatgagtttatttacttccattgcatctggatattccactcttttttcattcgtttttctctttgtttttccgtttgggaagtttcctattgacatattttcaagctcactgatttttttcctttgtcatgcccagtctactgatgagcccaccaaaggcattctgcatttctgttacagtgttttttatttctagcatttccttttgattctttagagttttcatctctctgcttacgttgccctttgttcttgaatgttgtcctctttttccatcctttgttcttgaatgttgtcctctttttccattagtgtccttaacatgttaatagttattttaaaatctcagtctgataattccaaaatttctgccatatgtgagtctggttctgatgcttgatttgtcttttttgagatggagtctcactctgtcgcccaggctggagtgcaggggcacgttttcagctcactgcaacctccgcctcctgggttcaagcaattcttctgcctcagccccctgagtagctgggattacaggtgtctgccaccttgcctaactaattttttattttatttttttatttttatttttttattgatcattcttgggtgtttctcgcagagggggatttggcagggtcataggacaatagtggagggaaggtcagcagataaacaagtgaacaaaggtctctggttttcctaggcagaggaccctgcgg

SEQ ID NO: 1884848 - DNA, 4001 bp, Homo sapiens
acagctcagaaggctggtaatgtcaagcctagtgagatacataaactgataaaaaaattatttgcaacagcattgatttatatttattcacttttaaacgtcttttacacattttgtgtctaatcttttaaaatattttaaaacaaatgctatcatcagatcgtgaacataataccatacttcctattgcctgtatgcttttgaggaggctatataaatattaattttccagttctggaattaagagaaagaagattgcagaacttatctttttgttctgattaactgatactgaaaataacactgacaaggtctctgggccagtggcgacggtgagttcaaataaagattagatgaagatgaagcgcggtatcttaggtaagatacacatctttactgtgtatatgcgtgtacaagaaggaaaacttgcttttttttttttaagtagatgttacgaaggatggtttttttttttttttcaacttgcaaaatctcttgaaggttggagcagagccgccggttacctttgagcatcgaaataccgcaagttatcccgtttccttttcccctcaggaaagatgggtgcagggttgagatgttacaagagaattaaaagagagccaccagcttggcatagtagaagaaacaaacccaaaatgaaaacacccggattttaagcgcggatcctgcgaggccggtttgcactggccgaacgcctgcgttaaccctttgggcgccgcagctgggatccccggtgtttgcggacccgaccggcaggaacagagatggagtgtcccgcgcccgcatggggagtgagctctcttccccaaagagggagcgagccgagaagcactttttcctccggtgcgtgcgtcacggcccgggacaggcgtcgagtccggtttggagtgggggcagagacgcggcgaggagccgctcaaatgtccgctgactgggggttcgccttaatctgtcctcgccaggagcgctcgccctcgccctcccgctggctcgctcctgggccctggaggggcatgggcccgggggcggttcgggaggggccccaggtgaagggcgcccgcacttctcctgcggcaatcatcgctctcctgcctccacacgtcgcggcagcggcccggccccgcgccgaaacagcagctgtgactgacggagtcacctccccgcgcgcctggccaccccctcctcccccgccgctccctcctgcaccaacacgtcatggaaacacggacgtcagagcctctcagccaatcgcaggctgcggcaggagggaaggggcgcgctggagggggcgggggcagcggcaagccaaggcgctcaggggaaggaagaaagggaggggcgtgcggaggcgcaagtccccacctccgcccctcactccggccaccctttcccgaccgcgcggcaagttctaatcgccaggcgcgcgctcgccagccgagggcgcgctcgccgggtcctccccttaaacgccctcccagtgccgctcagctcccagtcccggtccgagccgcggttcctccgcgcgcgcgcgcgcgcactcgcccgcccccaggctccccgcggatcgcgtcacgtgaccgcgctcagccaaggcggcagcggcggcggcgcgagcttcggcggcggtggcggctgtggcagcgggagcagctgcgccgccagcgtggagcgggaggcgtgtgggtgtggagaaaagggagcgccagaccggaacgggtgagcgttctcctccccctgcctaccccggcaatcttgcaggccacccggtgcagacggggtccctgcccggagctgcgcgcagccccctcgtgctcggccgtccgctctccggtgcccgcgggccccgccccgagtggggcgggctgcggcgctcacggaggtggctgcaccccgcccgcggctgctgttgcggacggcggcgtgaggccggctgagctgcccgtgccgagcgagcgcggcgcgccctgtgtgccgctctgcggagccgaggaggcgggtcctgcggggacgcgggcggccactcggtggctgccgggctctgggcggggacggccgggcgccgcctcctcctccttcgctgccgccgccgcctcctcgcagtgcagcgtgagtagggagccccggctggtggacgccgagcctctcggctccttggccgccccatccccgaggtgcagctgcacctccgcgtggcgccccgagccctgcgagccggctgcggacgcgctgaggacggagcccccatcctctgcgtttcccgctgccccttaacgccccgcgaccctcccgcagcctgcctttccttccccctcggaaaatggttcccactgccgggcgaggtgagtggcggccgccgcccgcccgcggccgggggcggcggggcaggtcacctgcgggggaggccaggcggagcacggaggtcgggcgtcgcggcggggatcctgatagctgggtgcgcagcgggttgcgccggattcgggagaagctgacgggggcggtcggggcccctcgcaggttgcctcttgccgggagattgtgaaggtgagcgggcttctcgccgtgcacctcagcgccgggtcagtctgggagtcgctgctccgggcccgagggatggggcttgttggggcttctggtctacacccgcaggtcttcggcttcacgaagccgcctcggccgcgccacagcccatcccgccaccggtcgcccccgccacggcgcgtggtgaccttgagggcaccgtgcccggcactccctctccccgcgccccgggagggtcacccctctaatccttggcctcggccccccagacgcactgcgggaggggagcgggggcccctggtcggcccctggccctggtggttgattgttggcgtgtcaggacggtgattcctcgggagttggagagccgcctggtctttctcctcacgccttccgtctggccccccaggatgttcacagttgtttccgattcgtgtttattcacttagtttaagagaaaaaagcctgcgcccccacctccctttttgaggaaggagtctgtaggaggaccgcgttccagtggcaggggtgtggggtgggggctgtgctctctttatcccatcctgcgggagaatcctgtggctaagctggttagcgacccctggttctgcgccgcggtcaccagccaggttggtctctgtgcgcatttcattcaccagttttctgcgggactcgcagcgctgggagtgctcgcaccctgtgcgctgcttggctcggaggggagggcagggcgtccgggtgggttaaaggggtctgcaggtacttggagggctcgaccctcctcgacaggctgatatttaccttttctttgggttagagcgctgcagacagccacctttcgcttctgtgcccgctacttttcttggtttattaataatctaatggcttctgttggtatcgattgctgttcgtgataaattagctacatagatttttttcatacgtgtgtaggtatatgcatatatctgaacttgtctgcctgtcaacatggaagcctttgttgtgtttaacctcccccacctgaggacagtcttattttaaaataaggcttttgttcagcgtgggtgtattttataataagaagtacttgtaagggcctggtttgtatgaggctctcatctggcagagggtgtgtaaccctttggatggtggcccacgtgagtgaatggagggccttcaccacttgccccgatgccagccttcccgagactccctgtccttgtgtgtggcaggggtggattgggggaattaagagggattggaggagaatctgctttttgtacttgtgcgtttcatttgggtcctcctcctcccctctctttttctttatcctcctggtgagttcaaatttgaagtaaatagaaacattttttttttaattgggaacctttgatagctagtatatgaaatgggcttatttagctatgatttcaggaggacgt

SEQ ID NO: 1884849 - DNA, 4001 bp, Homo sapiens
gcctgttggcaaatccatttgccactgaagacagtaaggctcagagagggtaagtggcttgtgccatgtcagccagctaaggaggggcagaaccaggatgcaaaccccagccgcctggctccagactcgggttcccaaggtcccactacacttggtcactccactgcattgtggtatcctggtctttggcagagtccacgtaaaagaggtaggtagagggagtgagaaggacttcatgcaatgaagtttcccggcgttacactgccattgtaattgtgtccccgaccaggacctctcccttctcatcctttccgtgatcggccctggaaaaccttccaaagaactgtcctccttctcccgggatctcagagaaaattcgcctgagttcagtgtccaggtgacccaagctctgaatgcggtaacgtgcacggggagatgaggatgtcaccatgagcaaccccaagactgggcagggggggctctgatgcagcccacggcgaggagggctgcccgtgctgcctaaatgggttcagaatgaaggccgccctctcgcccatgtggggctcattaaccacgaatccaattattaagacaagctcagctgagcaaatggtcaaacataaaaacatgtggaaggaaccaagaggtcaaccccattatccatcaaaaaccatcaaggtggcggacctcactgaggggtacagctctccagtgggccctcatctgtcctccaaacctatgtgcctcctcagtggaaggccagcaaaaccacacaggaagagttggcgtaggaaagcagaaagtgaaccccaggaggccaggctggccacggagccccatcccacactcacaggcccgctgactcaggggctcacatgtgcaggacaccgggagctcacagggacagtgccccgggggatgcaaggaactttgcctctctgtccctctctgtagggatggaaagaggagagcgatttctgggatggaagccatctgcctcctctcaactctcgctgcccaaccagaaagggaagaaaaacaggaagatgcgggacaggtgaggagctgggtgagcgccgccagcccgcagcccagcagagcagggcttggccaagcctggcgccagggacttcccccctacccccaccacaggcccctcgccaggtgagaggcaccggcagagtcccagacagatgccccagacaggcggctcagcgcaacccccggcccttcccctgctaggggcccccaggacgcggggctccccctccccttttggctagctgcagagtccagcgcgtctcccggccagggacgtcgtgggagaatcaggaagtcgaagccacacagccgagaaggggcagctggcgtctcggaggccgacacgagctgtcactccgcgcccgccggagttgccgctcaattaccaacttcaacccagggcaggccacggggcctcccgccgcccctaccctgcgcccccggcaccccgggacccccgcgcccgcgtcacttactcctctgccgtcgccacctgtctgggtgccggtctccttcctggccgaccgcggcgcgtcctgcccgtcctcgcagtcctggggctgtgcgcttcccccctccagcaagagccgcagcctcttctcttcgggagggacgtcgtcctcctccctcctgggccggccatccctgcctcggggcttgccaggggcttcggagctgccggaagggctggccatggccccgggggctctgcctgcacctggggaagaggaaggacccggagcgagcggcctctcggcggagctggggcgtctgagcgcgggctcggtgggtccgcgcggcgcggagctgggcatcggggccggcgcggactcctccgcgggccgctcgtggtcctctggcgccctctgctggccgctcgcgcgcaccgtggacaggtagggccctggcctgcgctgcgctcacctgccccggaccaagcagtcgctgtctcctgcctgtggccatgcccgctctgaccaggccctgcacctcctccccaccccagccaggttgcaccccgatggactccctgcccaaggaggagagaagagaagggacgccccgagagggtggacatcggccacagccaccttgtctttgctcttaccctgtgtcttccatgatttggaggtggtaggaaaaccgaggctgctcaaaactcgtggagaattccgcctgcaggatgacatgaatgcaccttcccattgcctaccaacagatcttttctgagcatcactgtggaccaggcgtggtgatgggggaggggatattgtggtgaacatgacaggcattgccttcacccagtggggctcagcgctgggtgagaaggcattgagaatggacattgtcaattgggccaaaggaggccaaggagaagtgctgggtgcatgggaactaaaaaagacaggaggctcagcaggtcttggagctgggagagggacagcagcagcggctgttccaaaggaagcaacagctgagagaagtctcagaggttgttctcagcccagtggagggtgttcaggcagagggaacagcgtgtgcaaaagcccagaggctgggaaagaagcagaaagaggacggtggggctggagcgtggtgtgcaaggtgagagaggtgtggtgggtggacagatggccttggacccagccgtgcaggggcagaggagatagggaatccttgcaggcccccagccggggctgaggcacagagacaatgcaggtgggcaaagggaggagacgtggagaaatattttggaggcatgccctgatgaatgagcccaggatgcacccttagtgtcagtgtggagctccttccttggctgtgtgatgagctgaactcgggggtattttctggacatggaggtgctacacccagagtccaggacaggctaagtgagcaccagcagctcctggcccacctcaaaagcaggagagacaggggagactggggaggccggggtagaaggggaagccaggaaggcaggagaggccacagaaacagaggaggccagggaggcagaggaggcaggagaggctggggaggctgtgtcctttccatgattctgcccaggatcctaggcccctgtactccctgagcttccccaccccaagtgctggaaccatgttgcacaatggtctccccactaagctcctgatggcagcccctaccctgctgtgctccctatttcaaccctaacagctctcacagtgggcagcacagagtaggtgctcaggaaacactggtggcagagcacatgggtctgctcagcaccttcctccctcctccagctctccctatcatgaaataattctgataacgacacatggactttgagaccctcttctattactttccatatgctaatccatctataccccacagcagccctgagggtgggtgctattacgatgcccattttaaagaggaagagactgagatataaagaggataactgacataggcacactacaggggctgggaccaagtgatcagagcactcagtccccaaaggcaaggtggatgcagttaccataaaagacagcagagtcaaagctgcaaccagaatagcctgactcgcagagacctatggtgccagctgatcgtggcattcctagaagtgaaatagataagaagcctgccacatttttactggatctgtgtttgcagaagggttctaggtcaggtgagcagaagtctaatctgaatcctaaaaacagagtcacagtccccagtcaatttccagacataagccagttcacagacccggagtcccttgtctgaatgggaagccaggtcccctctagaaaggactctgctccactgccaaacatttatactgtcaatctttctcccagcctgcccccaaaggaatacccagcctttcaccaggatgactgaacaggagaaaaggaactagagacttgtgcaggatcactggacacaggctctgaactggcact

SEQ ID NO: 1884850 - DNA, 4001 bp, Homo sapiens
taagaaatgtaatagaaggttactttagtacaatctcataaaaaacatactctgactctacttggatgctaaatgtggtgtttttgcaagagatacagactgattagtggcaatcaaatttattaactgtaaaggacatcaataagaacagacaggaccagaaattgtatcttggtgatccacatgccaggagtagcgcggcagaggatggagagtggaacttagcgattgaggcgcagcctgcagaaagctgcacttctgcactagagattaaataagagggtcaaaatcaacataaactaaaccctttttcaaagtcatgtaaacacaaatgattgctgcaactggaaaacaacattgaaaataaatgattcgtgtgatgcatatcgatttcaacaaacctttccttaaacctttaacgttactcttacaagcaaataccgttaatagcttacttctgtcttaatttttctaaccacaggaaaattgaaacataagtaatctgataaacatcaagttttacgttgatgcttttgaccacagggtatatacagtgttaagaatttaaattctatccatcagatatactttaggactccattttgaagatagcctcttctacagaaaagaaatttttaaaagtcaattctccagtttctcatcacatcttaatttttttaaaaaggcttttaaacactagtatcactccaagtctttagcctttgatacttgctctgaaaacacactatcgtatgtttgtgtatgtacacacacacacacaacagtgacttaaaagtggcaaccgcctcttgaaaagtaaaaatatgtcatccctccattctgcccttaaatgagaaataaagacaatagatttgcccactgcagactgggataccagaaaagacgttctaagtctcgcctgagacaatattaacctgctatcttaagtcccaacttggatgacttaaatttcagtgtacgtgcctccgttcccactcttgccccatcagctccatcagcatcgtcatccccggctcggatcccggccgcgacccgccagggccgccggagtccgcgaataccgcccgctcccagcaacgaagctccccggctcccggccgaccgcgagttcctggagcagcagcctccaaggttcccaaagcccacgattcaggcgagcggtgccgaccgggccgtggactgtggcattttaaaactacagaagtctcactgcacgactggcgcggccgaggtggcccaggagaccctccaagagattctggtcagctgccgggagcgtggaagagcaaccaaagccaccaaggcgccgcgccaagtccccggagcagtcacctcagctttccgttctccctctagttacaattactccacaggcttctggcgcttccttcgagaaaatgaaaaactaaaaacgcgtagaggtggtagaagtcgttggcattttccgtttaatgtgatcccccaggctccatcccttaagtggggtttccaaactcggatgcatcctcagcagaggttttccatgttgacagatctctcgcctcccacaaaatggggccggggaggcggccgcggtctcctctatgggcgccgccattttgtgaggcggcggcggcgcggcggcaggagcccggggtgtgtataatggttgaatagaatgaccccctccagggaatccccggcactgacggttacgtaaggggctgtgcgcaagtgcggcgtttagggaatccgcacagcccgggccacgcagctccgaggcccacatctccacttcccctaagaggaccgatgggggaagggacagctgaccgggtcttcctcgcagcagcctcacccctagtcttccgcggccggcgagcttctccacctccccgggccgggtctccgcccctcacaggcttccgagacactcactggccctgggttgtcaggatcttcctagccacaaccttattccgaccccacttaagagacaaactttagttgggaaataagtccgtttcctagagtgagcaccggaagcaagctgcactatattacataatttttcacctccaaagcaatgttcccattggaacgactacctgaaataacccatccagacccctactaccctgtgaccttgggttaggcagtgactttgcccgtggtggccgtcactaaaatgggaataataatacgtttcacgtactgtaatcttaattaacatttgtagcaaagagccggctccaacacccctcgtaaatgcaaatttaggtggtagtatttgttgagatgttttgactcatttaagcaaagggtttttttaaccttcaaaatattttaaacgaggattacatttaagacatttgaaagcaaggaaaaacgttttattcggtatttattttaaacgcagcaatcttgaagagaccttactataaaaatgtaaaccttaattattattgtcgaagttcgatagattgcttcccaaccagtttagttagtttgcataactttgctcatagaatactccagtttgatatgtgaagccaaccagcggcaagatgaattaagagcattactctatttccacagaactaggacagacagttcacattgtatttaacgtatagtttgctaaagttagcgtgtggataattcatagaaaatgtgctaaccaggccccaaaatactagcatacggctcataaaagccgattcctttagattttacaaaaacagaaggtaacaaattgactttattccgatctgtgaatgttgcgtagcgtgaggggctaccccggtgagcttcctttcccttcagagcgccacaccggttctgtcgggcgggcggggactccgaggcggcccttccaacagccgggccggggacgcgaacatcgcctccacccctaaccctggaacaaccggtagtggccgtttccccgcaccgcccccctttccgccggctttgtgtgcgtgtgaaatgtgcggcacattgcagacgaaccctaagcccggcgagtcgagtctattgttccccgcgaggatctgccggggcggtgtggagccaggcgcagtgccgcggccagccctcgggggtcgctgtgtggcactggctgccaggccgtggcggcggcagagagggaggctggcggggagggaagcaggcgggcggcgcgcagcggctcagctgccgccggtgcttctgcccggggacgccccggcctcagcggccgaggccgcgcgtgaatgtgtgcgagggccccgcggagccggggccgaaatacacgctgtcaccgcgctttccacaaaccaccacacagacctccccctccccacccccagccccgcctgccctagccccgccgccgccgccgccgaaactcttgggcctctggccgcccagacccctcaccatcggctcgccttgcccgtcgcccgctcgcgcgcccccggcagcagcaccatgttgaatcgcgtccccgggctgagctgcctcagccggcggcgctgagaggcgggcgagagccgggccacggggagggagggaaggaaggggtgggggccgcgctcgccccgcggcttcgcgcggatccggcagtcgcctgcccttctagtttcgctccgatttctttaaacttttttagaaattcccctccctccttccctcctctccccctggcctcctgctccctccttcccctcctcctcctcctccccctccctccctccctccctgcgccgccgccgccgccgccgccgccgccgccgccgccaccgccggcccatgactgagccccgccgccgccggccgaggaatgggctccgggctctggtaggaagcgctgggagcggggggcgcttttaaaacaccgatctgggttttttaaaaacctcctttgaaaaaataatggcaaactcgacggggaaggcgcctccggacgagcggagaaagggactcgctttcctggacgagctgcggcagttccaccacag

SEQ ID NO: 1884851 - DNA, 4001 bp, Homo sapiens
ctgccaccttcatctccccggttcaagccaatctcctccctcagcctcccgagtagttgggattacaggtacgtgccaccacacccggctaatttttgtatttttagtagagactgggtttcacgatgttggccaggctggtcttgaactcctgacctcaggtgatctgtccgccttggcctcccgaagtgctgggattacaggcatgagccactgcacccagcctcaaaagctttttacaagaaactgctctcctccctgtaattatttgggtaacttttcttatcagtaaaggtgtctgtgcaactccccttctcttatgcggccgtgggtatgtctctaggcaagcacaaagtacagcttctcttgtttgtataactgtgggtttgttttaggtaagctccctcccccttgtgcaagttctcatcatgtatatgcctgaaaaggggaggaaatttttcctgggagctcactaattacaaagaacaaagagattctgggctggacattgcttgtttatctgtccaggtacagcctgagtgttttcccaggttgttttatttctgcctgttgctgtgactattcaggccgactgcttctgcagtctgactttttcccaaatgatttttcttttccttctccctcactgatatctgactgtgcaatgctggctctgtagccttgggctggcttccctgagctcccgtgtcctcaccaacagggatcatcacatccaccttgtaacgtggttggggatgtaaagacgacctggcagggtgcttacatgtgcaattgttcaataaacatttgccactcgcccatgtgtaaggtagggggaaaggtgagatacagtttttttctaattttctcatttgagaaacaccttcatgattttttgtcctatatttaccacctcatcacactgacttgctttttgtttgtttccttaaaaaacatattttaggcccagtgcggtggctcatgcctgtaatcccagcactttgggaggccgaggcgggtggatcatgagatcaggagatcgagaccatcctggccaacgtggtgacaccctgtctctactaaaaatacacaaatcagccaggcgtgatggcgtgtgcctgtagtcctgctacttaggaggctgaggcaggagaatcacttgaacccgggaggcggaggttacagtgagccgagatcggccaccgcactccaacctgggcgacacagggagaccccatctcaaaaaaaaaaaaaaaagaagataaaaagtaaaacgtattttaaaaggaagcttgctatcattactgaacatggaaaatcactccgtttccaaatttacaaagtgtagatgtgattaaaaataaaacaacgtggttaaatttaaaatagaaaaaataatgcatacgtgtttagagaagtgcatacctgaaaacaagttcttcaaggaaaatggaactattgacaatccctgggagacaccaggagaggctcctggtgggtcggggagttcctgaacgccctgagtgcggggtctccaggtctgagacagaacggccctgctcaggtcagaggacagctgtgatgagtgagcgaggtggccatcctgccttgccctggaccttgtgtaatattttgctgcgtttggaggataaggacaagtggtagtctgatgtggattagggcatgggtttcctgtggctcccagaaaaagggacacacagaattgcagtccctgcccagctgcacccaacatccaggtcatctgtcaccaggcccaggggacagagcaggtctgtgcaggtctcaccaccccttcctgttgactctacctccaagaatcctctgggaagtgtgttctttaccgtcctccaatcctggtctctcctggtgccctggggaggaggctgtgagaagatcaaggtaactggacaactctttgcacacccccaggggcagagtgcctgccagcaggacttcccaaagcagtcgccaggctccacgaagcggcgctgatactttgggggcttccgcctagtgcagggcggggcccgtgggcaggaccctcccccccccaggctcctcccagaaagagcgcgaggcggaggggaggggctgcacgttcctggtgtttgcctattagcgggaaccatcagcggacaagacacccccgtttcctggactcctaggggcagagccctgtgagaggaggaggcaccacctcttcacctattcgctggactttgcctagttcgggccgggcaggtccgggcatctcggccccacaggcttctagggaggaggaggggcacacttctttgtgacgtttaccagaaatgggcgtggccaacggagagacctctcccacagtaagaaggggaggggccccacgccagtgtggcctttttcttaaaactggccaggggtcctcactaggctccccgggggcagggcgcggtaggggaaggtaccctctctgtggggcatttgctctgctgggagaggctagttgtcctcctgagacctccaattcacgggctgcaggcggcagctcctgtaggaggggctttgtggggaaaccctctctttgcaacttttgctcagggctgggcagggctggctgtcagactctgcccaggcgggtccccatcactttgctggctttctcttggtgcccctggggccaggggccagggttggaccccacaatctcctgggctacaggaagtgctgtttaggaaagggtggagcctgccccctttactggggggcttagtgtagagcttggtggctggacaaggtcccacccctcagcccccttgggatcagtatctggtggggtggcggggggcggggcaccacctccttctattctttgcctaattctgggaaaggctggttgactgggcccagccccccacgccccttggtggaggactcaggtggggaggggcatcggcccagctgctcctgtgaggaagcggcgctccttaactgttagaggagtggttacagttaaaagagatcaatctgcagcgcctccctcctcccagtcggctgtctacctagaacaacattttcttggagctttttgtctttgtgctccttggtggtcctaggttggagggccagggtgtttaggatgcaaaagtaaacagcatccttcctcttccctggaattctgaggtccctagccgctacaccttctaatctccacatttcagagccttctgtgggttgctttctgttttatgtccaggagtttttgttctttttttttttttttttttttgagacggagtctcgccctgtcccccaggctggagtgcagtgacgcgatcactgcaagctccgcctcccgggttcccgccattctcctgcctcagcctccccggtagctgggaccacaggcgcccgccgccacgcccggctatttttttgtatattttagtagagacggggtttcaccgtgttagccaggatggtctctatctcctgacctcgtgatccgcccacctcggccccccaaagtgctgggattacaggcgtgagccaccgcgaccggccggaatttttttcttattagtgggagaagaggaggagagtgagcttttattttcttcaccttaactggaagcctggttgagatgagaagcttcttaccttaacaatacccagttgacaggagaaaagaaggcagctcaacctggctaagcaacgcgctcaaagtccctgtggtgatgatgggctgggattccatgccacctctatccagtgtgaaaacccagtcctttaaaatgcattgtgcttttttactgcttaatgtttacggaagtgtgttttgcctacatctagaatcaaattaaaatcaaattagaagggatgcttacaattttgggaggattaatgttttgaagataacatatctgtcttacctctaagttttatggggaaaggcaacattcatctcataagtttgcagggtttttattcagaaaaacatc

SEQ ID NO: 1884852 - DNA, 4001 bp, Homo sapiens
aatgttctgcagccttcagctgaagtcatgaacaagaaattattcctcatttgctcacgttagagtggggtgtgatggggaagtgagtgaccccagtatctgaggaggttccctgagaccccaaagccggggtggcccccatcggactaacattttctaagtgctctcccacaggcacccacatcaccatgcagctcacgggcgtactgagtctcatctgcacggagcccctcacgtgtgaggcatcattttattattttttattattggcattatcaatttccttatctcataaagagaggaacagactcccgagggggagacggccacatcctgctctgtgagtggccatacagaagctagagcccaggtccctgggccccgcctcccctccgcaggacactgcctctatgcacctggtcacagtcagacagggcagggtgccctgctggcagccaggcccgggcagtggggagcagagggcagaatccctcacggagtctctggtctctggaagggctggacggtgctttgccagccgcatctctcgccagtctgtctttcgagttccagaacaccgaatagcttgtattctacccacttcccacccaatcacacacacacaaccccatacacacacgcacacatgtacacagacactattgctgcttcttgccttcctgtcctggctcatgccatctcttttgccttaaactcctgctgcccccttattttgtcaactcttacccaccctttgagaaccaggagaggcatcacctcttcctggaagccttccctggcctcccatttgcacgttaagtgatggccctcacaacgtcatctacagtaactctccttcccactggtctgtgagatcctcggggcctgggcagggtcttactcatccctgtgtctccagcgtggcatccgatgggtggcggccatccacacacaggctgggcgctgcaccgccgggcagagctccttgtcctttcaggacccgttatctcaagatttcctatcaagccacagtttcccagcctctgtgcatgctgggaaacctctgtctatgcaggagggaataaaatctaaggaacaagtgaccctggagaagtgctatgggcagaaaatataacaacaccaaaaataattttggaccgacttatgacggagccgtaagtggcgataagaaaagctgggacacacctgacccgtgaggctgatgggggaagggccagttttgcctggcacatcccacagggctgccatccaacgtagaaaacgccagtgtggagcatgcgcggctctggcccaaagcaaccattgcaaggttcctacgactgacaccacagaaaatcctttccccttgatacttatctgggtggcgaaagagacaggaggtggtgggactagaacccagagctttctgagtgcagtattctctacaccacatcacacaggatgaggggctcctgacagcctagatcttgggactgccgccttggtcttttgagccccttcaattgtgtaggtaccaggtgtgcctgacaggtggagggaggagctggggcactcacagaactgtgtgtgtgcacggctgggtgggctgcagctcccgtcctgggccaggagaacgtcgtcttggagacggggccctgcttgtcccccagcatctctaatgctgagaactcccacccgtccctcacatgtctgtttcagtgtctgccgacctcagcaggacgctttaccttggcttctccctagacatttggcgcctttcatcttggccctcagacttttagagaaattcttagactttggcttatgactgtctgctctcccaccctttctcttgcccacttagtacatatttttacctccttcctgccgtgcccttagttaacttgtccgaggcttggatttctttcttctgcctccctcagaagcctgggctgcacagcttgggctgctagctggcgcggggccacgcgcctgtctgtactgcccagccgccgggagtgccagtcacccagtgctctgctctcctcccccccaacagtctgcacacgcagtttttatttgtgtacttttctcaaggctctaagctgttggcaggcattactcatgactcaatttagtgaacatctatctagatacccaaggttgagttaaatataccaagtatttgtaaccacctccctcactcctctaattgtaagagggagtggggtgcagagcatctgagatctgaaagccaagtgttcagcaaaatgctgggcaggctccccagcctgcgcggccacgcacctttacaccacgccgcgctgccccagcctgcgtgctgcaaacgacgcatttgacctccaagatgactccacgttccaaagcctgcaaggcaggctgatttcttggagaagggaggaggcggcacatgtctgaatagagcaggccctgttagaaaacagaaggcttcattgctaataggagcgagcgaccaatctgtccacattaatccagagacatggttcctaaaactgcacccaacactccgcccctccccgccccacctgcatctacactgacaaatggaaactgagcaaagcctggtgctcagagcactcgtttctaatgtgcccctcccatccttggcaccacatactccagggaagtaggccttaacaagggtggactgttggtctctctttatacctgagagaaccaaagagggctgttactcaatagttgagatttcttgaggtggaaacgcactttcagattttcacccttctcattcaagaggaagaaagcaggtctttctgtcctttctgggtctgaaaagggcaggcaggctgctggtgtctgagggaagaacaaacttaccaaatgcaacagatctgtgatttccagggcaatccttcagcatgcgatattttgttgttgttgttgttttgtttttgtttgttggcccagggcttacctcttaaaagggctggcagaagccagtacaagggggctatgtgtatcagtagggctgggtatgcacaccagacagttctagaagatgctaacaaaggtttctctcactctgcaattatcaccatgtctggccttctgaagggggagaccgagcagagtgtttcttttcagaagatccaggaagtacaaatcctatcaaatagcactgccttctcccgccttgcaattaaggtggtgctttacccataacggcaggggcaagaacaataccgacatggtatgttacaagtaatatactgctgggtatgtggacctcttaaagagctgtggcacttccttcataaggaagggagaagtgttactgttttcattccattgataaggaaatgagggggagaacgcggtaaagcaaggcggccacagatccctaagtgccaatgccaggctgaacactcaggtcctggtagatggcaaacaaaggccggcccagcagctgcgggcctctcccaacaactggagcatggcccccgcaccacagtcatggcacagaggggctgtctgccatatgttgctcccatttaatcctcatatggaccttgtgagggtctttcattttctaagtgagaaaacaacatcccaaagatgtgtttgttcaggagttgaaggcggatctgtgtgactccatagctgggtgctcttccccacaccggacggctctggcttctggaacgtctaccaggctgaagcccactgcactggataaggctgcctctacgaacagaaatctcagggctgcacctgagattcaatcaggtgaaaactgctgcctgggagccagtggcacctaaggagtggcgtccatgatgttctcagaatttgggctgagtgggaagaagaaaagcccatttatttatgaaatctagctttgggtgccttagataacccttttgatctatttcttggactcactagagaaagtccttttgtacaaagacactctcatctgctttgctgtatagaagaaa

SEQ ID NO: 1884853 - DNA, 4001 bp, Homo sapiens
ggcgcggtggctcacgcctgtaatcccagcactttgggaggctgaggcgggtggatcacaaggtcagcagttcgagaccagcctgaccaacatggtgaaaccccgtctctactaaaaatacaaaaaaattagctgggcttagtggcgggcgcctgtaatgccagcgacttgggagcctgaggcaggagaattgcttgaaaccggaaggcggaggttgcagtgagccgagattgcacctctgcactctagcctgggcaatgagagcaaaactccatctcaaaaaaaaaaaaaaaaaaaagtgcagtttaccaaaggcaaatgtggccggagcatgtaggatgaactagggaagaggaggctcgaagccccggactggccatgaggctggcaggaacctagaagaggggaaacgcgtgcccgacttggtatcgtcctggagggtccagagagaagaggatgcaggcagcatacgttttaagggatgagtcgtcggaactggatgctaatcagatataatcagctgacgacattccttctgtggagtaagccacttgggaagacagtcttgggtgcggaggggacccagcgggacgagaccaggtgcctgctggtctcccaggttcgcgcaggaaggctgggaatttccttgcctcctccccaccgcaccatcctccacccccggcccggagctgtctctacctggagagaaaaaacggaaaggccgagaaatcagagccagagggcagagtgaaaggggtggggatgggagaggatacaaaggggttaggacgaagaaaacggacttcctagagtcccgacttgagggcttgacttcaagaagagaagagaagtctgaaacgggggcgagagcaaaggcagggggttggggtggtcgggggggggcggcgattataatcgacttttatggcttgacggccagggcagaaattaaatttgggggccggctaaggctagagagtaaggtgacggctcgccccgcgggtttggagctgtgcgctgggggccaagggagcagcgggaggagcgcatgcctggggcgcacgggccgggaggggcgggaggagagcccagtccccagctcagattactctcctaggcatggtccccaccagagccggggctggaagctggaaatccgagtagagctgactcggacttagctgcccaagggaaagcctccgggcggtcctcgctgcgcccctagtccggggccccgacccctcccggacactgcttgggccatgcgggcgccgcgttgccggccactcgtcgtcccggggtcccaactggggccgctcctgctgttctagagcttgctggccccggcgcgcctctcttgcagctcctgtactactcgaggggaccacgtcgtcccggaggcgcggccatcgagaggatgctgcggccgcggggcggcgggggcgggcgtttcagggctactcacccgagctgggaaggcaggaagtctgtgctggctgggggttggtctcagagggactctggggcttggacacaaaaatcgcggcgcactggggaggacacccggagcggtgggaactgcggtgtggacccgggagaaaagggggttggaggtggggggagatcgcgcggcacgcgttgcataacctgacctgccctcctgggctggaggcaggagtgacacctccgcctgagccgcagttcagagaaggctaccgcggcgctgggtcctgcgggacagccagcagggctggggtggaatgggggcaggggaaggagccctgagaggagccaggatgggtctggacctggctccaagtcgcgtgccctacacaccccctctgcgctgcccagcggggcacggcccgacctcggaaggcccatccggctctcagaagtggccgctctaccagctgcccataatgctgccgaggagcctgtgccagtcccacggctgccgtgcagcaagcgggcggcccgactgacttcagccacgtcccctgcgtcagacaagtgggcgtcccctgcgtcgagacaagtgggggatccgcgaggcctgcaggggcgcagggaccagagtgctaagacgtggcatgacctttcagggagaactgcgcagagggtggccaagggtcacctccctcgaggggcgaagccctgagatgtgaggatgattcttaagacagcgcccttcccgccccttccaaccccccagaccaccacccgggtctgggaacagggtgagcgcatggcgagaggttgtctggttttgtagctatcaagttgtacccccgctgtgcccataggaagtgactcatctgcttgtcaggtagtggccttgctgtgagccaggaccatattaagaaaagaaagaaaaaaaggagcagcaaaacactgtgcccctgcacaatgtgctctcctttcttctgccctccctctcctaggctgtcctcttcttcctccacttgtagtttgctcagccccctcccatccactgccacccccgcccagttgaataatgctcgtatctgagtcagcggatgtgaaacaaagggttatttctccttatctaattttgtggaagattgactaaaagagggtggagagtgtgtctatttagcaggaaaaagatgtttttaacgtgaataatattgagaaatgtgctgtgactttcactgttgggcaaagcagggagacgcctgcctagctggcccttcctgcaggcttggtaaaaagtcctctccggtggagggttggtggccatttgtcaggtacctaaagaatacaaggcgctatgctaggaactagaactgtacagaaatatcccgaaggctctaatgtcatgggacctaactcatttcggaggaagtaaggcttgaaggtagagaactatcttgcaaggccgcctgtggcaagctctttgcacaatcagtgaatgtacagaaatccagggtaaacaaaaattacttccaactgggatatacttcatagaaaaggcatctggggtggggcgcagtggataacgcctgtaatcccagcactttgaggggctgaggtgggtggatcacctaacttcaggagttccagaccagcctggccagcctggccaacacgatgaaaccctgtctctgctaaaaaaaatacaaaaaattagctgggcgtggtggtgggtacctgtaatcccaactacttgggaggctgaggcaggagaatcgcttgaacccaggaggcggaggttgcagtcagccaagatggcgccactgcactccagcctgggcaacgagagcaaaactctgtctccaaaaaaaaaaaaaaaaaaaaagagaaaagaaaaagaaaaggcatttggacagccctggggttggcagaagacttccggatggtagaagccaaggtccttgggtgggacaggataaggtatgtggctagagtggagaatctgtgtggcaggaatgtgagaaaagatgccagaaaaggagatagggactcctctgtgtgtggcatgggaactgggctttgactttcattgcatagtgaagcaactgaaagtcatgagcaggggcacagcgtggctccagagagggctggagagagatgcttgctggccatatttgtctgcaatcttccactcttctttcttcttactctacccttttttttttttttgacagagtctcgctctgtcacccaggctggagcgcagtggtgccatctcagctcactgcaagctccgcctcctgggttcaagcctttctcctgcctcagcctcccaagtagctgggactacaggcacccaccaccacgcctggctaattttttggtatttttttagtagagatggggtttcaccatgttagccaggatggtcttgatcttctgaccttgtgatctgcctgcctcggcctcccaaagtgctgggattacaggcgtgagccaccgtgcccagccacactctactctttgtaaacctggctcacataaaactcatctccatgggcaaa

SEQ ID NO: 1884854 - DNA, 4001 bp, Homo sapiens
cctcaccagactcagtactgtttccctggaagtaaagaaggagacttatcaggcctcttgtgtgcccctgggaggaaatacaagttcgaagcgcaccagaggacctgtgtggagatttcagcataggggagcgaggagaggagaggaggccgtggtcggatcctcacacagctgcttccctccctcctggctgcttgcactggagatgcagtcaggcccggcaccaaggcagctaaggctgcggcagaccctgctgtcctggaccctggcctggaaacaaggaattccgcagaggcagcaagtgggattccccttgacatcaggtagccaccgcgcaggcttgctctgacctgtcccgcccacagggaaagctggggtcgtaacggatgtccaggctaatattttcaggcccgacacatctccaatgacgtgggctagaactgtgccagctgcagaaaagaaggtcctggaagacgaagccctgggaagcctgcaagtcatcagatcagcgctgatcacttggcaaggtcagtgtgtgcacaggcatgcttgactgggtctgcaggggacccaaaagcaggaacagacacatgccctgccctcaaggggcttgcagtcagtgaggggacaggagaaggaaagcaggctcctgttttgggtgggaggcaatggagatctaagtgctctctcaccgcggaggttgcctggggactcttcaaggggcttttgtgacatttagtccatgtaggagagttcagagataccggagccagggatggcttgcatgctgcggcttgaaccccatgacgtgacatcctggcaaaggatccaatgttgggctccagtctgcctgggtcccctttgtcacagtgactgacaggcagggcagacaaagctctcattcaagagaacatcccagccaggtgctgttgctcacgcctgtaatcccagcactttgggaggccgaagtggatggatcacctgaagtcaggagctcgacatcagcctgaccaacatggtgaaaccccgtctctactaaaaatacaaaaaattagctgggcgtggccgcaggcacctgtaatcccagctactcgggaggctggagcaggagaatagcttgaacccggaaggcggaggttgcagtgagctgaggttgtgccactgcactccagcctgggtgacagaacgagactccatctcaaaaaaaaaaaagattaaaaataaataaaaaataaaaaagaaaataaaaagagaccatccctgcaggaggatgacgcggccccagatgatgaggctggtggattggcatctgggctttttttccctcctcaagcagaaacaatctgattgttggtatctgacctcttggggatggggtgggcaccacagccctgcccggagtggtctctcaggagggcaggcccagaggcctctgtgagggctggaggtggtcttggagcaggggtagcgtgaagaggccggcaacgccctcacgtctccaggagagctcccattgcaggcctcagtgctcccatctctagctggtttctacacccacggaggattttagacgcaggaaatggccttggaatagggtctggtcagagggggatgacctctataagggtgatggtcctgtttccaagatcctaggctttaggacaaacgatatgagggtttcctcacagcccctgggaataatgccaccgacttaccgcagacaccacccagcaagtttccaagcaggagccagccggccaaggccgaccgaacgcaaccatgggtgccgggccctgccgtgtgcacgtcgggcctcacgcggtcccctagtccctcgcccacctgccttcatgttcaaggcccacaatccaggccccactttgccctgaaatggagagctgattccttgccattccgcaggacaagcgtcctgtctcctactgccccgtaggccccacaaaggctgtgctcggggaggagcggtgaagccggaggcagcctcccctgagaaggtcagtccccctgcagccagccccatgggagtgcccaggcgggacagtgggaggaggaaggccaactggcttcctgcctaaagggccagatggctcgtcaaagctgccgagtcatcctgacatcagtacttaggataaaaaccaagaagaacttcgggatggagaaacgtggcacgcctcccgtcacctggacctgccctgctcgtctagggtcactgcctgtgtcctggggtttactgctgacctcaaggcccgggcctggctgctgcgggaggcgtggtggtggccggggcaccgtcgcacggaagtccttgttcctgggttgtgttcccggcacgggagcactgcacaaatgcagagggaggagtccaggcacatcagcccattacatcctgcacacgggccaggtccaagtcaagatgcagattcccacaaccctgaagaataaaatcatagtaataaaaaagtgtaagcccaagacaaaccaagcaggaaccatctttcgagcgtgaattctttcagatgccagagatggctttttgttatggaagtttctcagacattcgatgcactttttttgcccacatctgactctccctcttcagagcagcgcggctcaagttcttgactcgcacgaacaaggctgagccgaccaagtgctgtggagaccgagactgaggggccgggaaggtgccaaggcggccaagacagaactgagcgttaacttgggaagggaaagatgaatgtcgcacgctgggagcagcaggaggagttgggaagaagagtgcttcacggctgaacccagccgaaggcacggatgtcccaggtcaccctgtaagccattgcctatggcaggggatggcttcttccccagacgacacggcaaaggaatggtccctgtggacagggagggctggagtggcactaccaagctgcaaacctcattcctgtcccattgagggcctggaggagagaacattcatagggcttcatcgcctcattcccaggaaatcaactgcccagagccaaacggagcctgaaatcctgacgtgactcacatccaccgtaatggtgaccaagccacgcatgttattttctctttcctctgaaacccccagccacagtgtggccctgatgcctcaacccctctgaggctgtcagggagtctggggccagagaaaggtttggcagcgatggacccattctgaacccaggtccagttaagttgctgtataactcagggcaacttaatctttcatttctagtttctctgccagaaaagcaggtgaagggaggcaaaatacagacctcatgttgagtaactgaagattgagtgatgccctttctaaagggcccacctgcctggatgcggtaaaaacaatgtcccatgtcagctggtgctttggctaacacctatatcccagcacttagggaggctgaggagggaagattgcctgagctcaggattcaagaccagtctgggcaacatagtgagacctcatctctacaagagtttaaaaaattagttgggcatggtggcacacacctgttatcccagctcctcaggaggctgaggcaggaggatcacttgagcccaggaggtcgaggctgcagtgagctatgattgcagtgctacactccagcctgggtgacagagccagatgtgtctctcaatgtatcaataagaacatcctccttcccttaggaaagcagagtcccctcatgtagcttctctgcacgtggcctggggagcctccctcaggtcacacgctggcagctccagaatgcatgtgcccaggggtgtttcctttgcttttttatatcagcccctggggaggcttttcttcgtcggtagctggggaggggtcgggaccactggggctgtgagatcgtgtctcccaagctggcctccttcctagggcactggggatcccctttcatgctgcacctgcggccacggccgcgcctcgtcgctctgaagccaggcag

SEQ ID NO: 1884855 - DNA, 4001 bp, Homo sapiens
cttggggaagccagtttcttgtatggactgatttacaaaaactagagagatagaacaatcatgttgcttttttcttgtggaaagacctctgctatggactgaactgtgtcccccaaaattcgtatgttgaagccctaacatccaatctggctgagtttggagtaatgaagtaattaaggttaaagtaggtggtagtctgataggatccttataaggagagatagcagaacgctcgctatttctctctgccacgtgaagacactgtgagaaggtggttgtctgcaagctgggaagaaagccctggaactaatcagcaggcactttgctcttgggcttccagtctccagaatagtgagaaaataaaatttaagccacccagcctatggtattttatggcagtaccagaagattaacgcaactaccttaaggaaattaagactgtttaaaaatggccataacacttgttgatgtattaatgggtgcttcttaagagttgaaacagtgtcagctcaggagcttaactgtcactcctgccgtctttttcatggtattatattactgttatattatgtttaacttatgttacagaaaaaaacagatgtaagtatcatttctatcagagctaattatgtaaaggccgctgttacacgtatgacacagccaacacatatccacagtggaagacacagtattatccctggaaacaaataatatagttgggaagagaagacatatgctcacaataaatactgatgcataaatgaaaatgcattatgcactgctaaaattgctttatacagttttaactattgtcagagtttagaaaaagaagagataaatgagtttgaaataatcacaaataggtaattaaattaatcttaactattaattgctaactatacatcaagcatgagttaagtactttgcatctactgagtcatatgaggttaagaagtttgcccactggcacaaaactaacaaggggtgagttaggatttgaactcaggctccagaggctgtgctcagatgaactatttccttcctgatccttcaaccagctgcaggctgtttgcaagtttccctttgaactgatggctggtaaaagtcacaggctctgtcatgtccttctcttgtgtcccctagtagacagtcctgttaagtacccaaagcaggcctcatcattgttttaattagtaaagtttcaggaaatgtctgtggaataaaacctataaagaggaactcaagaaaaaaaatagaagatttattatcccacaagccttagaaatctccaacccaaagtctcaataagaacagtttacacaagagccttggaggaaactgggagaatcgcttgaacccaggaggttgcggtgagccgaaatcgcgccattgcactccagcctgggaaacaagagtgaaacaccatctcgaaaaacaaacaaacaacaaaaaaactatatcccttattccccaaacctaatcaagcactacttcctctgtgccaggtcttaactacttgttgaggatgtggaaatgtagatggcatgatttctggtcagctcatgtggtggagaagacagacccacaaatcaaatgctgtgtgtaatgcattgcagtgtctacatgtgtactttgcatatggaaagtcagcctgggagggaagaacgtcaatcttttctctggaaaagcacatgtctgagctggttttgaaggataagaaatgactgggaggtgtgtgagtgtctgttggaggtggatagataaactccacgcacaagagtatgagggcaaaaagattagtatcaagcaaaagcaaattacttttcatggagaacagagttacaacagtacccgtatctggtatctgtggttcttcctgtccagcatccacacttctctctgaaaaacatcctgattgtcccttaggcctcacccctttcttattttcagtctctgtggtctgggtgggatgaaccccaccccaatcctagttccaagactggtcataatgctggcagtcatgacctcacaacattctatgcacctggagcctggatacagtgatgccatcaggtgtggtatgtgatcacaggcaactcaggaacagctctccagccccaggacttctgctggaaccgctgggagttggaagctttcttcccactgaggggcaaaccttctaggtatctgaagatgttgaagaccatttcctggaacagcagaggtaaatgcccagaggatgagaacacatagccattaggagagcctgaaagttcagtgtgactgaaagatgaagttcaagagaagggacaaactgcaaaacacaagctggagagttttaggtaagagtcatatcacaaaaagccattaagcattttaaaatgcttagcctttatccaaagactaatggaaaggcactgacatgacctaatcatgaatgagaagatttgattaaatatatctctctacaatgatggagaatggaccaaaagcaggcggggacaaggacagtaaactctgctagggactgctagaatgaccctgaaagaatagccctgaagatagaaagaagtagatagttgccaaagatacctgtggaatacaaaagtaccagtgcccaccagatcaaactacacatggatctgaatctcagaaaagggctccgagctagggaaagagatttagaagccttcagcagagagatgatgttttaagccttaggagtgaatgaaattacccagagaacatgcatgatgagaagagaacctggaacagcaggggccaagatttaggatctgtcagacaacgaggagcccaagactgagacctgttaatccaaaatgcaccattttgtaagctccctgccaatatgcagaccttggtcaaagtgaaacattccacgagggttcgggccatgagaacctgcctgcccaaccgcctgactttaacacattctgctgagaaaaagtccaaggaacatcattattacattctgtgggaacaaggccccaactgcctcattgtgggaacgtcttctcaacatcttccctggcagcacgccatactgcccagacccctccctgccatacctacaagtatcccagcctgtaagcagtggtgggcactggcattaagctggtcctccacctcggcaggtttacctggacataaatacctgcatttgctgttgagccgccctctcgctctatgtgtgtctttaaccctcaccttcccttggaaacctaacaagaagcaggagccaggaaggtaggaggaagacagaagcccatggtgttaaaaacagccacaggaattatgtagaacagtgattctcaaagtgaggtccacaaactctcggggctcccatgacccttgtaggaggtccacacaagccaaaatatctctatatggatactaaggtgttatttgttgatttcattctcatgagcacatgaatgcagaatggagatttccggaggctaccggaaaggtgatattgcaacaaactggagaaacaacatcatgaaatttctccattttaatttctaataaatatcaatgtttataagcaaaatggtttttttggtggggtggttttcaacaatgtaaggataaacagatcctgtgatcaaagagtgagaacacagccatagagagctttacaaagggcatcagtattaatgtcaaatgttactgaggcctcgagggaactaaccagtcagaagcaaccatcgaatttagtaatggacttcactcacttggtgaaagctgttccgtgtcatggtggcagagacacagcacagtggctgagagtgagcaggagctgtggaagttgaataatgcctgaagggaccattctttctgtgagtatccaaaccaactcatggtagcatgaacccatttcgtcttctactacccttggtaaaaaacgaatggctatcactgagggcattaactggatatttcgtgcaccactgggcgctgagtgccacaaggtcttt

SEQ ID NO: 1884856 - DNA, 4001 bp, Homo sapiens
catggcagcaggcaaagagaaagagagcttcttcagggaaactcctctttataaaacggtcagatctcatgacacttactcactatcaggagaacagcatgggaaaaatttccccccatgattcaattatctcccactgcatctctcccacaacacatgggaattcaagatgagatttgggtgggaacacagccaaaccatatcaccatatattattacttctgtttgtaaattacttctgtgagtaactcatttggactctcactcactgagaggggaaatagacttaacatgataagggagggtttgttaaagaaaaatttgtggacatattttaaaggcacctacctaacaaacaacctcagaacctcagtggtttgaaacaataaggtttatttctcactcatgctataggttcttcagtgatcagtagagaggttctgttcattatgatcagatgcacaggacaaatgaaaaccactgtattgaatactatagatcactctggaagaaggaaaacaagctttggagagtcttcagccagcagttaaagacccccatctaaataccacattattagaataaataacaaaaaccacataaccatctcagtatacccagaaaaagcatttaacaaaatccaacaccttttcatatacatttttaaaaaaccactcaataaattggaaatagaaggtaaaggacatctacaaaaaactccacagctgtcattatagttaatagtaaaagactgagttattttctcttaagatcaggaataagacatgaatgtctactcttataacttctattcaaaattttcctgaaattatccaagataattaggccagaaaaataaataaatagcatccagtttggaaataaagaagtaagtctatttatattcaaacatgatatgaccttgtgtatggaacatcttaagaaatccacttaaaacctattaaaactaataattagttggacaaagtttcaagatacaagatcaatatacaaaaataaattgaaattctatatgctaaaagtaagcaatccaaaaatgattttaagaaaatatgtaattatatttataatagcactcagaaataatatgatatttaggaataaattcttaaaaggaagtgcaaaacctatgcatgtagcactagaaaacattgttgaaaagaattaaagaagatttaaataaatggaaaaaaattcatgtttgtggattggaagacaatattgttcagatggcagtactcctcaaattgatctatagattcaatgtggtccctatcaaaattctggctggatttgttgtataaattgagaagcctatcataaaattcatattgaaacacaggggacttagaacatccaaaacagttgagaaaaataacacatttagaggactcacactttccaatgtcagacattacccgggcacaataattaaagagtgtggtattggtataaaaaaatgacacacagaccagtggaatagacttgagagccgtaaaacgtaccgttacatttatagtcaattgatattcaacaaaaattccagacagttgaatgaggaaaaaaataggaaaaatagtcttttccacaactgctgctgacaagtatgttttggatcccttccttacaccacacacaaaaattaactccaaatgatccacagacctcaattaaagagttaaaattgtaatactcttagatgaaagtataggattaaatttttgttgcctgggttaggcaaagctgtcttagagacaacactaaaagtacaaacaacaaaatattttgttactacctgtcttcctgatgtgcgtctagtctaggctgtttttcttgttattgttactgagacgagaagtcttcttccgaccgaaggttcttctcaatcgaagggttcgtggtctcacggcttcaaggaatgaagccgtggacggcagtggcgagtgttacagctcgattagagagtgtgctgcggcaagatttattaaagcgaaagtgaaaggaaagcttccacgtgggggaaggggacctggaagggttgctgtttctggcttgggtatcttatgcttacatccccttatgacccctgccctcttcctttttctgtcctatagaatcagcttattttctatctgcttgtgggttggcgggcctagttggttaaaaacatcaggctgaagctagagcttaaactccctatatgactggttcaagtttcaaccacttagcttgcagctatgagtcagtttgtcttaggggaaagtcccctttgattggttgaagtttccatcccttagctttcagctatgactcattttggcttaggggaaagtccccttagggaagtccctattgacccaggaagtccagccaacttagccacttagtccctcattacaactcttcccatttaactgaatgaaccactcctttttaaaaaaatcaccactttttttttttttttttcttagagacggagtctcgttctgttgcccaggttggaatgcaatggcgcgaccttggctcattgcagcctccgcctcccgggttcgtgccattcttctgcctcagcctcctgagtagctgggattacaggcgctggctaatgtttgtatttttagtagagatggggtttcaccatattgatcaggctgatctcaacctcctgacctcgtgatccacccgcctcggcctcccaaagtgctgggattacaggtgtgggattacaccgcacctgacctaaaaatcaccacatattttaaagcactatttgtctcagggcattgtgggatttcagtgatgaactggatttagcttttaggttgaacaggaaacgtcaatagaattttcggttttcatgtcagtgcagatctcgcaaaataaaaataaatgtggcattggctctaagggcagggcccatacactagtccaggctattctgtaaatgattaacacatctccaggaggagattgccgccccagaaacaccaattctgctaaatactgaaagcaaatctcacacttgggttcttgagatcccatagagtgtggctttgccattctaatctcctggggagaggggagatgtggcaggaagagaccactgcacagaagactcctaggctgataagaatgtgtgaagatgacctgcagatgaatatgcaaaggagagtgcatggagaccaccagcagaggactaaattagaagaaacaatctggaagggtgcaggcactggtttggctgccattagtctgaaatccatacaggaattcagaggggagacacatgttgctagagagaccaattcagggctagagagaggcagaagtgaatcttcaaagacaagagctaaattttcagctgtaaggaaggaaagagatattataccaaggtgccttgattctgatggtcatggtaagtcattcattcattcattcattcattcattcattcattcatctgttcgttcatgcagattgtggtggtggcacacaggagtttagtttcagacatattaatttaaagatgcatagtagatatctaactggagacaggtattggtagttggatggaggaatcttgaagtaggaagaaatattcaggctgaagatatgaactctgtgatttttattcttatgtttttaaactattaatatatacctttttctgaaatcaatgaatttccccaagcaactccagacagatgtctggggcctcatttatttattggtttcataaatctgagccctctttgatttagcgttatacagccagcccatcccgggcctgatctttgccatcctaatcatgaactaagcccctgccatgtaattgtgtgtctactcctctgcctccggggattgtaagtacagtgttcttctttatgcatcaagatgttattgctgagatgtgaatcatgcaattgccaggagggtctctgatcccagctgcaacttctccattgaagactagcacgccc

SEQ ID NO: 1884857 - DNA, 4001 bp, Homo sapiens
gtgtctcttcaagccttccagcctttcttcctagaactcacccttccttattctgtggtgcgaggagaagccttcacactcaaagccactgtgtttaactgcttgtccacctgcattcgggtaaggacacttctctggaagtgaatgagaatagaagatagtcaccattcattaccaggtctcctaggtaacccaggaaatcagaactgcatatgatatatcctaattttggagcagacctggtactaagagaaaaggtacctgacaggcccaaggtggtaaggttatattcattcaggctcctatatctgtgtattcctaaattcagacattatgtccacctgattgtttcatgtttttcactaaacacctctttcttctgttggcacaaggctaaatcctaaacacttatcctaattcctgtcagtttttcaattttcttgtttcaaacacctaaactacaaagtgtctgatagagctgaccatatttgcacagcttctcagcgcctctggactcatggacattgtccctcagtccatttacctgatgcacagagcatcttttgcagtattcatgctgttctgcatcccttcataaacttgtggttgggtgtgggggacaggtcgttgtgcagctggaggtctcttccgctttcctggctgttccaacagagaagaatgaagaatctcactgtgtctgtagaaatgggcggaaaaccgtgtcctgggttgtgactccgaagtcactgggtgagtagtaatgctattagcaaattccacttcgtgtgcttggatgatttgttttctgcactgaccccaatacacactttttctcctcctttaatattaatcaagaggaagacaaccactggatacactggggaaactggaaaagaagaaactgttcaatatagaatcaccgtttaactcttaagaactttattccccaggaaaggtgaatttcacagccactgcggaagccatgcattctcaggaagtgtgtgacaatgagttgactgacgtcccaccacttgcgcagaaggacactgtagtcaaggccttactagttgaggtacgtaagtctactctctgtgagtctcagagcccttattatttcatacagtattatctaacatgcatctcacagtgacatttaattcccaagaatgtggatagatctacaatccaatttttcaccaccattttctcctttgctttcaagtgtttaatttttcttttatacattcagtatcgctttactttttttttttttttttgtcaatataaagcctgaaggaatagcaaaggaggaaactttcaacacgctgccctgtgcatcaggtaagtgtaatatatagagaaaaatttcatgttaagtgacttgccagagtatgcagttgtggaatgtcttttgggggcatgcttttctctgagagagagagagaaaaaaaaaacaactcttaccctcctccaaatctaaggacatttgatgaaaaacattgtcctgccccactggctgctctgaaaagccgtctttgcattgtgcgtcgtcagcctccttgctcgccgcagccgcctccgccgccgcggactccggcagctttatcgccagagtccctgaactgtcgctttcttttttatcccctgcatcgcgtcaccggcgtgccccaccatgtcagacgcagccgtagacaccagctccgaaatcaccaccgaggacttaaaggagaagaaggaagttgtggaagaggcggaaaatggaagagacgcccctgctcacgggaatgctaatgaggaaaatggggagccggaggctgacaacgaggtagatgaagaagaggaagaaggtggggaggaagaaggtgatggtgaggaagaggatggagatgaagatgagggagctgagtcagctacgggcaagcgggcagctgaagatgatgaggataacgatgtcgatacccagaagcagaagaccgacgaggatgaccagacggcaaaaaaggaaaagttaaactaaaaaaaaaaggccgccgtgacctattcaccctccacttcccgtctcagaatctaaacgtggtcaccttcgagtagaggggcccgcccgcccaccgtgggcagtgccacccgcagatgacacgcgctctccaccacccaacccaaaccatgagaatttgcaacaggggagggaaaaagaaccaaaacttccaaggccctgctttttttttttcttaaaagtagtttaaaaaggaaacttgtattttttatttacattttatatttttgtacatattgttagggtcggccatttttaatgatctcggatgaccaaaccagccttcggagcgttctctgtcctacttctcactttacttgtggtgtggccatgttcattataatctcaaaggagaaaaaaaaaacttgtaaaaaatgcaaaaatgacaacagaaaaaccatcttattccgagcattccagtaacttttttgtgtatgtacttagctgtactataagtagttggtttgtatgagatggttaaaaaggccaaagataaaaggtttcttttttttccttttttgtctatgaagttgctgtttatttttattttttggcctgtttgatgtatgtgtgaaacaatgttgtccaacaataaacaggaattttattttgctgagttgttctagcaaaaaaaaaaagaaaaaaaaaagaaaaacattgttctgatgaaaatcacttggaatgagcctcttagggaaataaatagaaagtactttttaggataaattattattattgtattttaagaataaagaaatgggcatagagaaataaaagacttgcttaaaagcttaaaagctcttgcctaataataaggtctaaggctgttgacctcaggacaggattctttctgatacctctgtgtttctcaaatgtcttcctaaaccatgttcaaaatattgaaatatctgtgtgacactagtatgatttactgttcaattgacagtttaaatgcactcatgtttttacttaaacaagttattttaagaggaactccaggttactaacttgtatagaaaaccagtattttaccaatatcattaatatagcaatacaaaaattaccactatattgaaagagaaggggaaaagctaacacttttttaagtttatttaaattatcattaaaaacccaactctgtgccacctataatcatcttgacgataatgctcagtctgcagatctctcttctctatacgaggatcccttgataaaatcatctagtcaatggctttaataacaactatgtacttgtgtccaaaactgtacaactttgatccacacctttttcctgaactcaaactcatgtattcaactgcccactctccacttacaggcttgtaggtctcataggcatatcaaaatcagcaagtttaagactgagtatctgctcgtcctcacaaacctgctcctccctcaatttccttcatctcagatgatgaaaaatccattcttctatttgctagggagaaacactttggagttctttactacattctttcccctatcttccctacccaatccatgcacaaatctagtcgattccaccttcaaattgcatccagaatctacccacttctctccatctctactattctagtcctttctcttgcaggctctcaatagctttctaactggtctcctgatcatctcttcttgttccccttcagcgagagggatcctttaaaacatgtgtcagatcgtgtccctcctcttctctaaccctttcaggaatctcccatatcccccctaagttaaagcgtaagtttttaatgccacttagaaacccttgctaccccatgacttcacgtcttcctaatctctccttcgcttaacccgttccggccacactgacctctttcttcctattggaatacacccagcatgcttcagtctctggagtccttttactttttgttcctttttcctggaagtatcttcccccagg

SEQ ID NO: 1884858 - DNA, 4001 bp, Homo sapiens
cagctcccaaacacttgcagcccttgcttggcctgcaaaagggtttcctcgaaggggcaaaaggcactttttatctttcttacttacccgctcagcccggtgccatggagtctagaagatcaagctgggcggtggttttggagacgttattgtaaaaacatatatattttttgatttagttgggaaatttgggggttatggtggtgtctttgttcttattacctttttgtaagttacaccctcacgttctgctccttccacttctgcaaactttccagggttgggtaggcaaaaaggcggcttcgctgaggactgtttactgctctggatatagcaatggtgtgatcgtcattaagagacaaaaggcgaaaatacagtcaaatcaaacaaaaggcacaagacgcaccagccgcccaaccaccatagaaaataccccccacttaacgttggtgtttgctggaaccagctaggacttgttttccagttttaatctagtttcctgtgacggctttagtctctctacacaaagaaaaggtcttcctttccctcacccaccagctccccccaacccccaacaccaaagacgagaaaaacagggctgtttttcttcaaatagatcgattttcaaagaaagtgtacaagctacggggaagaaagctgactagcatttagtgctgtaaacattttcaaaagcataaagctagaaccttagctttataaagcaagatcgtctcaagcatcttaactggcttatattagacaagagagacaaagacatacatgcagatgaaggttcggaaaattaaggacatctcagcaacattaacatcaaaactgtactgcgtcaggacagaatggattgggtacttacaatgtaaaaggttttttaaaaactaaaagagtaacaactgctcacaattttttgttgctgccatttcgctagtcctaaagctatatacatttaaaacattaccttgttaaaaagagagaaggagttaataagatggccaggtttaagtgtttaatagaggaaactagatatatttaaaaatttattgttcagtcaagagaatacagattaagacagctccaagctccccccacccacccatagaacaaaaagaggaaaaaaaatatgtcatttacttaggtttttttggaattcaaaactgttaactgctgacatgaatggtgtgctatgacctagttatacaagacaaagatggattccaagtcataaggaaaaatccagatctttttaaaaagtcttctccagtcttccaactgtgagtccttgggcctgttgacaaatgttaaacacactgagacgtcctgaactggatggtagagtcaaaggaaaaacattccccatttgcaacaaaggaaaaacccacttggccatttaattccattgcagaaaaatggcttccctcatctgttggcctctccttcgtgtctgatgaaggatgttttgagatcagcgtctaataactcaagccctatagaagccgcgcgctgattggctgccgcgccctgccgccctgctccagccaattacctacccacggccaaattacaaaccccgaaaagagccccaatatgagctacaccagctccgagccccggcgaggcggctcctgcgcctcggccgccagagaggagcggcagagggggctgcaaacgcgtcctcgcgaagcccgggagcctcggagttgaactcacaaaatggaagccgcgcgctgattggccgccgccactcccggacctttaataaagaaaggggaaggaaaagataaatgcaaaaaagggggactctctcctccgcgggtggctggaggaagggggggaagcatgtgttcaggacaattacagggcgctcccctccaaaaataaaaacagaagaaggcgtctatcgcccaggtccaggcgagggctgcatcctcccaggaatgcgaatgctaacgtggtgaaccctggtctcccttccccagctcagctccggggagggggtcgcgggccgcaggaggaagccggagcgcagatacctcgattgcaactcctctgagtcgacgccggcctccccccgcggctcccagcgtccacacacaccctcggccccccagaccccagccatctccccgggccccgcgcgcccgcctccggcccgggcagtttggaaacagttttgcaggcccgggacgcacgccgcggcggtcgcggctctgagggtagtcccggccgcgggaggtagagcccggggagaccccctcccccgccagccaagacccccaccccagtcccagaaaaataaataaattaaaaggccttcccccggggagggggaggcagtgtgggagcgcgcgagtgaggggtggggggccgctggggcccggggctttggcggcgcagctgccgccgccgggagagtgcctggggaagcggcgaggaaggagaggggaggaggaagaggaggaggaggaggaagaggaggagggtgagcgctcgggtcgggctccttagcggtgtattgtgggatgtgcggctactgggagccgagcctccgccgccagccgcctcccgggcagcagcagcagcagcggcggcggcagcggcagcagctccgggcccggcagccgcggcggcggcgcccccccttcctggcccccggtccggccgccccggcctcggctccctcgggggacaccatgtactggctggcggcgcagggaggccggcgcccggcggggatgtaagcgcggctcggggagggagaggccgcggccggcagccgggcggcccaagcccccggccccggccctggcccgagcgggcgagcgggcgggcgggcggcggcgccgccaggccctgccgccagcctcgcgccagagccgggccgagctagcgggtgagcgccacgccgggcggccgggcgggcaccatgggccggagtccgcgtcctccgggcgccccgggccccgccagcccgcccaggggacccccgggagcccctcgctgccgccccgagacggtggccgagcgggcgggcgcgtaattctcccggaagggttattctctcgctccattcttgttttggggggagccagcgagacagctcctttcggggcgcgctggcaaggtgggagggggtgggggcctgccgattggattctttcgcgtgtgtgtagaagcggccgccgccgccgccgcggcggagacgacaacaacttgctggttttcaggttgggttaacggcatggagaacagtcaccccccccaccaccaccaccagcagcccccgccgcagcccggcccttcgggcgagaggaggaaccaccattggagaagttacaagttgatgattgacccggctctgaaaaaggggcatcataaactgtaccgctacgatgggcagcatttcagcctggcggtgagtagccggcgcgcccccccagccgtgccccgcgtcgtgtccggggagacgcgcctagcggccagggaccccccgcccgatcccccggccaactgtcagacggggccccagccctggagtttgacaagtgcctcgagaaaggggtctgcccatggggagggggaccagttctctcatcccggccccccaatttctccccacagatgtccagcaaccgcccggtggaaattgtcgaagatccccgggtcgtcgggatctggaccaaaaacaaggagctggagctgtcggtgcccaaattcaaggtaggacccctccccactgccccgccgtccctcccccacctccccgagttcgaaaataacgccagtcctgaccgagcccagccggattcccagttcccgccgtccggggccagggaagttttggcggggaggggtagagcgctggcgagagggtgtcccctctcagctactgaaaacaaaataacactgggtgaaactgtaatcacggcgcagatacagtgtcctgcacgccccgcggggggctcggctccgagactctcccctctcgc

SEQ ID NO: 1884859 - DNA, 4001 bp, Homo sapiens
cccaggctggtctcaaactcccggcctcaaacaatcctcctgtctaggcctcctgagtcactgggattacaagtatgacccaccacacccagccttcatctcattccttttaagctcatctcttctatgggttctttgaaggccagttgtccttctgtgtgccactgttcctgccttcctggacctaagggaacagtgactgtccattggctgatggatgaagacctgccatctgcatggctcaggctagtcatatagagaccaatgctcatctccattggttttgggtcgaatgaacccacgtggacacttgctggaatcatagcatcctagtaatttcagatgctcacttctatgtaggctgagtccaaagaaacactacttacctaaaacttttttttttcaatttttagtttttatctttggagacaaggtcttgctctgtcacccaggctggagtgcagtgacaggatcctagctcactgcagcctctaactcctgggctctagccatcttcctacctcagcttctcaagtagctaggactacagggacgcaccaccacacccagctaattttaaaaaatttttttgtagagatgggggcctcgctatgttgcccaggttggtctcaccctcctgggcccaagcaatcctgccatggcctcccaaatcactgggattacaggcctgagcacccaacctcctaaaacttctgattagagtctagtgcaatagcagttaatgcattgaccatttctcaaaggtctgttctgtgcagggtactggagacatagtggtgagcagaaactgacacttccctgtccccctggaacttacattctagtgggggaggtggacattaatcacatagtcatgcctagaatgacacattgattctttaatgaaagctccagaggatgggacaatttcacagaacaacgggccttggccaacgaggttagggagatagctctgacaaaatgactcttgagctgagactctgaagatgaatagatgctaagtcagcaaagaagagaaggaagagcattctgtgcagaaggaacagcatgtgaaaaggtttaacaaacattttcctgtttcatctgcactgtgaggggagatattaatatccccaatttacagatgaggctactgagactttgagagatgaaaggcctcgcccaagggcgtcaggtctggagggagcagcaggaatttgatccaaatctgcctgcctcggccccagcagtctgatgccacattttgacactctattccacactggtgcttagaaatagcatcacatggccgggtgcagtggctcacacctgtaatcccagcactttgagaggcggaggcaggtggatcacttgaactcaggagttcgagaccagcctggccaacatggtgaaaccttgtctctaccaaaaatacaaaaattagctgggcgtggtagcgcatgcctgaagtctcagctacttgggaggctgaggcatgagaatcgcttgaacccgggaggcagaggttacagtgagcccagattgtgccactgcactccagcctgggcgacaaagctagaccatgccacaaaaaaaaaaaaaaaaaaaaatggcatcacatgatgatgggaggaaagctgcttttgggaaaaaaaaaataatgcaaacaggccagacatttgtgtctgacggagctttttaagttgctgtagtagaaacccaactcacactgacttaagcaaaaaaaaggaaatttattgtcccatgtaacaagaatccaggatggaagactttgggctcagctggacccagaggctgaaacaagataatcagggctttgtgtgtgtgtttcccttcccctgatcctgcttcctgggtgttagcttccttctcaagtcccacgagatggcccccggaagtctcttacttaccccctcctcgctgttagcagttgctgaatttcgagagactcctctttcccagccgctccaggaaaatgtccctgggttggctccgattggaccaacttggtcatgtgcccatcccaaagccaatcagtgtagttagagagctgaaatgttctaattgaccaaaccttggtcacctgcctatcctggaaccaatcaatgaggccaggggctggactcctttggtgggtgctgggtcatgtgatcacccttgtatcggaagatggttcagcctcacccaagctctatggactgagcatgtaggaaaatgggaacaaggaacagggaatgctggaaaggaaaaaaaaaatggctggacccccaaaaaactcaaaatagaaaagtcagccaggcgtggtggctcacgcctgcaatcccagcactttgggaggctgaggcaggtggatcacttgaggttaggagttcgagaccagcctggccaacatggtggaaccatgtctctactaaaaatataaaaactagctgggcgtggtagcacatgcctgtaatcccagctactcgggaggctgaggcatgagaatcgcttgaacccgggagacagaggttgcagtgagccaagatcatgccattgcactccagcctgggtgacagggaaagactctgtcttaaaaaaaaaaaaaaaggaaaagaaaagaaagcttgggttttattgaacacagggatgcttatgaagataatttaacttgccctgccctcatgagggctctgtccagcaagcatcccagagagtcatagcatcatttaatttcccaaacttttatggttgaatctcccatttttatctcataccccgggtttatcccagtttctgctagaaattaagatgctccctacttctgaaactgccagttctctctctggatggtttctctacctcatctggaaaatggagatcattctaataccaacctcacacacttcaggggtcgtgtaaataaataaatttagcccaatacataggcacatagcattatgtcagtgttagtgttagagctttatcacgcccattttgcagacacatagcctgaggctgagaaagaaaacacagcttgctttgggctacgtaatggttggtggaatcagacgcagccagatgtgggtcttcaaagcctgagctttgtcatctcacctctggaagggtaaatctatgttgtttgttgtcgtttttcctttagctgcttgggccaattcatagaatggatgcatttatgcacacctcattttaatcacaattctgattagaagatcccttagacatggattcatccacacatgggtaagccgagggaatgtatccatcactagaaattaatgctgtgttctactgtgccctacatgagaatcagaatcatcaggtctagcaggtaactgggatgggagcacaaggcagggatgcgaaggagacatcccatgtaaggcactttcagaaaactgctctaagtgcttttaaaggccattacagtggctactctttcttgagtacctactatgtgcaaagtacattaacacagtctcatcaaatcttccaacagccatatgagggaagtattatcatgcacattttagagtgaggaaacaggttcagagaagtgaggtgacttgtgcaaagttgcagttacatggtggagccaagattggaactaaggtctgtctccaactgccccaggaatcaatgtcataactctgaccttccttcttctcttaggatgtcctatggtttacatagctggttcttgattgattgatgcttaaacgggttctggtttttcagcagggctgggcatttgcgcgactccaagaatggacccttccttaaagtttgggccttcggcacctctcttgcctcacctggttccactcttgttttgttttttgtttttttttgtttgtttgtttttgtttgtttttttgaataacaggcaacatgttgattcaacaagcatttactgaacacctgcaatcttaaattagactccctttctagaaagagccttagagctttaggattcacat

SEQ ID NO: 1884860 - DNA, 4001 bp, Homo sapiens
gcctatgtcactctccactatatttgtttacatgtctgtcttctctactaggtaaccaattcagaggacaggaattgatttttgccattatagtttcagtatctagcacagtttctgccatgtgttatacacttaataaatacttattgaggctgggcgcggtggctcacgcctgtaatcccagcactttgggaggccgaggtgggtggatcatgaggtcaggagttcgagaccagcctgacgaacaatggtgaaaccctgtctctactaagaaaaatacaaaaattagctgggcatggtggcactcacctgtaatcccagctgctcaggaggctgaagcaggagaatcgcttgaacccgggaggcggaggtgcagtgagcccaggtggagtgatgatcgcgcctcatcactccagcctgggcgacagagcaagactctgtctgaaacaaaacaaaacaaaacacaacaaaaacttattgaactgaaacatatatgtatgtgtctgtgtgtatttctttttcttttctttttgccttggaagaatgtggagaaacatctgaaaaaggagctgttttaagatacccagtttgtgatcatttattatggcagccaaagcaaataaatacagcatcaagcttatcagaatccacttgcatcatgcttgctaatatccccattgtcaaagctagtcacaaggctaagcctgctgtcaccatgagaggggactatacaagggcgtgcattctgagaggtgtggttcattggagaaatcaaagtaacagtgtgcagtgagatttattagatcatttcatgtatcataataaaagacattgaatttctgatgaaggatttcgaatgtggtaaaataattcagtgggaacccaacgcagtaccttgaaagagagttaccttgggtcaagtacaataattggcactcagacctgacacttccttttcaatagactaaattcaccatgcagcaattattggagctaacaaagtgtaatctgtattggaagagagttattgaaaccagtatttaaaaacattatagcagaactcttcaaataaattcttatattaacacagaaacaagtatggcagaatactcacggttattttatttaaagttgggtttttcgagtaccctctattttcatgtattttgggaaattttagtaatgaaagcaaatagtgaaacagaattaaatatccattttataaaatacgacaaacaagaggagagcggctctgaattccacccctgtggaattcaggactgccatagagcgtattttcaaaactgttgattttgacaaggctgactaggagatgccctagaagccccaggtatgtgtttcagtatgattctggcaacgctgacttaaagcactaagtagaatcagtagcctacagtggatactgccccataaggagtgacgggggaaacgttgctgattaaataaatggtcttttgaattgggctgatggtagatgctataactgaagttgcaaaccacactgggttcgtttgctagggctgctgtaataaatgaccacaagctgggtatcttaaaacagcagaaagttactctctcacagttccggaggccagaggtctgagatccgggtgctggtgtgtccggaatcggtgggttcttggtctcaccgacttcaagaatgaagccgcggaccctcgcgtgagtgttacagttcttaaaggcggcgtgtccggagtttgttccttctgatgttcagatgtgtttggagtttcttccttctggtgggttcgtggtctcgctggcttcaggagtgaagctgcagaccttcgcggtgagtgttacagctcataaaggcagtgtgaacccaaagagtgagcagtagcaagagttattgcaaagagcgaaaggacaaagcctccacagtgtggaaggggacccgagcgcgttgccactgctggctcgggcagcctgcttatattctcttatctggcccaacccacatcctgctgattggtagagccaatggtctgttttgacagggcgctgattggtgcgtttacaatccctgagctagacacaaaggttctccacgtccccaccaaactagctagataccgagtgtccacacaaaggttctccaagtccccaccagagtagcaagatacagagtgtccattggtgcattcacaaaccctgagctagacacagggtgctgattggtgtgtttacaaaccttgagctagatacagagtgcccattggtgtatttacaatccctgagctacacataaaggttctccacgtccccaccagactcaggagcccagctggcttcacccagtggatcccccaccggggctgcaggtggagctgcctgccagtgcggtgccgtgtgcctgcactcctcagcccttgggtggtcgatgggactgggctccgcggagcagggggtggcgcttgtcggggagactccggctgcacaggagcccacggaggtgggggaggctcaggcatggcgggctgcaggtcccgagccctgccccgcgggaaggcagctaaagcctggcgagaaattgagcacagcagctgctggcccaggtgataagcccttcactgctcgggctggtggggccggcctgccgctccgagtgctgggtccgccgagcccacgcccacccggaactcgcgctggcccggaagcaccgcgcgcagcccctgttcccgcccgcgcctctccctccacacctccctgcaagctgagggagccggctccggccttggccagcccagcaaggggctcccacagtgcagcggtgggctaaagggctcctcaagtgccgccaaagtgggagcccaggcagaggaggcgccgagagcgagcagggctgtgaggactgccagcacgctgtcacctctcactggcagggttaggtttttctgggggctgtgagagagaaaccagtctgtgcgtctctttggcattcctgggcatccctccaggctccgcctgtgctgtcacactgagttccccctgtgtgtctgctttctcctcttataagtgatataggagttaagaagaaattatttaggcagatagtgagggtaaggaagtcctcagtaaggttttccttttaatgaaaagcagccctcaaatcgttttcttttcttacaatgagcagcctgtaaaatcaagctgcagacatagacaagcaagctagaagcttgcacgggtgaatgccagcagctgtgccaataggaaaaggccacctgggactaggcatgtccaacttcgtatacttggtcatcatttcctacattctcacacagaagagagcactcaaaaaatagttttgagaatcatttgctaatgatttaatactattataagggaataaaagacttttcttttaaatgagtgcttaaaggcgattggaagccctgctaaagttcaggggtgaatgccttattatttttttatatttgggggcaagggctttccagtgaagactggaaaacctgctagacagattctaaaagagctgtaacactgggtgaatgctgtagaagcacatagtgttagtaaggtgtgggtcagatacggctttagagaatgtagcaactgaaagcccagatgggaagctccgtaggcagctggataagctaatatttctaaataatatgttcagagattcggactgaatgcaattgcaaccttctccaccagtcagcagtgagttctgaagttacagaagtgtgatgaattgcggtcaatatgggttctaccttcactttggagtcagtcagtgaccttaaaatacctgcccagctgaattttcttagagtgcttcatttcctgtgggcccttttactccaaattccagatgatggcttttagtctgtggggccgctttaagaggcagaaatctgatcagaactactagaaggctgtgaaggtgctgctgtgtggacaggcagggcagagtgctcaaggctttccaa

SEQ ID NO: 1884861 - DNA, 4001 bp, Homo sapiens
ctatcggctcagccttcccaacttctaggggccatgtgcatgccttggcagctttctctaccttccaagccagcaacagggtgaggctctctcaagctttgaatttctcctccttctgactcatctctctgacccagctgggaaagttatcctatcttagggactcacatgatgacactgggctcacctggacaacccaggatgctctccctatctcaaggccaatacctttagtcacatctgcaaagccctttttcccatgtgaagtaacatatttatacatcccacagatttaagtatggacatactgggggggcgtgattctgctaaccacaccatctctgttctccccactatttccacacacagatgctgtcctgtgatatgttgaactgcttgtctgtccatctcatgtaacatgaaagtcaaactttctcaaggtcaaaaacagtatcaccatttccaaagatccattcagtgaatatgagttgatgcaaagttggaatcttcagaacaccctcgggcacatggctacaggagaaatggagcgggtgggctggatgagctggtgagagcatgcccccaggagggaatgtccactgctcagccatggctgccatttgagaatggggcctgaggtaatcagagtcctgactgttcaggaaaatcagaaacctggattacaaacaaaacctctcaattttaagcatcagccactaattcaaatgttaacactgatcatgttaagtaaacacctgaggatcttgcccagcacgtggtcctccagcgtgacgtctctgccctgggagatttcttatttaccaggagcccagtgcctccttcacaggcctgcagattaaatctgatcttggtgaccatcattttaccccctccctcagaggatccgatcctggggcagaaggctttcccctgcctcctctccagcttcacctgctgccctaccttcctccatctcccatttcccccacttccagcagttccctttcaccccactgtgtgcactctttaagccttggccctgctggtttccacccctggaatgtcctctcccattgccagcctggtgaatctgccttcatggagagccccctcctctgtgaagccttcctccatttctccaggggactctgggcatcttcctctaagccagtatcttccccataatgggctgccaccgtgcatgatagatgttcatggattcaaccaaatgtttacttaccacctactatgtactaacagcctctcaatcctgaaaacatggcagtgagcaagacacacatgggctcagccctcatcaagacagtgatgccagctatgaagggaaccaaattgggtgaaacggtggagagtagggtaggcttgaaaaaggaggtcccagagggggtttctggagaggtaactctcccactagaatgatgggaaagagttgacacccaactggctgtgggaagagctttccaagcagaaggaaaagcaagtgcaaaggtcctgaagtaaagaaaaaggaagataatcacagaggcagagcaggttgggggtggagaaagtcaagcatatgacgctgaggaaatgaagacagaggagcgtgtagggcttcacagaccaaagtgagggggttaactgctgatgtggattctccccacaacccccacctgctgggggactcatgagtgctgaaagagagcacgcccaaatcacttgaagggtggaccgcagggctgtggggtttgggccctttctccaccgtgggacagacttacagcacaggcgagtgctccctgcatctggacacagctgtggggctgtggtcgccccatcttaggccttgtttctaggagacgttcccaccagagagtgtctctcttcatcttccccaggtgattcaggagctccgggtgtcattaggttgcattgctcattcccagatcgagcggaaatcccagcctggcgtctcccaccagcgctcacatgcgtatctacagctcataccttgggacgtctgggcgtgacgtcagcttccgagttcacgaatcagacaattagattaaaaattcaaattccacttggaactcccagacctccgaagctcggcgtgttctgcactcagtggccacagagcccgggtcctggcgcggatgcgctggggctgaactcctactcctgacagcgccgtccagagaggtgcggcccgcggcggggctgggggagctggggacccgcgggcccagaggaggcgcaggacgaggggggccgagccccaccaggaccgtcccggaggcctgaacgcagtgtctggtgagcctgaggaggtcaagacccgggccgcgtccccgtctcctcgtccccagttcccagtgtggggcctcagggcacagactccacagctgctgagggcctcgccccctccttccgggacctcccgagtttcactcaggagcccccacacccacagctaagacgctgggaccgctacaaggactcttggtctatgaaggggcctgtggcccaggtgtggttggaagccccttaccctggctctgtgattggtgcagggctggtcacgtggcccgagcaagtccaatcggagtgagcatcaggatttgttccctggccaatgggaaaggttgttacacttccacaggctgtgctctggctttgtgattggtgcagagctggctacatggccggagcaagtccaatcagagtgtcaggtggctgtgccctgggcctatgattggtacagacctggtcacatgactctgccagtccaatcagagtgcatgccaggacctgccccagggctggcgggagagctacggagctgagaggaagccaggaagcagctgcagccatcttactcctttgtagggggagcctgccaggtagaggtccctgattggggcattagcagggccaaagccgctgaaggcccagatatgagacagaaaaaaagatcactggagccctggatccagtcgagcctgcagccaggtctgtgctgcagcgtttccagggccaggtcccctccccgcttttatttccttgagctcatttgagcgtttcttggcttttgggcttcctagcccaaggagtcctcatccacacagagccggatcagaatccggaaccccagaacctggatcactccccttccttgctgcgcggtcctgacctgggcccgtggcctcaatttccctgctgtgaaaacccggagggcgcgggcgttgggatcgcgaggggcctcaaggcagcatggggggggggcaccgggcagaccccgcctggacgccagccccgagccctcagagcccgctgtccccgcgtctgcccgtgcgggacagagaaacagggtcaggccggagaagggccgcgccagccgggcaggagtccacagaggggccgcagcacttgccacccgggcagcagcggggctccccgagccaggcctctggacgacccctggtcggagggggagtggctcgggctcgcttccgagggtcctggccagcggaaggaggggctcagggacgggcggggagatgccgtcgcggtcccggtcctggtcccggtcccggtgaggacagcggccggctcttcccgtgacccggagggccctgtcggaagcagctggaggacccggagttccccagagtttcctaccagccttcgtctctacccgcccctcgcgccgcagtagagggaagggtgcgttccgctggcggcagcatatgagtatccatgagcccccgtgcctgggtgacactggcagtgtccacatgtagcacataggtaataatcatgtcagcagcctgcgtgtgtgacacctataagtacaggtgcaggtggcacaaacatgggtgatgcagatacacccaggcagcgccacacacagcaccatgcaggtcatacaaggaaggaatccgcagactcctcccacgagcagcggacagacgggagcatgcgggaatggtttaatacac

SEQ ID NO: 1884862 - DNA, 4001 bp, Homo sapiens
ttttttaatgtctaattttcccacagtaaatggatattattttgcactttttaaaactaaaaactaaataacatgctagcacagtctcacctcggggcctctgccctggcactttcctctgcctgaaatgcttttctccaaatattctccactttcttcatgtctttgttcaaacgtcattttctccaggaggcttcctgaccgctcgatttaaaattgtgtcttggctgtgcacggtggctcacgcttgtaatccagcactttgaaaggccaaggcgggaggatggcttgaggctgggagttcaagaccagcctgggcaacaaaatgagacattattttaaaaaagttttttttaaatacctgggcatggtggcacacatctgtggtcccagctactcgaaggctaaggtgagaggatcgcttgagcccaggagttccaggcggcagtgagctatgatggtgccactgcactccagcctgggtgacagagagagactctgtctcaataaagtatattaaaaaaaaaaaaaaattagccgagtaccgtggctcacgcctctaatcccagcactttgggaggccaaggcgggcggatcacaaggtcaagagacgagaccgtcctggtcaacatggtgaaaccccgtctctactaaaaatacaaaaattagctgggcgtggcggcgcgcacctatagacccagctactcgggaggctgaggcaggagaatcacttgaacctgggaggcagaggttgcagtgagccgagatcgcaccactgcactccagcctggtgacagactgaaactccgtctcaaaaaaaaaaaaaaaaaaaaaaaaatcgtgtttatctctctctttcttcctttttgtctctgtctctcttccctcttaccttgttctattttcctattttactccatagaaggtatcaacttctaacctcctaggtcgtttgcttatttattacgtttgtcatctaagacctcctgcccaccggcccccagcaggaaggactgctccaggaaggcaggaattggaatttgtgtctgttttgttccctgttgactcccagggcttagaacaaggcttggcacacagtaggagctcagtaaatatttgagtagtgaatgaatgaaatctaaacaagcaaatggttttcctttatgaagactttatttcatcctcactcttctgattttcagaagcagcagcacggatgagacgggtctggcaggcttggcgggggacaggtgggaggaaagatgttcctcgccctctccagattccgcgcccttggttcgccagcgggaagccgtggctgcgcggagccgaggtagcaccgccccctgctgggcagtttggagaaatgcagcgcggacgctcagcgattgggccagatacatttcaaacaagtacacctgggaatttggaaaggaacaggatggaaaggtcatcgggggtgaggcagccagatggatctgcgggaggccttttcagaaaggaagaggagccgagaaaaaaaatgcagcccattctctcagctgcaggacccggattcaagcagagtccgcgtctcgcaatgaatgggtttctcctgttgaggccaaggctgaccgtgatggaagccaggtgcaattcaaggccaactcccagggatctctttttggaatttctggtttccctaggtttcctcgcaggttttgtggtgagcatgtatccttttatcaaacccaccccacaaaaccagaatttcaaaacaagtttttacccagcctttttaacaaatgtgcacatgcagtttcagaaagaggaaatgtattagtgtattagtccattctcacactgctataaagaactacctgagactgggtaatttatgaagaaaagaggttttatggactcaccgttctgcaggcttaaccagcagtatgactgggagacctcaggaaacttacactcatggcggaaggcaaaggggaaacaagcaccttcttcacatggtggcaggagagacagagagagaagtgaggagagctctatcacgagaatagcaagggggagggggagctccgcccccatgatacaatcacctcccaccaggcccttcccccgacaagtggggaatacaattggagatgaaatttgggtggggacacagccaaaccctatcaattagccaagtcaagattgttcattgactcgacatttttactgtgaatttactgtgtgccagccacggttcttggtgctggggctacagcagcaaaacagacagacaaaaacctcagcctttatggagccgatattacagtaaaagagacaagtccctaacgcacaaataaatgaaaatacctgactaaaaactaaggtaagtgccctgaaagagaaaaacaaggtgttaccaaaaaaattttaaaaagagcagacttcaattttgggaatccacaccgaagacatgagatttaatctgaattcctctcccaggagccaggggcaatctacggggagaaaggaatagcaagagagaagctggaagtttccaggctttcagtcttaattcagtatcccccagagaagaataacttgtcccttttagtagatgtttgctctgtagtaaaaggacagcataggagtctagaatcagagtcctgggttcaattcctggctctgcccccttccttagtttctatttcctctgtcccttagagttattataaggatttaatgagataatagagatgtagctatggacacagcagctggcaaatagtcaataagtagtcatcattgtttaaaggctctgagaagatctgcaactggggaacctgttgaactagactctcttgttggctacagaaaattttttttttttttttagacagagactcactctgtcgcgcaggctggagtgcaatggcatcatctcagttcactgcaacctccgcctctcaggttcaagagcttcttctgcctcagcctcccaagtagctgggatgacaggcatgcgccaccacacccagctaatttttgtatttttagtagagacagagtttcaccatgttgggcaggctggtttcgaactcctgacctcaaatgattcgcccacttctgcctcccaaagtgctgggattacaggcgtgagccaccacgcccagcctatagaaccattttgttgcaggatattgtgtgctgtaccatatatattggggaaatattacttcagttactgggggtgtgggtggagcagacattattcattgcctaccccaagtccatttgctgtcttttttcttgctaatagaactctggttatgttcaggattaggccaaagaaccttggatgtcaaagcaggtaggtcagacttggtctagatgtgggcgccttaccttgttctggccagtgagatgtatgaaaagtctcctaggggcttccccatgaagatattgtcctccataagaagtaaagaaacatttgcacctgaccccacccccactgccaccacccccgccccagcttctgctttgaacgtagtgtcgtgaggacaggacacttggctctgctgccaccatcttgggaccacaagagggaacccccacagagtcacagagacaactctggggtccccaatcatgtccagctactgaacaaccgtggaactgtctgttctccaacttcttgagagaaaacgaaccccccgtttgtttaagctgctgctaatggatttccatcacctgcatcccagaacattcctcactgatccagggtcccagttctctgttccgaattaaaatcatcctggttttctccatttgtctaaatattctctggttcaccttgaggacagtgtctgggcattgcaccaggcagcccatacccctccctggggcctgttccctttgtaaaaccatgactcacctccgaggcccttgctggccacacaccttcattccagagaggattccatgagccatccctctttgtctttcttctctctcatcta

SEQ ID NO: 1884863 - DNA, 4001 bp, Homo sapiens
atcaaggaaggatggtgtgaagtttctacagactttctggtaagtgattgatagatgagtttatggtgtgattgagtttttgctttgagtttatgcttagtgattgataggtgagtttatgctttgtcaggtaaagcatttaactgcaaatgtattatgtttacacaaatattcttaattggaaatagtttctgaatatgcacctaaaaatgttcttatgaaatatgtcaggcaggctgatttttaacttgaaaacttctactttaagaaattgtttgggtcccatcgcctataccatgtagaatagaaacaaaaagccagttatttaatttttaatttgcaattaaactcttggccaagaggatctgttgtccaaaattacatcgtgatagcttaagaaaaaaaaaatcttactttgccagaaagggaattatacaaggatatctttatgagttgctgccaaattttgttctagaccacggccctctggcctccatgaaggatcaaagtctgggcaaagacaattctaagttgtaggtaaacatgcttttcatttccctccattccttacttttgtcataagcagtctggattttcaggggtaaaggctgatagggttgccagatacagtcattaaaaattgagaatgtgcagttaaattggaatatcagataaacaattttaaaaatatatgtaacacacatatgccaaaacactggttatctgaaattccaatttaactgggcgtcctgtattttatctgacaagccctaactacttctttaaaataatttgttaacttcctacaaaaaatctctaaatgggaggaaaaaaaaaatcccgtaagttgtctgggccaaaagcagaagtggctccatggcagtcagccttctccctaacttggcttaaaaagaaaaagccaaaaccagaagtcccaaaagcttgcgtttaaagcgggctgtgccgcagctttcccgcctgttttctgcggaatgtagcacggcagccaccccgcgtgggtggggctcgtatggttgtgtccttgctggttgggaaaggaggtgccggaaacttcaaaccacggccagggtacaacgtgtccgcttaggcggcgatatgcgccgccatcttctttgcgggcaaaggccgaaaaaagtttgggactccactcccccccgctgagccgatggagggcatcgcccgctgcctcagcactctggtgacgtggaatcggggtcccctctttcagggctgatttctggtagcacgctgacgcctgccaaggcagggaaaggggacgccgcctctgtcccggatgtaagatggcggcgcggggggcggcctggcggggcggtcacgtggtgaggagtagcgcgcgagcctccttaagtgatctctaaggttcgtccggacgcacaggagcagcggagcgcgagacgggtcttgtgtccgcacgcgtcgagtcgtcgcagtcgccacccgggccatcgccgggcccggtttcactgttaaggggttttcgtttgttccgttttcgcctcctgtagagctgaacgggaattccccgaagggtgctggggaacgggtggcctggggacttcccggctatgccttggctgctgtttggcggagccggcggcagcctctgcgggatgcccgccggcgattatcggcgccgagagcgggccggcggcgggttcgacagcgcggcgcgggtgggggcccgggtaccggactcggccgcagcccagcccccaccggggactcggagcagggaggggcgcgagcggcgcagctcgggacgtggcggcagctcctagcgggcgaagcgcgggagcgctgctcgctgcctctcgggggcagtccagaaccagttggtgtctgactgcgcttttgccgcccatttcctgctttcgagcggctgaggcgacgcgctcccctcgggcagtggagggagcggctctctccgcaggacaccgccgcttttctctcttcagagcggtggctgacgtacagaacgccggctgtatcacccgggcgccggcgccgcctctcatccccgtagctctcggggcgcgccgggagtagccgagccgctgggtgctgggcggggtctccgggcgcggcgcggggggaaggcaaaggaaaagaaggggcggcgggccgacgtcggcggcgaggaaggacggaggagcgccggagccgctttgctgccctccgcgtggtcccgtgcctccccgacaccatggccctggctgaggtagtagtttgtgctgttggtcgggttgtgacattgcccgctgtggagataactgcgcaagctactgccttgctagtgctggtgatgctcagcgccgcggaggacaatggctgggaatcccctttgttttccggggcgctgcctggggacagcccgcgaagcctcggcgcccggccggcgcggccaccacggaaaccgttagtttcacattttcctagaaggaattgaggggagtggggtggaccgcgatgcattttaaaggttgggaaagagctaagccattggattccttttcttgaaggaaggagtggaattgtgtaagataattgatacagataactttttcaccctaaaaaattctaacacttctttcagcagttaaatgccaaatttagtgtgtacctgttttacttcattctttagctgtaggttggagtggtgtgagcgatctgcagaactggcattagaggggcagaagaagtagacctgataattaaagtttatgccttaacattttagatctggtttctgatatgctctcttagtaaatctgagtgtgtctttaaaaacgtaaacccaaagcaatttaaagtttctctttaaactttgcaactcgcgaatgagaagattgaaattatttgtaggtaattgcactattccgattttttaatgtatgaggcaaacaaataaattctatgtacagtgtgctgtgaatggttttgttttttgttttttctttttagtttaaccttggggctcagattctgctggtgtggtgggttggttttttggtttttatggcctttgattctaatgttatgtggtacttacatctttgaggttttgtatgggagaagaggactaggaattgaaagtggtttctagatttgagtttaaaatctactaacactcattttgattcctgagtggccactactcctaataggaaaatacctttgcatagagaaaaaaggtagtttggataactaatgaaaatactcagtgctctaataccctgaagtctgcgtggaaaacaagatacttgtatttttattttattttcactgagggaagtaagtggtcagttttagtacttttcgttgaaaactgatctgtatttgtacagaataagtagttttgaatataatgtaatcgcagttttctatggttttctgatgctcagttgaaaaacaaataaggcagttctttaaaccaaccaaacccttcagcaggagtttgatgcttttatcattcaaaagtgatctaatatatgtgccttgattgggtttggtttagccttgagaataaccttacttaatctgatctcatcaggatggagccgcctcattgtgggaagggcggtgaagaaccttatcttgaatcttaagatgcagaaaatgcttgaatgttggctcttgaagtttgcttttcttgatagcaacgcagagtaaattcagggctttgttaagtgcttgttttcttaaataatgaaaacctctgcggtgctgtgtcaaatcttggtttatggagaaactaatcataacatgctaatttcattatgattttattttccaaaacacttcattcaaccaaccgaggtaatcttccaacccactacactctaacatttttatggagaatcaacggttgttaatctgcaccccaaagtataacaaattctgctggtaatttaaactttaagcggataagcacaccagaaatgctcaatgtcctatacaga

SEQ ID NO: 1884864 - DNA, 4001 bp, Homo sapiens
ctgccctgatgatggaggcatggtcagtgggagatttcttgaagaagtacctttattgtaatgaagatagcaagactatctgtgtgttgggaaaaaaaatgtccaggggtgtctcatgtttctgcaagccttgtcaacaaagagacttttatttgggactgccttccaagaatatttgtatggtgaacttcttggaggttagaggtagcgtgcctctctcaagcagagagatttgtttcttaactaggatactaaaaaaaaggtttccttctaaggaaaaagttgggcaggtttccttatagcctctttaaaagcttgtagtttcctaagctcggggtttttcacctttggtgcaaaccgactgcgtttgcagcatctaccttggccaccccctaatgccccataggatttggaggacaagaagaacctacatgaatattggagctgatgctgcttgctgtgccatgagtgataaagtcctctgtgtctgactcaggaatctgtgtcttctgcaagaatccatgcaattgtggcggctcccttgttagcttggaagcagacaaaacttcacacccttaatcattcttaacatggtgacaatattaaaattatttcaggtttatgagctttatttttctcagtggaaaacttgggataaaaattctaacttcacaaactcattgtaagagacaaatggaaggtcataggtgtagcagagatggttagctattccctaatatatgttctctctctctctcctctaacatagaaattgtagtgtgacaaaggctaccagactgactaaaacatctcctagcctcgtttgcagctagctgtgatcaagcaataaagctctgtcaatggggtgtgagcagaaacacaacttgcagatgatgctcttgcaaggaaggaaaattctctccccttcaccttccctccttcccattgcctggaatacagacacagtggtaagacatcttggaacatttggatgggaaacaccctacacatggcagagcactaaaacaaaaggaacctggagcctctgtcctcttgctgtcaccattcaagtcctggactgcaaatatacagactgtcacatcagaaaaaacttcccgtcttgttagagccactcctatttggcatgtttattgaagaaatgaactggtattctaatgaatggaggaatgagaagatccgagtgagggattagaaagatgctattggtgatggtagagaaaagaaaatagagccagataaattaggagggagatcacctagctgccaagtaatgggttatttttcagaggttttgaatgttggcaaatctttaagtcttacctggtctgtggactcttacaagaagtttgaattccatagtcaaattaggaacacactgacttaaacataattctttattataggtagtacaagtgttttcagcactaaaagattttatgcctcttaaaagagagggctgaaaataaagtattcctcatacttatctgaaaatgagacctttcatctaaaactagtgttcatggccactagaggacacatgatccaatgcctatgggatttaaagacgtctcccagccctcttagaaatttgtaacctgcagtaacacccaaatagtcaacaaagcaattcacaaaggtatttgtcagataggatgaaatagacatgtgtgcatgacacatacacacccttttccaaaccagagccaaaagttgcagatacaccagaaaccatgcggtatcaattttcccctctaaagagttcagctttgtttttgttccaaggtgtgaatgaatagcacaaggactgaaaaggataacagttcctaccttgattccacttgaagatcttcatgaagaaagtccttgctggaacctgagcagactgaatactaatttctcttagcaagacattacactgcatggtggatggccttcttgctcaggaagttcatgacaatccaagaggcaaaatgaaaggaggcagaacagagcatgtaaagtcagaatcttgtgactttggccctgagagtgtttgatctggcaggaactattttccatgagtaaccgagtcctgtatagcacttatgggatcaaatggcagtataaattggatcaacagttaatgtcttaattctctccatgaccaatgtgaggaaaagtaattctatttaaatccttcatagaaaaatacttcatgcagaatcctggggggaaaagaattaaaaattgtgatctcatgtcaaatattcctgcagttttctcaacagtacagttaatcctttgggctggcaaaagcaggttttctttcattattttggtctgtattggcaacgaagttattaggtgcaaaagaaacacacacagagatgtcacaccacacttgacactgtcactgtggtgacaaggttttctccagctgtcagtgtcagaaggatttcattctgtttgatgccacacggttttgtggtgagaagtggcaggcaagcccttttattccttgtaatgtcttcattaataatagcagtcatcaattaccagagaaaaggagtacaaaataaattgtaaacattataacctggggtctttatggaggatcttttatattgtttcatggaattggaggtgaattcagcaataggatttttgaactctggaaagatagggggaagcttccatttcttatatgcatgttggtcacataagacatcagtctgtgtgcacagtttcctcattttcttcaatggtctgggtcattacttacccaacaatctgaaaaaaaagtacaaattatgtgtctaagtctatacaatgagaaggtgacttctttttaagagccatgagaacttctcagaataagaatctcttttacaaaccagtggaaatctatcaatcttagtttgggggataccaggtaaggtttcttctttgtagggtttctggagcttttaatgagatgatgcattctgtgaagctttaagggaaaaagaaaatatacagtttcctgagtttgtttcatcacagaaacatttgttatgggcctagatagttccatgaaacctctattttggaaaggctaaaggaattagttaatccattagcttttatatctaataagcacatactgtgcctacaaagaaacaaaagttttcaagaaacgccctcttaacctggcagtcggaccaaagtccacattcttggtgaggaagttaggcctaacaatgttttagcagagatataatttgatccttgggactatttaagaatacagcagtaaaagttgcttactttgagctgtggcagagatgggctgcaggatttgtgcaattctcatctcactggttggaattctcttctctcctatttgagaaaatacagtgtgaaaaagtcacgttcctgcaagggtagaactcacagtctctaaaatatgacctagtgattcaaaaagattggtactttgctgtttgacaacatttttcagtgaaccatcacactttaaaatagccctgtatagagccctgactccaaggatcctgaaagtatcccagagaggcttttaccattggtgggtgtgtgtgtgcaggcgtgcatgtgcaaattcacccacatgtacaggctctggattagaggccgggaggagaatccagagaaggaaaaacagaccacacctccccgaagtcttcaaagctggtaagaattcccaagacagcagttcttttgaagctccccacatgccgttttatgggtttttggttttcaaattaacatagactatgaacaccaggatttagcctcatggatttttgccctatgctatagagaagtcttcacttggcatcttggtttactgcctgtgggaaaatatgacaggcaattataatgtccttttagttataagctgaagtaggagtaatattttaaaaatatataaagcaaatatagaggcagcttagcatagcagttaagaatagagattctagaac

SEQ ID NO: 1884865 - DNA, 4001 bp, Homo sapiens
taaaagtaagaaaatctagtaagatagttaaaagaaaccaaactaccaaatgggcaaacttaatcaacattaccaataaagatgaactttttgatgcaacaggacaatttaaaaaatataccatctattggtaagaactcttactataagaattcttactatacaagcctttaacaaatgctagctcattaaatacctagagtaccctctaaggtaggtattaaaaattttttaacaaatttataatagatttggcacaaataataggacaattaaaggcttgttcttcaacccggcttaaagtgaattcatcctaaacaaataggtgttcagtgagagtcaaagtaagtagtatcaaatattgaaagtaatagtatcagtgtattttctcctaacactcctaacccacacatttattatgaaaatgtttgttgttctatctcttccagtaaaatactcaaggtaataaaactctcatatcagacttacaccctctggaagtcattccatagaggtatattcaatcttttaacacaccatcttatggttgaagatgttaacatgagaaggaggagaaagcaggaagaggaagggactatttgcagaagacggggagaaagaaaggaaagacactagtatgtgttgttcctcctcgaattttcctgaagtgaaaaaaaaacagtgaagtagagtgtttgatgaaatgaataaccaagcaaaacattttctacctacaccagtaccactaggagttgaaataaattcacacaatgtctgctgatatgtcaaaacaccttaccttcaaaaacatgacagttaccttttattttatagtatgcttgtgtttcttcctatttcttgcttttgaccttcaatgataaatgtaaactggattacagtgattcttttgtaagtaaaaggtgactttttaaaagaaacaaccaatggaaatagaaattttatttacttcaaattaactgtactttactcaaatagaaaagaataattttcacattatgaagctacacaattccaaaatacacatgctgaggctctttttaagtccgaattgtctagtaattacaaaaaagtgaagagtttacagatatacaaggaaataaaggcgaattattgcaaagaaaacaagtttaatttcactttgaatgacaacgatttttctggaaagcagatacttcactcctttaagtttccacccaagccacaataatttcaaacggtcttgcggatgacccagctggtcactcttgtttatgtggggactggaggtaatgagagccaaaaaaagtgctataaacctaatttggctagagcaagttcacacgacacgaccgtgctttaaaaacttgctctccattatgtacttccttccatcaggttggggaaaaaaaaatggtggggatggtgagtaaacacaccagtggtttcatcagaggggaactcactactcaggaggtgacggtgacgtggtgccggtccctgaagtacgcgcacaagctccggaggttgcgggagctgagggaggaaacagggacacgatcagattcgctccaggtggcgggagtgaggaggggaggagtgacgaggcggacgtgcgggggcgggggtgtccaacacaaacacaaacacaaacacgaacacgaacacgctcagcgtccccggggagggcggactgaagccacctcaccattcatcgcccctggaccccgcagtccccctcggactcagggccagagccttctgcgaagcaacctagccccagggaaacggtagcggccgcagaagccccgctctctgtaacggccgcggaggagcagcaagcctccctgtgagtcggtgggagacaagacggagcggcggtaagggcggtagggaagtgaagcgcctctctccaccttgttagaagcgcgctgaaagcggcctgcctacccaccccatcgctgccgttttgcagtcgtcgctcccaccttccgctgccgcctggagggaagccggagcgacgggggtcacggcggcggtcagagggtaaaggtcttgctcccagcagcctccgcggtggatacgtcgccatcttggatccgcgggacaagaaaattcatgcggtgagtttttggtaaattttcggaagtctggcagcggggcgcgcggcgggggcggcagattcggggcccccgcaaggcgggggaatgccccggggccggtccggtcgcgcccagggtccgccggtagcgtcccggcccaccgcttcccgttgcttttgtctcggctccaatcgagagacggagagcggagcgggcggggaggggggtggcggcggtggagggagggagggggtgtgtatgggggtggtggtggaccggacgtaaagcgtcgctgtactcgggccgctgcagcagcagcagctccagatcctaggcccggtcccatccgcgagtggtggggcttccccagactccactcccctaggctcccgccagcgcggaggagccgctgccgccgcgctgcttcctgggggagaagagaaggcggcagcggccgtggccgtggccgacgagctcgagcccgctttagacggctctgccgccttcccggcagctggtgctgtctgtggcttcttaccttctctcaatacacgtatatcatctgccagttatgtgtatttctgttagtgtgtttgcaagtgtcagatgggagacactggactggctaacgggtgtcaggatcctgcaggccctgggataccgaaggctgtgcatggtggagggagaaggaatgcaactgcgatgccgcctctgccaccgcaccaggaaggtgaagcttccgtagtgtcgtagactgagtccggatgatcctggggcggcggaggaaccacagacgcttctgtctgtgaagttgcaagtcctgggtttctacttccgcaggggcctctccaccttttgctgtcgtaggtctcgcttaaaagtttaacagaagaaaagagtagggttaaaagaggcctttgtagttcttcattgaagcactgttgtctgtccgggtgaaagctgataactcttggtaactgtggtccttagcaaaagagaattggagttttcttttatacaaagtatttccaaggttttagaccttatatttattccaggcctgtaggtacggtattactaccacaaaagtcttacattaagggtaccaccctctcagagggaacctaaacatcaacttccttcgaatccttggagacatcttcacttttcaacatccggaagactgagtgcaacatattttgtttcattttcataaaagtcttggtcagagaatcccactccttttaaaatcgtttgggcaattcctcataattaagtacactgctttgaacccttagttcttggcgaaatggtaaaaagtactcagttaaaatcagttcacgagggaggccaacttgaatttaaggttcaaagttgaacatatttagtgtcatgcttaatattaggaatttttagagctcggaatcataagtgtgactgttgatttcccttttgaagcaatataaatggaaagaataaagtatggggtgagggatgagatagaaattttaaagtatccatttacatgcaaggttgatgttgagtttgggaatgcttggcataattgacaacagttctttccaaacgtcaatgaataaatctcacaattttgtaaggtaactattgcagattgaaagggttaagaatcatagttggctgaaatggttaagtgtctatattcacatcccagttcattgaaatgttttataatggaccaagataattagtaagctctgtatgttgaatttgtttagtttgtagttctattataatgttaaatctaaagaaaaaaatacaaaatacacttaaagacaaaacatgttccactctactcacttatttcttgactttgtaagatccttactgtaaaaaaggtacttttctctcatattttctgagagc

SEQ ID NO: 1884866 - DNA, 4001 bp, Homo sapiens
aaagggccagatagtaagtatcttaggctcacctctttgtagcataaaagcagccataggcaaacataaatgtgtctgtgttccaataaaactttatttatggatactgaaatttgaatttcatataattttctcatgccatgaaatactattctcttgattttttttctcccaaccatttctcatgccatgaaatactattctcttgattttttttctcccaaccatttctcatgccatgaaatactattctcttgattttttttctcccagccatttctcatgccatgaaatactattctcttgattttttttctcccaaccatttctcatgccatgaaatactattctcttgattttttttctcccaaccatttctcatgccatgaaatactattctcttgatttttttctcccaaccatttaaaaatgtaaaagccattcttagctcaagtgtcattctaaaacaggcggtgggctggactggggccatgggccatcatttgctgatttttcatgcagagcagcaaaactgttcttgctttttgaatttccttgaccactcactgagtttctacagttggcatcattatgaatattgctttctacttaagcatccactgatatctagtatgttcttaggtttggctcgatgaccagaggcagttttcaataacgcatcatgacaattaccagaagcaaatgtaatgtgcaaatatcaggattgctgtcataagaaaaataacacagtgacacaagtcatttttttagaaatgtaaaaaggtatacaagactgtaaacctgaagtcctggttggtttttaagccttagacataaggcaaccacaggattccgtgttaggggagaaatagaaacaataatctaccctttttgacggtataatcaagttgatctcttttggttctgctatttccctgctatctccacaaggctaactaattttccagataaaacagggcttctcacctacttagcttccctaactgtaattttataaagagtaagttgaaaatgaaagtgtggacttcgtctccgggactgttgtcctaattcttttctttgagggaaaatacaacagaattttgccatgcaatgttttcgaaaggctttttatgaaagccagttcctattctgactcactggtttcctctcagtgcattctgcaagcatcacgagatagtgtgttctctgcagtatgcagagtaaaagcgataccatgagcgttttaggtctgtacatattcctttatgattagttacatcagataatctggcgaggctttaagatttttttttttttttcctccaccacttctgggggaagcatcctgtggtgttaaaaaaaaaaaaaaaaaaaaaaaaggctctaagataaatatttcccaacctttccaatagggttttgggcctttgggtatgagtttttagtaaaatttttaaacacaggcattcaaggaatatacacccagcccatcaggagttggcctgtggtccctcgctgatgtatagcaagtgtttcaaactcttgttagcaaagatggttttcggtgtctgtgcccgggagatggccttccgctacgggagggcaggaggtggccggggagctgtccccgctcactaacctaaccgtggttcggatttctggcctaaacccaggcatttgagcgcctcatagctcgtggggaacctgacaggcaattgtattatgaaagctgacatgctgaatggacccttcttgacgatattctttacctgtctctttgtgttaaagtggggacaagcaaagtagcagaggagagagtcgaccgaggcgggagggaggtggcaggtggaatgaaatatcgggcagtttcatgtgcggagctgatgtcgccggcataacaagaaagggttgcacagaacaaatctctattgttccctgtcatctttaaatgagtgtcaaagtaggcaggggggctttgaccgttaaccgcacaatttagcctgcctgttgtgtctcgcgggccccacctccttggagtttctcagattagaaaagaacgccccagccccttataaatgggccatctcttgttctttgtgtccggactgcctagtgtgaaatccacagtgacgttaaatgttttctaatgaataattactgaaaggaaatggagggctatatgtgtaatggattgtagcgcattaaaatgttttattttgcgcacaaaaatgttgtccttcacaagcaccatgattgttgcgaaaaggcctttgtgcggacctgtttcaatggattatctgcaagcgtttccatcccaaatgggaatcaaagggcgtctttggcaaactaatgtttttcaagatggcagccatgaaacgcagttagtatttaaagttgtggagtttaaaggaatgtttgaactcgggagattttctcacttactttcccctcttttgatttgggaaagtgaagcgactccccgcgacctctgtcctgttccggcggccggacggtcagccctttacaagattcttggagcctatttcttaggaacaagcaagaggtcccaggaatgggtagctggcactttgtcttggctacccttcttttttctttttcttctttcttttttttttttatttcctggatgtatgtggataaatatgagactgcagggaatttcaaatgtcacctcgttgtgaacttattcagagtttcccagtgggttttactggggaacgtattgggatttgggtggctattcattgtctctctaaatactgagacccttgagtttgtgtaccagctctaatcggtttatgacaaaattaatgggagtttctggtgcctcgtgaatcaatgcagagatgtgaacttcagagtttcaacgatgctttgttgccaattaggcgaccactatagccagggtctagcctgccccatctctcttctctgtctctgtctctgtctctctctctctcttcactaataatattgaggactgaagacaagaatagctgttgttttctgatgactgtaggctaaatgttttgtgaaacacatagttttctaacttctcaagcatctgccttcatgagggtagagagtaggtgtgtttgttccatggaaaatatttccttggtccttatggaagatgtgtgaactggagtcaaaaaaatctatagtcttgctctttctccatgagaataatcatactgaactccataaagaaaaaaacaaatgagcatttctcaattgtgaattagagaggttaacagaaataggtcttgtttacaagactgcctaaaatcttggttggtttttacgttttagacatgagacaaccacaggattctatgttaggggagaaatagaaacaataatctacactttttgaaggtataacggagtagtgatagagtctccttcccaacctatgaacacaactcacgtctgtcaagttgttctcttttccttttgctatttccctgctatctccacaagtctaattttccagataaaataaggcttctcacctacttggcttccccacctgtaattttataaagaataagtgaaaaatcaaagtgtggcctttctctgaccattggaactgttgtcccaattcttttcttggaaggaaaatacaacagaattttgccatgcaatgtttttaaaaggcttattattgtaggacataacccacacactgaaaagtgcataaaataaatgtgcaacttaataaattataaagtgtacacccatgtagtaaccatccaggtaaagacatagaaggttctagcaccccagaaacccctcatatacctcctccacttaactcccttcatacccactaaagataaccactatttggattttcgtgactcgtttttgagtcatttgctgaggacttaccccccaaaaaaacttaaaaaaatcaaactagtttcacaaagtgaaagcatctagatgattctaactggcatagagatgagcac

SEQ ID NO: 1884867 - DNA, 4001 bp, Homo sapiens
gtgggagattagacacagtaaaagacacaaatcgtatttgtccctcattaatgtaaagcaggggaattgccctgcaggtttccatgtgagaatatgttatgctttatggtggaaggagggtaaaaaagtcaaaacaaccagactttacccctagatttaactaaggactagctcgaccacattctagttgtggggcatttaattatgagctcaagactggtgatcagtgctcttattataatacctactccacaagtgtgtgaagaatcaagtgcctagcatcctgtcttgcgcctcggaggcactcaatagacaggagtttaagtcattgctgagaggaagataaatgaacttatgacttctctgcaggtcaagcaactcactataccgatggcttcaaccttcccactgcatcatttcttcatgttttgcagatcatgagaaaatgctgtcattagccaagtcagattgtcttctgaaccttaggtcaacaactctgccacagaaagcctgctatgggcataattgtgaaattaaagagaatttctgcaatctcagatggcactttctgtcctccttctggtcccaccccaggtgttcttaatgaacaatcagctgtcggaaagctgccctaattctgccccacaggaaagaacaacttcttaaagtgtggttctcaaactccatgtgtcagcatcccctcagacgccacagggacaagcgagtgggctgtcgagattggaacatcctgaaaactgctcaaaatattccacatgaaaaaacaaagaagtattttacctgtgcggggataggattgcagacccacaggaagtttttctccactctattatcacagaaagggatgctctgagaattcatgaacgattggggtttctgttctgcatttttaaaaagagggagtttgaaagtaagagaacattaatccgatggaaatgtgttaaaaattgataagtaagactggagcatttgtattttgtgtaaatctctatttgttttatgtgtttaaatacccaccaacagaaaaacatttttaaattaaaagaaaccccactatcattttaaattaaattaaaagaagtcctgcaagtttgtgaattgttaagagctttgaaatatagaatttgcagaaacacacatagctgtaggataaagaacatgatccatcagagtccgggtcaggaaactagaaagcatattataacagatggaatgtattataaattaattataatcagttataaggaattggctaagctaaatagagaaggtagaataaagggaagaaattgcggttccgtcccaggtgttcctaatgagcaatcagctgtctgaaagctgccctaatcagagaagatgcccggcagagccattgtcagactcggaccagatctctgaggagagggcactgcctggctgctatgggtaactttgcagaaaaagtgtagaaagaaggtggagactagaaccagaccaattgctgctgccaagagagggcggttgttgctggcggatgccgctgccaggaacagggacttctccttccctccctccctttctagccttccagcaagcatccagtgcctccctctcagagaagcctcacaggcagccaaaactctatttcctatcatcccagccccagtgccataaagctgagtaaggaaaggtgggtttgaagtagagagacaatagcttcataaaccagcacactgtcttcttaggaaacccttcaagtaaactgaagtagattaaaaaaaaaaatcacagcagatgcttcagctggtaactgcagtttgcaaacaaagaaccgcactgctgtaacccgagtggggaagcctctgcttatgccatagtgatctttgcaactatccatgcacacaaataattttctcatgtatttactcacccaggaagtatttactgagttccttctatttctaggcatttcctaggaagtggagtgggtataacagtgaacaacacaggcaaattccctgtccttgtggaggtgatgttgtaacaggataggcagacaacaagcatgctaaaaatagccggtagtgctaagtgtaaaaagactgaagatatgtgggaacaaaggggtatccaatccacttccttttcctaatgcaacaaacacataacattttaataaaaacaactgattatgctagctcacatgggctaatattttacattaactttctttcataagccatcatttcatctgtcggtggttcatactaagcagcctggctcacatcatatctcttaaaacaataagacccagaaccctaagattcaccacttctggtgagagccaaagtacatatacatgagctccagccctgcacactgaggtggatgagcttcaggacattctctttaagactgttcttgtgtcccagacatagcatgtaggggtctgaaataatcctcaaagagctttaatgatgaactttgcaagagaagatatttgggagaagtagaaaaccagaggacatgtttcagagactggtccttcttttcaaacttcaggggaaaatcacctacttgtatcttagcgtatagttggttgcctgaatgaaataatttcaaatgatggttattctaattctgtcatattttttactttaggcaaaataaatattacaaatgtcttgactccaatttgttttgcttcttcaaggcaccataactactgaaatattgaggatataaatcaaacctgttgtgtacatatttcttgtggtgacctatgttagaaaaataactgaggctgtagcatgcatttactaatccttcatttaaatgccatgcagcagctgcagattatgtatactgaaatgatgatcatgctgtggatagaagctttaattatttggggatggggattttttaaaaccacacttctcagtatgttccttcttatacctaacattaaaacatttttcactccttttctgaaaatctaataatactggccactgtatgtaaatgacctctaaagtgacgcatgctttcccaagtgtggcacaatctctggtttcacatagctggcttcactcagttccatcacctacttgcctttggaggcatttgagttttgcaaactctgtacttagtgaatagctcagaagagatattaaatatgtttaataatcaataaggcatgggcaataaataggtgaggtcctagaagtccgatgcagtgttaggcattagcccattaacttctaattgtgagaagaggctaagttgaagggatatgggggatgcctagggggatcatgacaggagttattaacccgtcatttaaatatcaatatctgaactacctatatggccgtatcaactgaatatcagatctaggtgtgtattcattaggtgaagaagtcgtgaaactccttcgtgagtttaaaatatgaaagataattttgacataaggaaatatattgaaaaaatctgagaggtgaagtgaagaaagaagggatggtgccttcagatacacagaactagaggtagaggaaagagtatgtgtgcgtgtgtgtgtgtgtgtgtgtgtgtgtgtgtgtaccaaagcctaaggaaagcctgaagagataacaaataatattgtttctgaaggcctgagctttgaactttgagctgcttaagatgctacatgtacaaaacagctgatttctcctttaaaatggataagaaaagcaatgattccctcaacctggttcatagtcctgaagtagtaatagaagaactaggacaacaggtacctctatcagatcccttatcccacttatctgtctctttccactggactaagagtttctttcatctttgtttcccaaaacctaagacagtgcctggcagataatgtgccttctctggctcccttccaacctcagaatgattcaggctttctttgtgccagtttatctggctcaactggaaggtctttaagggaatgggccatgttttca

SEQ ID NO: 1884868 - DNA, 4001 bp, Homo sapiens
agagtaatttctattgattgtattatttattcttgtggtttttcttttcatatttcattaatttgaattcttttggttatatagtaaatacattttaaaatggcaaaagaatatccttcacatgtatctacatcaagaatctataatttctctatcgttttattgaaattttccaaactgtttttctaaattacaattaaaatggaatatcttcaacacaacttccccttgtttcaaagtcgtaatgcccaaggccattctaagggaaagtatgaaggaaagccagtcatagtggaaaatggtcttgacaggattacattaaaatttttcctcctcagctttattaaggtataattgacaaatgaaaattatattaatgtatacaacatgataatttgagatacacatacattgtataataattaccacaatcaaattaattaacactttcttcaccacacaattacagcctctccagtaactgggtatacaggcacgggccactacacctggctaatttttaaatttttttttttttttttttttttagaaacagggtctcactatgttgcccaggcttgtcttgaactcctagactcaggcaatcctcctgcgtaggcctcacaaagtactgggatatacacaccagaccaggcgtccatacatttttcatgggcttggagatttacttaacttgcaggagaggaaaagtagagaggagaaactgaagcagtagttttctaggcaaacctatctttttccttgtggggtgtctgtgtgtgtgtgaagagcagaaaaaaaaaaaaggaagaagaaaactttggtcttaccactccagcacattttctcttgcatttccaggaatgatttttaatcttgctttcctccttctttttccctaacatcagacctcccagactacagctgcatacactagaaagtaagcatattgaaatttccctgtatacgttataataaaaggaacatttggaacctcagttggattaaggaaacaataacttaatgcgggatccatctgctgataaaatgtgaggtaacacacttctgaatgccaatttgaaggattttttttttttaaggttggggaaaaaaaaaaccgtttgaacacttgaagttgcaaatttttatctgaccaccagggagcagacaaatgccttgaaagaaaggctcttcaatcaaatgaaaaagtcaaaaaccacaaaaggaaaacaaatgaagtgtgttaattaccataaatgaaatgaaaaacgcattttttattttgaaaataaaaaataccagaaggcatatgttaaaacaaaacatttcaaccattttccatctgactatatttaaaggttttctcatccctctatcacttggaggaggcaatgtctcccctctttgaaggcaaacaagtcctacttaatggaaagatgtgccaatttaccgtctactccctggaattacttgacacacgtaaagaaagtaaaggttgcgagctaccatgacaatctatggacacaggcttccttacaagttctctttagtcacagcaaagcaagctgaaaaaaagaagttggttttcagtttaatttagtgtgtataaatgtcaataaagactcagtttactcattggcacattttaaagtaaacaccagtctgtcaattataaaatcaatacaatggttgcataaaattcttgattgtaggcaattttaagcaaattattcttaatgaacaataccagcatgttatatactcaatttcatttaaaggaatcacttcatgttataaaaaaccttccttggttttatttaaacacgccttccccagaggatagagtcttcagtaaatttaagttagaaaattcatctttgaaatctgggtgttagtaacctccattccccagtttttaactcttacttctataatcccaccttcatcttcctggagtgccatatatatatgcttgctcctctcttcctcttaacacctgttgtcacaaacacaattgtgacataatgaccagctttcaaagttgcccttccaagcactgactgcatttttatagagcttgaatactacagtgaaagggtaaaggtctagtgcagaactttaggctcagaatgcggggtttaaatctcagctttactacttaattaacaaatcacttaacgtctctataatttctttacctcttttgtaaaatggggaaaatagttatggaacctaactcatagggctgttgtgacccttaagtgagagagtgtgtccggaatgatataatctcttaatgaatgttagttgtatgtcttctttacaagggaggtttgtaattttttcattttttaaaataattataataattattatttttgaaacagagtctcactctgtcgcctaggctggagtagagtggtactatcttggctcactgcaaccttcacctcctggcttccagcgattctcctgcctcagcctccccagtagctgggattacaggcatgagctaccatacctggcaattttttgtatttttagtagagacagggtttcaccatgttgtccaggatggtctcgaactcctgacctcaagtgatcagcccaccttggcctcccaaagtgctgggattacagttgtgagacaccgtgcactggcacaagggagttttttttttttaaagccccttctttagtgactggaattattagccctggaaggttttcacttaaacaggccagaggattctgaacttggctatgatttattgcccagacagtactttaaaagaacaactgtgcatgacaattgttatgctgcgtagccttgtgcaattcattgaattgtttttacaaatgaacttcttaatttgtaaagaaagaatattgattaggcagacagataccatatttactgtggtctctaagctccttctcaactaagaagtatgaaggtacaatctcagatgatgaatacacatgtcaaacccagtacactcaaaactgaactcctgaccaccctgcccccacattcagggagtacccgcatcttaatttgtggctgctccaccctgccccttgtttaagcaatacttagtggagtgattcccctacttcacgcgttctctcacactcacatccagtctgttaggaaattctgttgactcaaccttcaaggtataaacagtagctgcgccctttgcactgcttccattgctgtcatttcagtcctggccatcatctcccacctgaatcaccatgataacttcctgctggtcttcccgattccaggtcccccagcccccacctggcccctgccctgccccaatctatcctcaacacagcagttggtctccaaaaggagttgctgtctttaaagcaactcctttaataaaagcataagtcagactgtgtcactcctctgcttagaaccctgtaatgaccctttagagtaaaaacagattcttttaagagccttcaaggctttttgtgatctatctctctcttactcctctgccacatgtcctactagccccgcttagctcactcccctccaaccacattggcccctgagctgtttctcaggaacattgggtatgtctaccttaggacatttgagctagccttctctctgcttaggatactttcttcgagacaactgctgggctaattcctgcagatccttcaacacttcgttgggatcttgttttcacagtatggcctactctatctactttatttaatattttcctttgttcgtcagtatttattagcttccaacatgcatatctgtgtctgtatctgccccctgcactagcccttctctttctctcttctgtgctgcttatttttcattgtttccctcttctgaattaaaaactttacaaaggcagagattttaatctgttttattcatcggtgtgcccccacttcctaaaaaactcaataaatatttgctgaataattgaatgggtgggaaggaggaaagagtaatgtgt

SEQ ID NO: 1884869 - DNA, 4001 bp, Homo sapiens
ttttgaatttttagtagagtcagggtttcactatgttggccaggctggtctcaaactcctgaattcaagcgatctacccacctcggcttcccaaagtgctgagattacaggtgtgagccatcatgcctggccctgatttgtattttaaaggaacttcctagcttcagagagggattatcagggcaagaagagacaatgtgggggccaatgagctgctaagtggcagagccagttttccccacccccaggtctctctggcctcactctcttgccactccagcaggtaccctgagtgtcctccccatccctccacacttacctcatctggttgccctaagcaggtcggcatcgcctggaattaacactgcctatgcggctgggaaagcatctctccagtgatgattgtagaagttgctgggtaaatacatatttagcaaaacgagccactccatagtagcctctgagattccacattgcagagagattaagggaggagggggtggctctaggattaaataagatctgggttctaaggcccaggtatgccaggtagcgagagacagaggtgagaagcacatgggctccttaaactagagctgataatgattctccccacttttcttgtttgaatgtcttccattttaagtccccccatcctgtagtctacaccagcttgtcctacagaacttactgtgatgatggaaatattctatatctatactgttcattgtgacagccactagccacatggggctactgaggacttaaaatgcagctggtgcaactgagactgaatttttcattttatttaattgtaattaatttgaatgtaaatagccccatgtggctagtggctaccacactggacagcacaggtcggcacactggggacaaaatgctaagacacagtcccctggaatggacaccttcacccagcttctcagctctaaagagaaaggcagccagtgaaagtagcaaaccacaaacccaaaggtgacctgacctttgccatacgacatttgccccttggcccccaggataattgccaggtttaccacccctttgtcctgtctaaatgatgctgtttcctttcaaagatgcacgcttattttaatgagaacatacaacgctaaattgcatttctctttcttctctcctgacacaattctccttctaataagattttccctggctaacccattttcgcagcagctattctaaaaagccatcttctgattgagctatgacatacacaaggcaggtgagagagcttgaagcacaaagccagagggatataggtctattttcttacctccttggggaaagccagataacataatcaagccaaagactattttcctaacaactgctgtgaggccagctgaccggcatttgccatgatcagtcataatggatgatgttgccagcagacggcatcttggcaatgggaaaggcagacccaggccccactcttctcttgcaggaacttctttagccctgaaaaatgaaagcagagacccatttcttgagcaaagacaagcagaatttattatctaatatcagattgtatgaggagctttcagcccaactcgtgatccgaaagctcttaaagtggtgagtgacagggacccttagcgtagatttttcattctcttattccttatattcattatcaagtgatggcctctttagctccaaaatgtaattgaatccatttctttctcaccacctccaccactactacccttgcccaagcacccagagtaacggcatcaggcgattactctcagtctctcacccacaggaatgaaataacctcctccaagctctccttgcttccattcttgcccttaacacccacctttcacacaccacccagagtaactgcaccaggtaggataggtcacattatgctgcaataacaaataatccccaaaagtcagtgacttataacaaccagggtttacttcttgtttatgctccattcagctgggacatctgctccaagtccctgcttgcaagattcaacattggtggttgccatggcccatgacagagggaaagagttctggagcatcttgcatcagcaatgcaacgttccagcccggaggtgacatctattatttccactcgcaactcactggataggactagtcacatgaccctgccctataataagaaggcagtaagtgcaaccctctcccatctcctgaatacagagagaatgttgaactggaggggatctaagagataatcaagttcaacctgcttgttccagaagcaaggaaactgaggcttagagaggagaggggtttatctgcagtcacagagcagggtaaaacaaaaaagcttctctgctccaaatttatgtgcagtcacagagcagggaacaacacagagcttcactccaaatccaagtattctttcatccatccattaaatagtaataaaggaactactatgtgccaagcatggctgggaagacagaaatgagcaagacccacccggcccctgctccccaagctcacagcttggccagagaagtggataactaaacaggcaattacagccccctgtgaaacatgctgggtgcgcatggtgtcataacaccacacagaactctctctgaatggctctccagtgaattctgttttttggtcttcatttttttgaggtggagttttgctcttgttgcccaggctggagtgcctgggcaatggcatatcggctcactgcaacctctgcttcctcggttcaagtgattctcctgcctcagcctcccgagtagctgggattacatgtgtccgccaccacgcctggctatttttttttttttttggtctatttagtagagatggggtttcactatgctgggcaggctggtcttgaacccctgaccttaggtgatgcgcctgcctcggcctcccaaagtgctgggtttacaggtgtgaaccaccgcacgcagctgaattctgtttgttataaaaaggttattgtttttgccaacagggcagggctgagctcagagcagggctgagccaggtttcccttgtttataaaaatgaaggaatgatgtcttgtgcaccctagcatcacgggacagatttctactaatttcctgagtatggatgagtccactctccccttgcgggtaggtgttggggtgtagaggcagccatgttgcatccaccagcatcctttggttgcaggcaatggattggcaggaaatgtaataggtgctcagtaagtacttactggatgaataaaaaaagaatggcggcctggcacagtggctcacgcctgtaatcccagcactttgggaggccgaggcaggcggatcacttggggtcaggagttcgagaccagcctggccaacgtgacaaaacccggtctctacgaaaaatacaaaaattagctgggcgtggtagcacatgcctgtaatcccaactactagggaggctgaggcagaagaattgcttgaacccggggtggggggggggtggtggggggggtggggggggtgcaggttgcattgagccgagattgtgccactgcactccagcctgggcaacagagcaagactccatcaaaaaaaaacaaaacaaacaaaaaaaacacagaatggaaggaaaagctgaaacaccaggctccagaaaggcaggggcagggcagctcggggaggtggaggaagagaaaggtgtattaagtggcaggaaccaacggaatacatatgggatgtttgccttggcattagtgaactccaatcattttaggtctttgtgctcatgatccaaattcctgggagatagcccctgattggtccagcccagagccaatgccctggtttgcagcagatgctgagactcccacaaccagccccctgcacaggggggcggtccccacttccagcttccaccatctgtgcttccttgcctgagggtactcttgcccacatcctcaacagaaagagttctaaggaagcagcatccccaggagcagcc

SEQ ID NO: 1884870 - DNA, 4001 bp, Homo sapiens
ttttctattgccctcatccttgctcttatatccaaatacccagtagcatgatcaggagcaagggaactaattttcaaatattagcaaagttattcaagggaatggactttctgtggctgcagttggcacgtctttttcagaaagcttgcccgtggctgacagcctgcttggcacagttcctccggagtcctttggtgatggagaacagggctgacaggattcaaatggccagattccacagaggccaaggagggccacagtctgcaaaccaggggagattgaggcctgagaagggcatcagctgatggaaatattcactctaggaaaacgaggtgtagccaaagagagtcatttaggagaagcagattgaaagcagctgtgaaaaatcctgaaatgaggatatggaatagtgctggccacctccgcatatgcccacatggaaacacacttaatcagcagagctgggcctatgtggagatgctgagccggaggctcctaggtgttaagcacttttctatgtgtaatgtggtggaaaccaccctagacttttcagcgcacccaaagcaatagaattttaactgggagggaattatccagccagggactagtttctggcttcttttggaactcagtgtggttgtatggctaagctctcaccaacagaatgtgagtggaagtgatgtgagccactctcagacctgaccatgaaacttggctcataggctcctccataccaccccacctccgccccaccttcctgcttggctggaatacaaaccttgcagtaaccttgtgagcaacgtgctgaaaataatagaactagcatctcctgggttccttgaaggatgcttggagtagaaggcccaccacctggcctgttctagactatttacatgaaagagaaaaaaccttttactcttctcaaggcattgcattttgggtcttccaattggcacagtttagaccatgttaactagtatatacaataactgggcaaagtaggtgatgtcatcattttataggctaagaacctgcagctctgggaatttaagagatttatttatttacccaatatcaggatacgaatgtggagtcattatttgaactgaagtctgtcagtttaaacatttatctcccagaagttcagacctccagagcaaacaggtagcaacagatgacttgaatgagagagggatctctgatttggctaccatgtccactaactcaagcccaaactcataccacctctttccacagctccagctgctgcactgctgaacttgatcttcatgctggaagaatatgacagctggaatgggtcctaataatcacccagctcagtggttttcaaatttcatttggcagaagaaacacttctaatgaaatctaaaactcagaagccctgtgtgtaaaacagtccaaagcagaccttgtctctttgaagtgtgggcctggaacctggcctgtttcccactcacctccacagcctctgagtccctccaagcaggtcagagaacaactgatctgggtcagcccttcgtttcagaggtaagtaaatagtggagcatgaagtgtcttcatcaggaacacacagaaggtaaaaggcagggtgggaacaggaacccagccttctggcttttgaatttaggaatctttccattgtactggtgtattagagttctgtagagaaacagaaccaataggagattagatagatataatacaatgaatataccataattatacaaataataaaggattggctcacatgaatttggaggctgagaagttccatgatatgccatctgcaagctggaggcccaggaaagctggtgcctccagtccaaacccaaaggcttgagaatcaggagttctgatgtccaagatcaggagaaagatgaatatcccagctcaagcagccaacaaatttgcccttcctcttccttttagttctattcaagtctgcaatggattgaatgaggcccacccacattggtgaggatgatctctttactaagcacattgattcaaatgctaatctcttttggaaacaccctcacagccacacctagaaataatgttttaccaggtacctgggcttcccttagcccagtcaagttgacacaaaagattaaccatcacaactggatttcctcttttgagataccagcccttgaaccagctgcagattcaagatgcccagcaaaggcagaatggcagaagggtcagagttacttgttatattaacattttgatttctgtgtaacaaataactgttaagcacgtgtttaattgagaagacaacccaagcaggctaagtgtgagcaacaaggcttgtttattcacttgggtgtgagccggctgagtccgaaaagagagtcagcattgaggaatgaggaagagggggttttataggctggggtagcaagtggaaagttacagaaggttacagctgggggttggtcgttatagatttggagggatggttaaccggctggaacaggaacttgctgtttttcttctttgcggtcattcttttgttgctttgggcctctttgttccagggagctatctggaggtatacgtgctagtcacagagttcacttctggaggtgtacatgttggtcacagagttcataatggcctggcgatagtgcagccacacttagggagcctaacaattaccacaaacatcatggctaaaacaacacctacttattatgatctcagatgtctgtagtctgggtgggctcatgctgggttctttgctcagtgtctcacagggctgaaatcaaggtgttggctgagctaggttatagtctggaggctccgggaagaatccacttccaagcttattcaagttgttagcagagttcagttcagttccttgtggttgaaggactgcaattcctgatttttgctggttattgactcttggtcactcctggcttctggacactgctctcttgaggtcattccctataactccctccatgctaccaatagagaacctctttctcatcaaatccctctcatattttatttatctctcacttccccttctgccactagctaaagaaagctctatagcttgttaggttacacccatctggacaatctccctattgcaaagtcaactgattagtaaccttaattacacctgcaaatcccttttgacatgcagtatagcataatcataggaatgacatcatagggttaacggcatgggggcctgcttagaaatctgcctaccacatttgcatagttacaactaactctagaacacaccaccttctcttgaggcctctgagaacaatggtaacatggttctctcctatgacctcctaacagcttttgccaaattctttctgctagcttctgggtaggataaaacagcctgattatgcattatttctaatttaacatggtttgtgaggcaaagcaggtattagactctgtagggtgtgttcccagccttagccctccctacagcctatttctgtccacacataggaaggcaggaggcaggcctgaaatcctggggctatcagaaaaggtggggcggcagcggggagttctctgttcctctggtggcactcacaaaacgacgatcagaataatcttctccctttgtagatgactccagaggggagacaggatttaaccaaagctaactagcagaactagttggagctcttagtttggtgttctttctgctactcacagtcaatactagagtcagctggtttctctgttgattctttgccctggcttctaggtgatctcagaaaagccttccacagtgtcttcagtttgtttcctgaccctggcccagcaggtaggattgctggctatgttatctaggcctaggaagcataagaaattgcctagttaaggcatcatgctgacagagtctgacagagtaccccagagaagctgcctcccactagctatagaagacaacagaggtaagaagacaggcagggcttgaaaagatgttg

SEQ ID NO: 1884871 - DNA, 4001 bp, Homo sapiens
tccccattatctagggaatgggcaacatggggtcactatctgaatcccagaagtcttcctgttccttactgattgtgcagatcagggattccatgggagaggcctgactgcaggggccccactgactgttctgcatcatgtagcatgccttttggatgagaaaatcagtctgcttcctgtaaggtattcagggccacccactgtgcctctagttctatatataggctccttccagctctgtgatgagccactgcaatgtttagttggacccttaagccttgtttgtccattaggagataaagtttcccaaaaacagtagtttagtttccttcatctttgcaaattcagcatagtgcctataatagagtgcatattcaaaggcatgaatgaaggaatgaattagacttttaaatatactaaggccacttttctagaactgcttttatataactggtgaggggacataagtaaaaaggagtaaaagggtgttttactcagctgtttaaagcacttgtaatgctaaatcatggcatggtattttaacaacatgacattttcataataggtaaattattttttctggtgccaagtgcctattcaaaagtcttgtcctggtatgttaaacaagatacagtaaatatggactatcagaatataagttttctctaaaatgcaatgtgcacttatatttttgggtgaggtagctaacttctcatttgaaagatgaggtacagtatatggttaacttgtaaaacagaaattcacttgctttataagaacgaaatctcatttaaataaaccaggtttcttaggcatgcttcctttttttatatcaaatgttctaggtttttttcagcctctttaaccttgctatattctgaattcagtaatttccatactatgcatggtttcataaaggacacaaatttaaagaaaaaaggtacccatagattgcctcagaacccctttttctggcaaccagcaggagtttaccaggccatcattaaagacatgttttttgggtatatgtcgtaaatctctagaaacattgcttacaaatagtactgtgtagctatacttttgaaactataatgtaaaaagggtaccatttgttgaactcttacagcatcaattaggttgtattatgttcactttagggacaaggaaattcaggcccttatgacattaattactcacccatatcgttcacaagtgttggaagcaagagtacaacacagacctatatggttccaaagcctatgccagtagaaatagttgtacagtaagtgttattcgtgagctaagacaatcgtcctaggcttagcattgtgtctgatacgtaagtgatcagacaggtaaacattgatagaactgaaatcctttgatcattttaccctttaaattcttctctggggtaggaaaagcttgttttctgtttttggtaaccgctttgagtataactgacatgcaataagttgcacatatttaaagtgtgcagtttgatacggttttacatatgtgtacatctgtgaggccatcacccgagatgagaaaatgcacaggctgcaaataaaaatgatctcaatacggcctctggaagaacacctgatctaggctgacttgatctaaggaaatacatgagtatcatgtaaacgctgaggtcagatctaaaggtcggctcggagctccctatctgacaagtagggtcccctggccaggttcactccataggttagtctcggggctaccctgcccacgtccggaaagcggacctacctggggcctaaccttgaccggacacccgtcagcattctccaaatccgacttctacacctgtatgggacggaccaagtttctaggtccgcgatcacaccaatggcggaagctcgtcagcgcccgggttccaaaatcccgcctctcaaggcttcttgagacattttgtctcccggcgtgcaatgcgtccgccccgggtggcctccgcccggaagacggaagtgcaaagacttccggtcggcgtgagcgtgaggtgtgggtgttcgtttctcaggtgagttcggttcctcaccggtccagtgacacatgggacttggggcttgattccgccacccttggagaatttcgtttcttgacactcgctgggctatacttgagctccagtccggagatgcaggccttgttgagggcgagggttccccttgctctttttggtgggggccctccggcttccgagtgcactggataaagtggagcccacccctgtcgttcactcccgctgaagttaacttcggccctcaaggttgtttgccgcccgctttcctagcccctcgcaagggttgagttatgtagacaagggagcggaatgactgtgattgccggcgttcaaaaaatgttagtggttcgttcaacaagtatgcaaaaagtgtgcgattcagcagtgaacaagacctttccctctaccttcgtggagtctacagtctggggagagggtcggggggcgtgacagaaaacaatggtttcaggttgtaacacttaataagcagggaagggagcttacggaggtcagaggagtcctttctgaggtagcgaatgaaggagcaagccttgagaagagcagttgccaggcatagggacagcaaatatgaaggcactgacgtagagatagtttggactctttacagacgtagttggtgcctgcggggatggggatggagaatgaaatgaaatagagttgaaggaggcaggggacagatcacaaatgaccttgtagatcttgaatatatatgagggaggaggtctttaaagaactcgaagaaaggcagtgaatgcttttttaaaagatcacactgagcaccttgtggaggatttagggcggaactgagtggaaagaaaacaagagtaggaatagataagtttacagtcgttaagttggcttgagaggatggataatgaagatgaggtgaagtgtttataaaaatcatttgtaatttgtaagctgttgcataaatgtaaggtgatgacgctgttgcattctggggaaattaaatttctgtattttgtaaagaaattcagccgggcgcggtggctcaagcctgtaatcccagcactttgggaggccgaggcgggcggatcacaatgtcaggagatcgagactatcctggctaacacggtgaaaacccgtctctactaaaaatacaaaaaattagccaggcgtggtggcgggcgcctgtagtcccagctgctcgggaggctgaggcaggagaatggcgtgaacctgagaggtggaggttgcagtgagctgagatcgcgccactgcactccagcctgggacacagaacaagactctgtctcaaaaaaaaaaaaagaaaaaagacatgcaaggtgctttcagaattggtttgatttgtagtttgcttatgaccacaagtttgatttgatatcttgttatttagtgactgtgtatgtaccatgttgatcttcatataagttgcatgttaagtcctaaaaagtgaacagattgaagagttttacttttcacttgttttgtagagatacctgttggcctggttttctaaggatttgcctgttttcttttttatattaaagatttgcttttgaatgtgtgtttttgttaacttcaggtaaaacatggctaaaagcttacggagtaagtggaaaagaaagatgcgtgctgaaaagagaaaaaagaatgccccaaaggaggccagcaggcttaaaagtattctcaaactagacggtgatgttttaatgaaagatgttcaagagatagcaactgtggtggtacccaaacccaaacattgccaagagaaaatgcaatgtgaggtaaaagatgaaaaaggtgagtgtgcttctcctttttctttctctttttttttttttttttttgaggcagggtctccttcctctgtcacctaggctagagtgcagtggtgtgattatagcttcctgcagccttgaattcctgagctgaagcggattcttcc

SEQ ID NO: 1884872 - DNA, 4001 bp, Homo sapiens; identical to SEQ ID NO: 916431

SEQ ID NO: 1884873 - DNA, 4001 bp, Homo sapiens
gcttcactgtggtgcgatgtttccaaagcttccacactccagaaagggctataacttcagtttcctcatttttacaaaaggtcaagttttcaaaagcttagatccgctgggatttgtctatgttgatgaagatacatgaaaactgggggacattgcagttgacctttagaaccctctctccacccccacccccatctccattaccccagagctaagcctcctcaggacctagtacttctcttcattcagtgttttctcacactgctgaaaattacctgtgactcatacaagtggttcaagctgctcagtcccagacaggaatgttgagtcttgccagctgacatgttggggtcacaagaaagagagagcaagtgtcctgtgggctggaatcaggggagatgcacagacaccctgtgaacattccagagtgcagggctgaagaatggcctgaatggagccgttaggctgatttccctgtggtcagaggctagctgcaattttaccctcccttccctgcccaaacactcctgacactggaatttcatcaaacggctaccgtgtttggttttcaaccaggacaaacaaagaaaagagatttgttttcctgtctgcttttgctgaatggaatctctgattctacttaccagcgtgcctcagacaccctggggctggttaggactttaagcacacaggaatctcagctttactcaatctttttccatatcctgagcccgagttcagacttcatcctcccgggtcccccatgtcccttcaacgtctgattaattctccagtcaactccctgctaatagtccacccacaaattgctatttcagctgaccttccccaaaacttgagcatccttaccaaataccttgggcttcctcataacctggttatcttctcatctgcatgcctttctggaataattttgaagtattaaaaaaaactcctctaattgtcaagggcatgcaggaagctcagcccctaaggagcattgcagaaatctggagttctactctgtttatacctaaatctagccttccaggagtttcagatagtttcctggaaacattttgtgctttgtgtttttcacctttctctcttaattgaatatggggtgaggagcaagaaaggggattgtgaattacaattacaaacagtacacacataacacagggacaatctttgcatttctcatttctgatcccagggatcagaggtagaggcaggccaggcgcggtggctcacgcctgtaatcccagcactttggaggccgaggcaggcggatcacgaggtcaagagatagaaaccatcctggccaacatggtgaaaccccgtctgtactaaaaatataaaaattagctgggcgtggtggcgcgcgcctgtactcccagctactcgggaggctgaggcagcagaatcgcttgagcccgggaggcggaggttgcattgagcagagatcacgccactgcactcccgcctggtgacagagggagactccgtctcaaaataaataaataaataaataaaaatttaacaaaaaaaggtagaggcagctctcaggtgagtaaattcgcagatgcccacgcatgtctggaacataccccaggggtcattagagactgcccagcagaggcgggaggatcttccgtttgcttttccttcagaacgtttgtccggagagcatcctgttctgttatatgcatatccacctccgtctccaaattactaggttgagcacagtgctcagtgcctggcattgagttagaaatagaaaatgagctggcgagtcccggcccgaggctgtgacaggggccattactgagcccactccccaccaacctttctgcggtttaactgactctcctccttcccctccagatcccaagggcttgactcctacctcctctaaggcattttgaaaagtttgcaaatgcacccttgatcctagcacgtacttaagaagcggctcccccctagaacgtcaggcttgaagctgaccccttcttcctcctcccgcgccatttgggtctgtgcgcagggccggaagcctgctggggaggggcacgaggccgggctggggcctctccggagggagcccgccgccccgcccagggcgcacgcacccagcctctgagggaggaagctgaatggggccagaggctggccctctttggggatttgcattatacaggctgtatttagaagcagcggcggggagcggtggctcacgcctgtgatcccagcattttggggggccgaggcgggcagatcacctgaggccaggagttcgagaccagcctgtcaacatggtgaaactccgtctgtgctaaaaatacaaaaaaaattagccaggcgtggtggccggagcctgcagtcccagctactcgggaggctgaggcaggagaatcgcttgaacccgggagatggagcttgcagtgagccgagatcacaccactgcactccagcctgggcaactcagcgagactccgtctcaaaaaacaaaacaaaacaaaacaaaacaaaaaaccaagaaaaagagaataaaaaaaaatagaagcagctttcttgctgatagaaagcaatgaccctctctgctataattacaactgaagagtcactttctttcaaaaactctattttcagatgtttaccactttctttaaaaaggaaaaaaaatttgcctcaaaggcaggcagtccccagggcatttctggtctcctggggaaggaacctaagagcggtttggtaaaattccattttgctatcttggcgttacctaagggcaagaactgaggtggggctttggtgacagcaggggctgaagagtgctctttttcatcatccagggtgtccaattgttttgtttccctgggccacattggaagaattgtcttgccccacacataaaatacagcaacactaacaatggctgatacacttttaaaaaatcgcaaagaaacttcatatatatatatatatatatatatattttttttttttttttgagttttgctcttgtcgccgaggctggagtgcaacggcacgatctcggctcaccacaacctctgcctcccaggttcaagtgattctcctgcctcagtctcctgagtagctgggattacaggcatgcgccaccaggcctggttaattttgcatttttagtagagacgaggtttctccatgttggtcaggctggtctcaaactcctgacctcaggtgatccacctgcctcggcctcccaaagtgctgggattacaggcgtgagccaccatgcccaaccaagaactcataatgttttaagacaatttacgaatttgttttgggccgcgttcaaagccgtcctgggctgcacggggcccacaggctgtgggttggacaagcttgctggactgtcatgaagttttgagtaggttaattgcgtggagagacctggaagacaggatcctgggttgtactgtactctccccgccattggacctgtgctccctccacccaggtggcatcgcagtggccaatggagaacagagccagactgcctcggtgcaaatcccaggctcctagtcctgtggaccacttactccttcggtgaacttgggaagctgttcatccttccggcttcagttttcccacatgtaaaatgaagataataatggcacctacctcagaggatcattgtgaggattaaatgaattaccacaataagagggtatcattgccagaaaggggtcccgatccagaccccaagagagggtttttcggatcttgtacaagaactctgggctagtccatgaagtaaagtgaaagcgagtttgctagacaagtaaagaaacacgagaatggctactctataggcaaagcaaccctgagggctgctggttggctatttttatggttatttcttgatcatatgctaaacaaggggtgggttattcatgagctttttgggaaggagatggagattttccccctcccccagttgaggactcctccttctt

SEQ ID NO: 1884874 - DNA, 4001 bp, Homo sapiens
gaaacacagatatttaaaaacctcccatgttagccaggcacagcggctctgtaatcccagcactttcggaggccaaggcaggtggatcactggaggtcaggggtttgagaccagcctagccaacatggtgaaaccccatttttataaaaaataaaaattaaccaggcgtgatggtgggcgcctataatctcacctactcgggagtctgaggcatgagaatcgctgaaacctaggaggtagcggttgcagtgagcccagatcatgccattgtgctccagcctgggtgacagagcgagactctgtctcaaaacagaaacaaaaaccacaacgaaaaaacctcccatgttcttaggctctggctctgtctgggacatctgctgtccatagagtaaccaagggctatttcccagccactaattccagaggtttccagagggttttgttccctccttctttgaacactgcagtccatcagggtttcaagtagtcctggtttcccaaagtcttggttgaaacctgaaacacaggacatttgaccaaaaaaacaaaacaaaacaaacaaaaagaaaaaaagcccctatcctaatgccacagagaccccaaaacaattcaccaagtgcatcaggcctcagagaatcaaatcaactctttcagtctctgccaatggccattctctccataagtctcgggcaaaattcccggtgggaggcaaatgaagccgtgtctacacatctgctgtcctccctcccacacaccctctccacttccttcctcggtaggtcacaatcaaaacacctatgcaaatttagtgattctttataatttcttatccattgagcctctcatgctgtgctttatcagttttccatgaccacgagacgctcgcagaacaagctagtgcttgggacaactgaagatgaaaaatagatcattggaggttgtgatctagcaaggaagattaggtttatacctagaaaagttagaaaagcaggcgcctagagagccaggtgtcaccattttaaaattaactccatctttaaactcgcaacacacattccttgccagttatgacccgtggtcataagatgtttactgcagaggaaaccgcttggcaatgcctgcaaggacaaactcctacaacagcagaaagtccacatgtcccaatatcacataacaatatatgcttttaagaaatgtacaatcatgctttcatgtacttataaactaaaatgccaaggataactttctttaaatggccaaagtactacatcttgtcacattgtcagcccacccacacacagagatagcttagcttttatgtagatgagacccctgtgtaagaagagtttaaaacaaagacagggcattcctcctcttgctttctgaggacaccctactctgaatctgaagaattttcaataaatgatctcttctcactacactctacaactcaccttgaatccctttctgtgggaggtccaggaaccctctcttgaggtctggatcatagggacccctttttccagcaacacaaacattgacaatataaaaataaagaacatgtttatctatgatatcaatgtctgtatctgtaagtatacctagctcaaaatctgtctctttatttagttttctaactatatgtctatctgtatcatagacatattagaaatcataatttctaacatattgttgtaggaggtcataacagaacctattataaagtgacagtctcttgctcctattttctattatttcccattcagtccaggtaagtctttttgggggaccctcccccacacccgctggaacagttactctggcacagccgctccagcctggatctcatttttgcttctcctggacttctcactgtgcagatgttagactcacactctcctctggcctcctgctcctgctctgaaagtgagcagttgtccctctgggtggcatttgaagtcaaagctgggtctcttgacagtgcccacccctggtattcccactgcaggagggaggcctcttctgttaacagtgacagttattacagaacaatgcctggagagatgataacttagagcaatttcattgtctttccccttgacgactcagctcccacgctagagcaggtgaggcagtgcttaggaataacaaaacaaaatcgcaaagccaggacttccttgagtttactttgctttctcactagattttaattattattattattattattattattattttgagatggagtttcactctcgtcacccaggctggagtgcaatgacgggatctcagctcactgcaacctctgcctcccgggaccaagctattctgcctcagcctcctgagtagctgggattacaggcacccgccaccaagcctggctcatttttgtatttttagtagagacagggtttcaccatgttggccaggctggtctcgaactcctgacctcaggtgatccgcgtgcctcagcctcccaaagtgctgggattacaggtgtgacccacggtgcccggcctctgactagctttttggaaaatttcatagaatgatccagggttccagattcaatttactttaaggtgaaataagtgggctggttagcaagtggtcagcttttctttggtgtgaggataaaaagagggtggctactttctatggctttccaaacagtctctgtttcacttagtccaaaaacacgtaatgttcatataacaaagaaatgatacatatttgaggtgatgatatactaagttgcctaattggatcattccgccatgtatacaggtatcaaaacatcacattttgttctataaatatatacagttactatttgtgaatttaaaatcaaactataaaaaatacattctactaatgttctaagatgacttctgagacatttagcgtgtattgattacttatactatgtctctcactgcttctactcattgaagaggtttatattgtaagtaaacataattcttatcatattcattttacagataaggaaactaaagtgcagaataaatatttgtccaaatctgcacgagaaagaggttcaacacagggctagcacccagggatgtctagttttcaggacccaccctctcgcgtagtacactgcccctccctccattcactgcagttaggattcaggagcaataactggacacagtcaagccagtttgcatctttacagaaaattccacccatttcgattagtgaagattcacacgtttagctatgatttggctcccagaattcctccaagtcagaatataaacagagctagacatagttcagacagttgtgtcataccaaaaaaatttttaaaaggatacagaatcaatcaatcaagtagaaaatgagacatttttcattaagctaaaaataattaagtcaattatttggcactaatgcaactcttaagccccgcgggtgggaacttttggttcataaaaagtgtttagttcagatctgagctgaaacaactttcaatctcattttcaagtagaaagatggcaagggccgaggcgggcggatcacaaggtcgggagatctagaccatcctggctaacacggtgaaaccccgtctctactaaaaatataaaaaattagccaggcgtggtggcgtgcacctgtagtcccagctactcgggaggctgaggcaggagaatggcgtgaacccgggaggcggagctttcagtgagccgacattgcgccactgcactccagcctgggtgacagagcaagactccgtctcaaaaaaaaaaaaaaagaaagaaagaaaaaaaaagaaaagatggcaagggctcctttacacaccaataaaatcagaacaaatacgtataagcaactaggacaatcctggaatattgtgggcaccaagtaaatatcgtggatgcatcttatgcagccagacaggatgatccaataatcagacatccgaaggctcctggagtttgatcctctgaattcactctgcaatatgaagtcct

SEQ ID NO: 1884875 - DNA, 4001 bp, Homo sapiens
cgccgaggaaggatccaggaactggcagaggagcgggagagctggggtgggccggggtggggagggtgcgagttaactgtggcccggtctcgcccggacctcgccctaggtgggagcacgcgcaccgggtctgagaacctgcaagagcctcgcccggcgccggctttctctgggccccccgcgcgggcctggcctccacgtaagttgtgtgcagcgccagggagtggaggcggccgagaccctcggagactaggggagggggcgggcccgggggcgctgggggccctcggtctgcgcccagccgccgccggctccagcgaacctcctaccccgcccccactcacccggctcagcccctaggagagacgcgcaggaagcgtgttgcttcgcccagcggatcggcagaagttgagaggagttggcggctgcctccggccggccggactttgcgagcagcctggagaggatccgcgaccgccgccgccgccgccgcggaggcttcggggctgcttccctcgagcttagcccgcagcgcgggtggagaggggcggggagggggtcgggggcacgagaagaacttgaaaccgtgtgaaggaatccggagcagatgagaagggaggaaaataaaagaaagtggagactgcagaacagactccgctgtggctgactgtgccggccgacgctccagctgaggggctgggttggatttttttttttctcccatcctctcgctctctcttttaaagcgacaccagctctctctcctcctctactatctcggtatcaccaaacccttgccggctcttatgggcatgaaacactcctcccgctgcctgctcctgaggaggaaaatggcggagaacgcggccgagagcaccgaggtaaggaggcgagcgagcaggggctctcggagaccccgccgcccacccggaccaccgcgccgccgccgccgctcagcgccgagtgccaaactttccccagtttcatcccgctcgcttctgccggcctcctcctgtgtgtgtgtgtgtgtgtgtgtgtgtgtgtgtgtgtgtgtgtgtgtgtgtgtgtgttggtggggggtgggggggaagttcatgtctcaggtcccctccctcttgaaaatgcaaaacagtcactctcaccccatcaccctctcctgccacccgctgctcccttctcccgcccccaagtcccaaaccccgggcagccgcgctcccctgccctctcctctgggctccgtgagggctcccgggtcccggctttgtgcagagctggggtgggtaatcctggggccaggtctgccccctgcagtgccttgaccgtctcctgccgctgcctcagctttacccttcaagctcgagtcggttcccgagctctccgtccccgcagccgcgcggagagcccccggccgcgggggccgagccggcaggaggactcgggcacctcctacagaccctccggcccagatctgggccagagagaagtctgcaatcctcagatatcagagccgcctctgggtagctaaacccggcagggcacacgggccgcggccaccttcagcaccagggacagcgtccgcccctgcagcagccgagcctgcgcggactgtgggggctgcgcgccgccggctgcagtgagaaatgggtctgcagccacccgtcccgcaagggcttttgaggaggtcgctctagctccgcaaattgtgttctcggcccccgccttcggcagcctttttctctactctccagctggccctgagccgcagagagccctgctgggctttgcgtcccgagactcgaggctgtgatccctcgcctccctctgaccccgctgtcattacaacaaccggactattccgtaggctctgggcacctgtagtcacgaaggggatcagcgtgggcagcccccttaccttcctggagaaacggtgcgccgagatgggggcggagtggggcatgtgtgtgaagatcatcccttactcagtggcaggaaaaagacacagagagcaaactcccaggctctattaatagctgggtgtctggtggggctgccgcacatttcacatatggttacccatatgcagcggggggcggggatgggggtgtggcgcggggattgtccctctgtcttgccggaatgcaaaaaggtagagagacccttcctggtcttcttccctcgagttcttaactctgcgctaaaacccctaccccacggcgtaggcagcaaagctttataaatcccccttctctgagagactagaagcagcatgcatctgacaattgtcaatttcaaaacaaacacgctccgggacttgaacgcagcggggcattcagtagcgaatgctgtctccttgagttagggcaaagcctgcgtgcccgccgtcccctcaccacttcctcttccccagcccccacctgagagcagacattcggaatgatgtgtagtgcgaggcggctagcctcccagcagaaagccatccttaccattcccctcaccctccgccctctgatcgcccacccgccgaaagggtttctaaaaatagcccagggcttcaaggccgcgcttctgtgaagtgtggagcgagcgggcacgtagcggtctctgccaggtggctggagccctggaagcgagaaggcgcttcctccctgcatttccacctcaccccacccccggctcatttttctaagaaaaagtttttgcggttccctttgcctcctacccccgctgccgcgcggggtctgggtgcagacccctgccaggttccgcagtgtgcagcggcggctgctgcgctctcccagcctcggcgagggttaaaggcgtccggagcaggcagagcgccgcgcgccagtctatttttacttgcttcccccgccgctccgcgctcccccttctcagcagttgcacatgccagctctgctgaaggcatcaatgaaaacagcagtaggggcggccgggctcctgcgaacaacaacaaaacaaacaaacaaaaaaccacgtcgcgtgcggggcaccaaggcggtgcggggagggacagacccagctggggctccttggaggggtgtgagccaggttggcggatcggttcttagcaacttccctggagaaggggtagaacccagacttggtcaaacgtgcctagcggaggcatccaggcagcgtgacaatcacttggtttccctccaggaactggctgtttttggaataagccaggactagagcagcacttccaaaagtggggtgttgtggacttgcctgcatttatggtagatgagagcggcaggagcacgcctccacgtgtgtcagtgggtggtggggagcgtggtagtggtcctagttctgaattccacacctctttgtcaagcaccggctctgtaccaggaaagctaggtacccaagttccaaacatgaggaccacctggtccctcctctggaggggctcacagtctcatggacaactatgatggataatcctgtagccaccttttcctgctttttgttgtttatctcattccatcctcacaacaatcctgtgagataagcaaagattagtattcatttcttatacccattttatagttgaggacaccgaggctgaggtcaagcaattgctgaaagtcttctggtgggttaagtcagccctgaaacacagactgcccccacttctgattcattgctgtttgccctgcccttgctatttctaacaagatgccatgtgtgaatgggagtagatgaggagtgggcagagaggaatactttggaagggagagatgcagtgatggaggtgggcaaggatgggagaaagtgttcgttcaaaagctaaagctacggagagatactctaaccattgggcaggaagggagcaagtgaagaataaaactacttacattttgaccaaagcctccctccacaaagcgaagtacccagctagggtacgagagcatcaacatcacgtgcttgctggacactgttggcaatgggtggccctgggggcactcttcaac

SEQ ID NO: 1884876 - DNA, 4001 bp, Homo sapiens
tttcctgaaacttttctaggtaggaataaacattaatttacatcttcatttgcatgaacacaaaactctactataatctagatgctatacttctcaaatttaaaacaaaagtacaaaaacaaaaacagtaaacactttaggtgaatgttgtgttaaatgtctatattgagcgtatatgtacacatatatttatgcatatgtggatgtgtgtttatacatatattctatgtatatatccttgggtgggaacagggtgcaaagatctaagcataacatatctccacagggatttatgttcttttcagtctggtatcttttaacttaaaaacaactcgatgaatagaaatcataaaagccatccttacaacagcattaaagtgctattctattctgcagcattccaagtgaattattgctgtgctgtcaaagaaaacaaaaacatttgagaaggactgtttattttacagtggttgaccaaaagtatgcaagtggttataaaaaaatgtagacagctaacgatgggaggtgccacttgcacattctgaaatccattcacaaacctttgacactaactcttgatcactggagataatattagaagcaaagcatttttcacggggaaaatcctagcactttgaaagcatttcaggtcaaagcaaataaataaaacctctatccctcatcctgtatcactggcatctcctcactcacagaacctaatggcatgattgttttttcccaagaagagcaagaaaactttgcaaaaatatttctctcagaggttatggcaatgaaggatttttgtgccatgaaacacgtgttgccctttgtatttaaagattaaaataaaaactgctgttgacaatgttaatagattctttcattaaacaaatatttcattttagagctatatgggaaattagagacctcaaacacagtccctgtatattaaagataacaaaatgtatacttagggaagataaatgacttgcttaaggtcacacagcaggtagcatggaaggatgagttagaagtactagttcagtgtttgtatttgtatgttttgcctcagaatcagacaatgtacagttaagacctcatcgatatctcccggtaaatgcttatttaatgtttaagaattttcactggtaaagagattcttattccaggagtctaggtcttggggtttaggtttcttttacttaaaaaaaaaattcctctgataagtgaggattcatttaactttctggtggatcattaggtacctttcaagaaatgagaataatcataactggctctatttatcttagcatgggttgaaagatatgaaaagttccttgatatgactggcacgattctatcccataaaaccactcgtaaatatcagttgaaataatgcctgtagggaaaattttcaaatgtcctttctgtcaatgcagaaatgccagtgcagcttgttttctgggtggcatgtaagttgtagacaggcaccacattttagacatattatggtggtgcggtgaattgacaggcagtttaccaccatttccatgtattagattatgtgtacctctggctatcctgacactttgcccccaaagtggagatagtgaaagagaaggagagagggagaagaactcctcgcatctgtgcccctacctcagcagctcctcctccttgtctctgagggtctccagagtttgagagtttggtgtcatgttggcccaagagactgttgtccttttgacagctcggctgtttgtatctccagaatgaaacataatcagatttttttcagatgtagcatctgccttccctccaacatccttgggttaatcacgtgcttgctggccaggatatgtaaataagacttggctaaaaaaaacccttaaaggattatgaagcaatcttgcttaatagtagcagaacaaaacaaaacaaaaaaccactccaacaaatcctcctgtgtgctaccaagtaatggaaagatccagttatgactggaactgtcctggcctgagtattgtcctggacccagagggagcgaaggagggagggagggagggagggagaaagagagagagagaggggagaaatatgagaggaggagagaaattgctgaaggagagcttcactcactgactccgcacacattccctcccagtggttgctaatgaagagcccgtgctggtgaaggaagcctgctgatcccggaactggccttgcgcgcaagtggtgggatgacagacacattcccttccttgaactgcactcttttcccttgcactcagaggtggcccgagagagccccggtaggtcccggagtatgtttccatgctgcagaaggcatggagagattccaattgcgggggttcctccgtagcctttgcagctgaacgtctccatctcctgtccctgggcggtcagtcgctggcatggctctgtggagttttacctcccagttgtctatcaccaaagctgtccaccttgtccggaggggaatgagcgtggaaacccctggcggctgtactgacaaaagcaaccttagtcaatgacagagctgggcaggcggcgaggtcttgcgggctggcctttctgctgctggtaggaggatcatgtgctgctatttcggaggctcctgccagttggcccctgcccaccttttctgttcatactgaagcagccaggaactgagagaaagaggaagcctcggctgtgctccgggctgcgctgccagggttgcgtctgtagcaggtccagcagcaaaaacaaaacagggcagagcccagggaggccccagccacagcagctgagtgtggaaacaaagcagcccgcccgccctgggaagctgccgcaggctgtggaagggaacttctagagaggctgcatcctctccaagccgggaaactgaggcctagaagacatgtgacgtatctgagcagtgaccaagccaggagtagaaatgtctcctgagggcctgtccccactgctgtttggttttaatcgctcagctcttaatagtgtaaccctggacaagtgacttactctccccagcctccatctcatctgtaaaatggggatgagaaaatacctctaagggttgttgtgacaattaaatgagaaagcataaacaaagcacttggcacaatgcctggccacttaatgggccctcagtaaatgttggctagttatgtgaaccagaacttgagatggaagtgaagcagaaacgatagggagttgttcaaaaatacctgatctgctagggaaatattttttaaaacaaggctgcttttcacaaggaggggtaggcacacttgaattaagatcagattgattatatgtttttgttcagctttgatgttgaattgtttaatcaaatggcagactctgccccgcttccaggaagagctcaactccaactaggaggaagcaggtaatgtgagccatggcatcttccccgtttagatttcctgactctttgtttatcttctttgtcaatgtgcgtctgaaccttcccaacagagtttaaaatgttcaacttcaaagctaaattctgatggaaaacacttcctaagaggctgaaggcttactctaggggtgaaagaagaggaaaggcgatggatcacaccacatttgtggaaaatgttaatgctatgtgatcttgcctccttagacccagatagatgcaaaggataaggaactcggtttatagcaacagatactccaaaagtgctttgcatcctgttctgacactaactggttgtgaatcacttgttaaagataaggataacaacaataccatttcttgagcccttactgggtgtctggtattgtgcaaagtactgtctatatattacctcagtttccacaacaaccttatgaaatatttcttccttttgtgatgaggaaagtgagacttagagagaagttaaataacttgttcaagatcactcagctaataaatgctcctatgcacttagtcactgtgctatgtcctgctt

SEQ ID NO: 1884877 - DNA, 4001 bp, Homo sapiens
taaataacactattcagttccagatgtttggaaagacataaggaatttgaactacttctgtaattttagatggtctcataaatattgtgaaactcagcattctaaacacggtttctgagctaaatcttgtttagttttcaccatgctttaaagattagttgtggccaggcacagtggctcacgcctgtaatcccagcattttgggagggtgagacgggtggatcacctgaggccaggagttcgagaccagcctggccaacatagtgaaatcccgtctctactaaaaatacaaaaattagccgggtatggtggcacaagcttgtaatcccagctactcgggaggctgaggcaggagaatcacttgaacccaggaggtggaggctgcaatgagctgagatcgtgccactgcactccaacctgggtgacagagtgagactccgtctcaaaaaaaaaaaaaaaagaaagacaaaagattagttatgactaataaatacaagtacgaagtggcccttgggtcaagataagtctgttgtagacttttttttttccccttgagacatggtctcactctgtcacataggctggagtgcagtggcaggatcacaccacaacctatccgggctcaagccatcctcccagctctggctcccaagtagctaggactataggtgagtgccaccacgcctggctaatttttttttgcaatttatagagacagggtttcgccatgttgctcaggctggtctcaaactcttggcctcaatagatcctccagccttggcctcccacagtgctgggattacaggtgtgagccttgtttgcagagtttaggtcccagagaatataaagacactcaaagtatctcaacctcttggaacacctcttgggcatcaagaacaacgctactagaaataagcagtttgcctctagagaaacttcaagtaagcacaacaaagggcaaagtgacacaagataactgtggaatgcaagcaaacagcagcagctggtctgtatttttttaaatggcaaagtcacaaacaacagcaactgcttttagagtgagcaggtagtttgctttcttttttttcaaatggaactcactttttaagtgatgacatgcacttgggggtgggtaggtgtgagttcatttgtgttttgaaatcccaaattaatgagcatgataaaccgctattgctggccctgtctgactctctactctgagtaattggtgggttccccccaaccttctcctaaccctcaccctttttccctttccattgacttgggacagtccttgtcaaagtgccaatcacagtgggaaggaggagaaggggggaggtcacagtgcatgggattcaaggtcacagtgggcggagcaacggggatcaccaggcaagtaagtcaagttcccgctgctcaagtccagctgtctgccacggtagtgcaacccttggcggacgacccaggacgcgttgacgcggcagtcgcgccatctcttcttgcctgcatttatctgcgctgtttgaagccgtgtgacccatcaggacccagaggctgtctgatcacattattgggctgtctgctgtcttcgggttaggagatcctggttggcctgaagggaagaagatcagaggaagacctatcgaggatgggtttctcctgcttctcctcgggttggcgctgcccaggatccgcttcctggcctcggtgtactcggcttcccactgtgccagggacttgactggaagggcgggcctgctagcggacttggggctgctgaccacaccgttgctggtgggcctcttgaggatgcggacctgtggagggggtcccgggggaaaattatcatcctgaatcacaatgggcactttgggagatttgaatttcctgctttctgtgtgatcttcagttttttttccagacgtctatttccccgctgtctgccgtctcctcccagctctcagcaacctcctcatattccatcttactcgccactttccagatcgcttgctttcttatttccacattttctctgacttttgcagtattcaatattattacctgattctgatttttcagacatcactatatggtccttggctttttggtcgttcctctcattcctttgctgtttcaagctctgttcccagcctaagctttttaccaccgaattctgttctgtgacccataacttaaaactaacccaacttttcattccctccagactttttttggtaagcagtatcatcatgctttaggtggacactgagtcatactgctgtggtagtgctggtacacgtagttttgaataccaggttcttgagtgaatcctttttacttctctctctctcccccacccccgcttctcccttctgccttcatttctgacccttcttttctggttccattagaaaaggactaatcttatcagttctgcctttttttttctgctctaataattttgtcaagataattttttcaaagcacaaggccaatgagaagggggaaagtcggtccagaaggcagccggcccgactattctgagtttgaatctactcttggtggtcctgttaaaatacagtttgaagcaaatcacttgtttttatgcttctaatgtctactctgtcgaaagcccaaatttccttgcttggcatttaaggagactccaagttcttaaaacttcttcttgactttcatgcaagtcaaacggatttatttattgtatctcaaacagtcctcttatattttcctttctgtattttttgataattttcttgtgcctggaatattctctgcttttatttaagtctcaccatctttcaagacacaaaatatgtgtgatctctgaggcctttgtgaactgcctccagcatttactaagcaattaattctgtctctgaacttttatagcacaaacccattcgttcacttgatatttaacaaatatcaacctctatcacttatctctttttttttttttttcttctgagatggagtcttgctctgtcacccaggctggactgcagtggcgcgatctccgctcactgcaacctctgcctcccgagatcaagcgattcttctgcctcagcctcccaagtggctaggattacaggcgcccgccacggggcccggctaatttttgtatttttagtagagacaaggtttcaccatcttggccaggctggtctcgaactcctaacctcgtgatccacccacctcagcctcccaaagtgctgggattacaagcgtgagccaccgtgcgcagcctatcacttatcttttcatgcttacattttctcactgcttgagattttctttcatccagggtcaagcactgagtctattagaaaccccactgtatatgatctgatgaagatgagattatctttttaaaagccacatattaaatctcttaagttaataatattggcaatcaacttaaatcaactgagtgaccactatgtttaaggaagtttcctttctggtaggctgggaagcgggagaagggaaggatataactttataaaaaaaaaaaagctgcagaagggaaggatataactttataaaaaaaggtccttgttcacaaggagctaatcacttactggccagagaagaaacgtgttccttctttgcaatggctgtgtttttgggtttagctaactcaattctttatgtcctcaatttatgagaccgcatcaaaaacgtttttgccacatctctgtgggaaagtaggtgagtcagaatgagtgcataatatataagtatatattttaatgataatgaatgtgtagattaacaaacccaaactttgtttttgtttttttgagagtcttgccctgtcgcccaggctggagtgcaatggcatgatcttggctcactgcagcctctgcctcccgggttcacaggattgtcctgcctcagcctccggagtagagtagctgggattacaggtgaccgccaccacgcccgactaatttttgtagtttttagtagagacggcg

SEQ ID NO: 1884878 - DNA, 4001 bp, Homo sapiens
gcgaggaatggctcagactggacgtggcatcgcggtgacacttgggcatgtgatgttagcaggcgtctgtgggagtcttccatcccctgcaagcagccacggaagctgcatcttgtcccacgtgggtggatgtgcctggccattgcaggccccagcaagcgtccatggatgattaaagaagtaaacaaaagcaagctcagcccggcccacttgaaactcagacttggattccctgcatggctttaacccctcagaggccaactatcccggcagaaactgcactgctgattggtttggtttgacagggctggtcatcggaaacacacatagaatgtaggagagtgtgtgtgtgtgtgtatgtgtgcatgcctgtacatgcgcatgtatctgcgtgtgtacatgtgtgcatgtatctgtgtgtgtgagatgtatgtacatgtgtgtgtgtgtccacagatgtgtgtgcatgtgtggacatgtgtgcatgtgtgtgtgtgttctggcaccaacaggtgattccatccactttcaaacccaactcctcaccactttctccattagctgcattactgatttctctttgtcagacggtagatgcttgtctaattaggcagtggctttaattatgccacaaagcacataacatagtcttgattattaagactggcccatgggataatgaaaggaagactggcaaatccaaattaagcagaatcataaaaatgaatgaccttatccgagaagccgtcctacatcccagcacagtaacatgcccctgctctgtgtttgcggactcctcatgcatattaattgtttaagcctgagcagcctggctgtcagctctaatagatgcagatttaccggatggcactttgaggagctgggagcaggtacctcagcccagtccagattcctgatgaagctgctctgtctaaagccttctgcgtctcgggtctgggatgggaagggagtagacgtggacggtgaggatgggagaagccaggtaccatcgtggagataggcggcgagccatgtggcttttctgcaggaacagctaccaggtttctttcctcatcaaggttgggagctgcggccggttccccagctgacatcttcccgtttcacacgtgcccggctctgtccaggcctggggtctgtgccctgggaaggaaatgtctcagggggagtgggacccttgggtgagcaccaggggaatgcactcccactgggtggtctttgcctttgaagcagctctcccggcctctccgggcacaactttaagcaagcttgtccttggttcatggaagccaaccggaaagctgaggttcctgccctgtggcttcctgctgcaatgtggattcactgggacctgcggggcagagccggctcgatgccaggcagccctggactctctaagcagaaagagccttctcaggcctgggatccagctcccccttctcccactgtgcgggtggcctgggatccagctcccacacacacacctgggcacacacacatgcacacgcagcatctcacccacagacccagcacacacctggagacagatggacctcagacggaccccggcggcccagccgaggcgctcgtgtcacccatggctcctgttcataaggcgaagggcacgcgccgatcgcagacgatcacttccacacagacttgcattatgtgggtttcatttgcacgaaatccacctgggctggaccaggactccttcaacagcaagtgacagaaaatccatctcaaattggcttaagctagaaagagaggcagtggggagagagacagagaaggagggagggagggaagtgtccctgcaatgacaaagcctgaggaagccctggcgttggccaggaggattcacggctcaggcgatatcatcgggccagcgtcttgccagctctccgtgctcctcttggtcttgctggcttagcctgagcctccactgtctgcaagaggctgcagccactccagcctcacgtcctgtctcccggagcccagccaacctctcctggctctgattgggccgtgtgtctctccctgagcctattgccatgctgattggctcagcctggtcctgtgccctccccttcatccagggctggaactccacccagctacttagggagttcctgccgggctgagccccatgttttatgggaaggaggagggaagcggctgagcagggcaagagcgaaagtccactgcctggcaaggacagcctagacacgggggaaagaagggacatggaggggctgagccctgtcacacgtcatgccctgcatgccgggctggacatggagaagctgagcgtgcagtctggagctgaggctgggaagccctgatacatggcttagaagtgagttggtgacaactggacggttccccagcaggggcaagcaccagagtgatgggaacagcccctgctgccaggagcccacggggggagtgtgcacgtgtgtgcgtgtgtgtggtgtatcctgtgtgcacgtggtatgttcatagatgtgtagtgtctgtgcatgtgtgcgtgtgtgtggggtatgttcttgtgtgtggcatatgttcatgtgtgcgtgtgtgtggtgtctgcttatgtgtgcatgtgtgtgtggtgctgtagcttctaattcagcccaagccacaacttagacttttaatgttacgttcaaacaaaaccatttggagactcacccacagctctgaggctttggacgacgcccgctcatcacctgccttcccctctgctgagtgcaatgaattcaagctccataaaggccacacatggagccctgtgtgcgtctacagttctgggtcccgagatgaggcggtgaaacagcaaacccacacccagaacccctgccccaggagccccagccagcaggagagcagggcaggggtgcaaagagcaagccgggggtgggggtgggagaggcagagcagcaggctggaggccggggctctggtgggattttacgttgagcacggggtgagcctcttgaagggtgagggcgtgtgtggccatccaggtgggggtggggagcgcaaaggccctggggcaggagcaggcctggagcgcaggccacagagccaggggccgggcgcaggtgagtgagccaaagggaaccaagaggggatggtggagggagcggcctggctgagcaacccggggctttgaccttctcaggggcaatgggaagcctggaattgcatgggctggtgtggaggtcaccgtgaccttgccaggcctgggggtgcagccgcagtgcccagggaggtgagaaggggctggccaggctgcctgttgtgaagagcggagaagtatgagagagatgtggagcagggcgtctggcttttctctgacctgcgatgggctggtgggagcaggagcgagctggcctcactgtgaatgtgaaaatgctggttggagcacaccacggtgggtacttccttcaacggctaaatgcgccgaaggcctccaagcttgacagggttgaatttcctccaaggccctgggaggggcgccctgtgctccctggatggggccgacattcctggcctgtccccagctgcgtcgcctctgcccagccctcaatcactgcagctctcaagtggtcctgggtgccgtgatcttgctgaactctgatgctttccaaataccataaacttagtttattttctgtctgacagaaacggcgccacttaagtcctgcaaagaaccctcgggttccactcaggctgagttattcgggggccactgctgaacggtttgcatttgtttcctctgtgacatcggagtggggaggacgctgcctccagcacagggccaggggccagggctgctcacacagagctgctggagcctacagggtcccggctgtgggtcctgggctgcccgcccccaggaagggcaccttgccaccattgaagtggggcgagctgattcgggcacagctggaaaccaggaggcagccagcagcagc

SEQ ID NO: 1884879 - DNA, 4001 bp, Homo sapiens
agacaatatttaagatgatggagatcccaagtacatagatttgatctttacaaattatttgaatgtatcaaattaccacatatgtctcaaaactatgtacacctattatgcatcaattaaaaagcttttaaaaaagtagaaacaatggatgaatggataaacaattgtgatatatccgtaaagtagaagattattcagctgtataaaggaatgaggctctgatatgtactacaagatgtaggggccttgaaaacaccacgctaagtgaaagaagccagtcacaaaaggccacatggagtataatgccattgatatgaaatgtcctgaattaaataaagccacagcggcaggaagtggattcattgttgccagggacagagaacagggagaaatggagaaggaccactagcgggtacagagtctcctttcggggtaatgagaatgttttggaaataggtagaggagggggctgtacaacattgtaaatgcactaaatgccactgagctgttcgctttaaaatgattaactatgttctatgaatgtcaatttaacttttttaaatgcagagtttctttacaataaaatgacaatcgctgacatttactgagcacttctatatgccagcctccattatcatcactggtctcagatcaactcagttaatcctcccagcaaccctgccagatagggactattagtctcacttgcagatgagaaaattgagacacagaaagttaataaattgcccaagtttcccaatataataagaggcagagccagcacagacccaggcatctaaacaaccaggggtcctgcaccagtaacctttggcactagaaattcacactgatcactgggtgcctgctcttgaggtgcttctattctgaagggtgggcacagatgatgaactaattgccaaaaaaagcctccttgcaggctgtgaaaagccctctgatcaaatgcaaatactaactatagttcaatttggaacaacacttttgcaccgattgcaactgagattggctaaagattcacgagtttggcaaacataaccagaagcattccatgaagattaactgtctctcatggaatgtatactaaatatgattgtatactttttactgtttgtaatttgtgtactacacagtttttatattagtaaaatttattatatatgtgtatatagatgtaggtatgcaacacacagatgtatatatcatatgcacatcccacccccagcctggaacttgttattaaacattttctagcaaaactattccctactcatggaattttcattctcctgtcagtctccagggtgagcaatgtagggatcacagaacaaattcaacctaaagaagaaaactgtctgaatataagcccaaagaaggaagttaaagagaccatcctttgagaaaaaagcatttagtgttggggaccaacctaggctttcatttacccaatagcgtgagtttaggcgatctattatctagatctattatctattatctctattatatttaatctcaggaagactcagtttgtttatctgtaaagtaggggacacaagaggaatgagagttgtcatgaagattaatagtcgctaaaatatgttggttctaagggctgaccctgagctaggcattctacatgcattctctctgaatcctcaaaatacccctaatatctacccatccctctggaatggggaagcagcggcagagggaggcgagcacagcctgaccccagggcgcagagctgcacagaacgcgtccacgctccgaccgcagagtctgctcccagctgctgggcacacccctggctcagaggcgcacagagtcaagcctgataagcggtattatcctggaggcaaggctgcttactggctctggcttggtcgcctgcgtccggaacctgaaatccacaaaggtgcacacagatgtgggtcgctgccttcccaacaggctcctgcccggttcacctggggaagcgcagggctgcgggcacaggattctcccatcagacaccgggagagcatctccgcggcagcttgcagggcccgctgtctccactagggggcggcgtacgcgcgtctctcgaagccgggacccgcgcggggaggctgcactggctggaaacagcgcctgggcgctcccgcggctcccacctcagagatgtccccaggtgccccacgccccccgcgcgagccccgacacgcgagccccaccgcactcctcaagggcttgtgtggatccttttgtccccacccccaaggagctcctctgacccaaattcctgctgagctcactccaggccaacaccccgagccacgcgcttccccagggaggattccagccccctccagtacggcctcagccgaggagctcccgctgggccgaatgaggcccagaaaacacgacctgccaggagcggatatcatccacacacaaacacactggtgcaaatgcatacacacatgcatacacacactcatacacatgttcatgcaagcccatgtgcaaacatgcatgtggcatatgcacgcacacacatgcatacatttacccacacctacacgcacatacatgaacacacatgcacacatgcatacatttacccacacctacacgcacatacatgaacacacgtgcacacacatgcatacatttatccatacctacacgcacatacatgaacacacgcacacatatgcatacatttacccatacctacacgcacatacatgaacacacgtgcacacacatgcatacatttacccatacctacacgcacatacatgaatgtgtgcgcacacacatgcatacatttatccatacctacacgcacatacatgaacacacacacacatatgcatacatttacccatacctgcatgcacatacatgaacacacgcacacacataagcatacatttatccatacctgcatgcacatacatgaacacatgcacacacacgcatacatttacccacacctacacgcacatacatgaacacatgtacatacacatgcacgcgtgcatgcatgtgcacacatatatatggacttacacaggcatgcacatatgcatggtgcatatacatacactacatacacacatgcacacacgcatatagctgcatacatatacacacatgcacacaatacacccacgtatacacacatgcacgcgtgtgcatatgtacacctgcatacatatacacacatgcacacatgcactatatacgtgcatacataaaaacacatgcacatatatacacacatatacccctgaatacatgtacacacatgtgtacatgcataatacacctgcaaacatatacacacatacaaatgtgtagcacatacattgctccaaatgcacacatacgcacatgcctgcatatgtgtttgtatgtgtgcacacacacctcccaaacagtggctgacatctggtggggatggataaatatttgccaaataggtgaaagtacacatggacatcacaggggaggccctctcccccacagggcctttggacctgccagtcctctgcctgtttactgttttctcacctggctgaattccacttagacaagatgttgcaacaagggcctgcagaacacacctggcctacagttgtgtcttgtatggtccactgactattttaaaaagttacaagttggcaacatttaaaaactgagaaatctgatacaaattcgcaaaatcctgtgaccttggaagatcatatatctggcaagataaactcctattcacatcccagggagtgatcaaagctgggcagaggatgcctccccagatggcgaagttccctttgccaccgcccgcgccttcatgctctattgtgcctcatcgctcacgcgtccacactacttgctcaacacctgcaaatgtgtgcatttttagcctctgacttcaccttgcttcctcttccaggaagccatccatgaaccccagggttggggcttctcctcggtgc

SEQ ID NO: 1884880 - DNA, 4001 bp, Homo sapiens
cagagcttcttccctctagtcacaggatagcactggcctgcaccaacacagctcttccaacaccagcaggggaaaccagatgataatcctaacagagccagaccaaggaatgaggttatcagttttcctttttctgctgggaagtttctgccttggggctagtctatgtggggggaggctgggaggtgggagggtactgtggaggatcttactctttccaccctcctctcactgatcctagttttgaacaagaaacaggtgatctgtttctctagttgcagctgaatagaaaccaggacaagaaagtgttgtcctccccagacacgtttctgtctcctgggtcctaaccagctgcctacttgagccatctgacttctatccacagggcctcccaggagctgaatccagaagggcaagaacaaagtagcaaagcaggaaagggcattcagaagagaacagcatgggcaaaggccccaaggccagagcacttggaaactgcaagtccctcagtgtagagatgagtctgtagaggaggttgacacaagcttgtgaaagacccagtatgccaggccaggctaagggggtgggaagagtgagggacactgagggttttatggcttaaattttgacaagtgtatctacaatacagacaactaatgtaacactccttttttttttttttttttttttttttgagacggagtctcactctgtcacccaggctagagtgcagtggtgagatcttggctcactgcaacctgcacttcctgggttcaagtgattctcctgccttagcctcctgagtagctgggactacagactgatcccaccacatctggctaatgttttgtatttttggtagagacagggtttcgccatgttggccaggctggtctcgaactcctgagctcaggtgatccacctgcctcagcctcccaaagtgctgggattacaggcaacacttttttttttttttgagacagagtcttgctttatcatccaggttggagtgaagtggctcagtcatagctcactgcagccttgacctcccgtactcaagcaatccttctgcctcagcctcctgagttgctgttaatttttttttttgtagagacagggtctcactatgctgcccaggctagtctcaaacttcaagagaccaaggcgggaggatggctgggctcaagagatcctcctgccttggcttctgaaagtgctgggattataggcatgagtcactgcctgtccatataaagtaacactcttgaacccactatccagacttgaggttttgttaagttactgttaaaattttgtcaattttgctcttgagtttcaaaataaacaggtcattacagataaagttgaagttccctttgtcccttccccagtaccattcccctccctttcagaggcaccaccatcatatattttttctatttttaccatagatatatatccatgaataacattataaggcttcagtgcattttaaaaagaggtccactggttatgatataatttataactttatttttccattgcacattttaaaaaaagtctttatttgaggtttttggcaaagtgctgacaagggtaaaactagcgttataagatcatgctggttaccaagtggagtattccaggtgacagaggaggaccaaggatggtgacagtgggaaggaggagacataggtaaaaggagactccacaccacaggtcactggtgatcgccctgtgagggcagggttgttttatacaagctgttcttcagtaccatgaacagggcctggctgttgaggacgcccaataaatatccgttgacagcgaaaggttgacaggggcagacggatccaggatgactcccaaattcctggcccagtgcaaaagcctggatgatgatcccagtctccagtatgagggccccaggaggagaagctggattgcagggaaagatgaatccagaagccatctctctgatctagagaaaacaaggctgtgccgtgtggaagggattaatgttaggaagcagaccggacctccattcttaggacagaaaaaaatcttgtagcaggtagttcaaggctataaaagatctgaagggacccagagatggtaagagtggaaaggttcagtcctgctgggggcaaagggatagttgaaaaacaagccaaaaacgataatcactttcctcagaaggccaggagggcagggcccagcttctgcatcagccacaaggactgtcttatagccctctgtgcggtgggtacccacaacccattagccaaggcagaggaggaggaagaaggtatagtaagtgcatctaggatcataaagaccttgtcagatgcccacactcaacttttctcccactccatattcatcaacaagatggacaggtggggtgctcacaactgcttcttaggacttattcttgaccaaattcaatttctctattcagggaaggatgtgaaatataacctgctttccaactcttaagacccagagctctggctcttcacctcaaaaggctgccctctgcaagagctccctcaaaggcactgccacccccacctcctcaccccaccacccctgccccaggcacagccaccacccaccctctgctgctaattcacctataaaccatctcctgccttgcgtctccactcagttttgttctttctctaacacgttccactcccctgaaagcccgcccaatccttcctgttaccctagcactgacttcctaaatgaagtccggtggctcacagttctgtccttctctgtttttgtcactctttccagcccctcacttgagcctttggtagcttggtctcacaattctttgggtcctgactatggttaagtggcatttctctacttcatccctgggttcagggacagaaatgcttttaccatccccagtgcccctctctggggggagcagagaggtcactttagttttgtttggtctggtggagtaaggcacgcccttctctcagagagggagctgtcatggatctaagccagtccctgtcctaggagtacttgcaagttagacttgctctttagtcaaggaatgttaaatattgtaaagcaatgccgtagctggagggggagaatctgggaatcctctttccatgagcctgctatttgaaggtgtggtgggatcccttggaagtgtgggccccttgtactctggatctcatccctagagtcaccaaagggccaacgtaatgattctcaaataaatctgtgatcagtcccctcataccttgaacttgggcaggctgctaatttttatcagagcaatacaccctgtagataccacctccctgaactctaaacggagcagagctctaaaccaccaaagaatcaagctatatagacttccaccttaaatgggtgtagattcaacacgattcccaaaatcacgtgacttgcctcgctaaccagggttcttcctcagtggggaaactacttgggccttttttccttctccttttcacctacctgaattattacgtttatttataattaacatatattgcatgtaatattaaaaagaaaataaaacttagaaagacttggtggtgggtgctgctgaattaggtatcagagccccagttaggtgggtgtcctgtggagtttctgatgaatcaaaagccattgttgggcactttaaaaacatggatgccttgagccctgggcagccccaaggctgtgcctaccgagggcacccacagaggattagaactggggcactggaacgagaggaccatcagaagcaaggcctggatgctcaaattcccaccacagtcataaaacttaggagcatctaagtcgcaagcagcttttagtttctttcttaagaatccaacaaatcttgtgttccaccttgtagccttctataaagtgtgaccattcacttggttgatgattaatgattcagctagtaattattaaacagaaaggaatcagaaataagaatcataaattta

SEQ ID NO: 1884881 - DNA, 4001 bp, Homo sapiens
gtgtgtgtgtgtgtgtgtgtgtgtgtgtgtgtgcgcgtgctggctttaaataagtgactcactggatagtgtatttctcttttcagaccaaatgggtcaccggctactgaaaaagaatccagacctctgaaagggtttgtgacaaattttttagaagttctcacgctcatctgttatgatgattttcttttcttttttctcttttaaaaaagttggctaatttgtgtttctatattcctctttaattttatttttattgggggtacaattgtttttaaaggagggatttcgttagacccgaaactgtggggtggcttcctctctagcaaacttactatctctacccctgtgattcccatctcccccaagaaaacaaactaattaaatgaccagaaaactgtacctggagagaatgaggtagatgttgccggatccgggaccgcggtctttgcttgcttcatgaaaaatcggctagtctccaaactcgcgaaggaaaattcaaggcgcctcaactcctccttctaaattttttaataaagagcctagaaagggaactttccctgggcctgccgaagccccagcctggctctcccaactccccagcggccataagtgtttttctgcttccgttcgggcccccagtcttcccgtcttcccgggcatctctgagctcttgccggatcaaggctgtggtcatcgcctcattcatctctgccccttggcctgagcctgcacatttggcctccttcttaaaacaggggctcctagagagtcccaaaagccattaaccatccccatatgtgggatcccttccctgatcacacaaagcagaagcctgagaaaaaaagcaataaagagtggcctcctggccctccttcccctcttctgtcccttgtctgggaaaggggttcccaaccccagccccgccaagagcatattaagaagctttcttcctcccttcctttcctatctccccctcagatgctgtgatcctgactccttcttctgtctccacctcaaaatatttcctcttgcattttattgttattctgttatggagggactgttaactactgttttattattattattcattatttattgttattatgattgttgttagagatttgttcaccaccgttcaggggacagcagcctggcccagggggaagcctgcctctctctctctgtctctctctctctctctctctctctcacacacacacacacacacacacacacaccctaacacagtgcacactcacgcatatatgctcacaaatgcctgctgtgttcaggcccctgcacagcaatccgaagaggcaggcatcctaccccagcacccaaacaacacactgcccatgcacaccagcattcaggcagaacaccacccccagaccaacgccaaaacccacacgcaccgagcttgcaaggaaaggaaaatacgtaaagaatcccttctctcccacaacctggaggggcgagtcaggcctctgtctcttccccccagtcgctttcgctttctcttttttttttctccttgtttacagcttcagagagctcaaggcccataaatcttgaggggcctacagagcgcagagcacatttgtatgcatcgttaggactcgctaatacctaagcccattaaggagcgtgtatgcgcgtggtttccggtgtgtattaacttatagttaaattctggaggaaagggcattgtgaattaacatataccaaatccatcatgggcttttgtcatatcagattagtcagtcatgggtttgggggagcaacttgcctgggtcggggtgtacccacccttcaaactttgtggagcaggcccgggggtcttgggaaacacgaaggcattcctatccagccccagtcattcggatcccccaggcctagcggctgcacacctgcgagatggcggagggactgcagacccgggtgcgggagaccagcgccggcgaagacaggcgggcgagggaggcccctccagcgtcctgctggggttgagttggggcggctcgtcccgtggccgctgggtcgtctggtttccgctttccgaaagaaatgagaggagaggcaagtggagtcgctgaactttaattaaaccgtagagaagacagtggggggaggggaaaaaaaacgatcggagaaggaggagaaggcggccgagagatcgaggaaaggaagtcctggcggctcgggggaacttggagatctctccaaggggctgaaagctggaagttgtatgaaggtgttccttttccacaccccagctactctgccccagtcgaagaggctaattctggccctcttataaaaaaaagaaagaaaaggtaaagaaaaagaaaatctaattatgtggcatgtttcagccaggtgttcctggttccaatgactcagaccctattggagccccgaggatctggataattgggcctgcatagacagagatgaaggatgccatttctaaaaggaggaaggggaaaggaaagtccatctcttggggtcttgtagaaaatgccaaagaccaaacgagctaaattattgtgtccgtgtagatctatttgcctatttacatacagcaggctgtgtgggtggggggtgagggaaggcaaggaataaacgaccaggatggagcgggctggcagtagagaaaatgagccccccgccctttgcgggaacagccaaggggcctcctcagctcgcagctcaggcggccgtgcggcgggccggtccggggccgggggccggggccggggccggggccggggccggggccgggctgggggaggggaggcgggggcgggaggggaggcggaggcgggccctcccctggcgctgtgaactttagctgggccgccgcctgtcagccccagaaagcgttaaaggtgcagcagctcgcgccagcctccgcagccgcctttgtacgcgtgatttatgacttcaatcttggttcaccgagagttcacacggctttcgctgctgttgaaggttaaaagatggtcttcgcttgacaagtgggactattgaaaattccttcttctttttttttattttattttagaagcgaagagcagaggctcaggagagaaaaaaattggggggggggggcgggagacaggggttgcaggtgggccaaaatggtaggtcaggaaggtttgtcttcctatatttgggattttttgttgctaggatttgtgtgcgtgttggggagagggtagagaataagagggagctaggcaagagatgtaaagatctctcatatttagaggccaaaggagtgggaaaaaaaaaaaacaactcgtgcttccaccgttaattatctgggtaacttgggtcacaccccctaactgatcctcctctagagaccggaaatgggccaggtaagggagagagtttgggtaaagggtaaggtttgtgtgcttctcactgggtgtacttgatcatccaccttacttgggtaactacttttttttttttttttttttttttttggaaatggggtccagctctgtttcccaggctggagtgttgtggcaccatcatagttcactgaagcctcaaactcctgggctcaagtagtcctcccaccttagcctcttaagtatgtgagactgcaggcatgtgccacacccccaggctgggtagctgcttttcaatgtgcttctgcacccacagatttggacaagggtatttttaggcagcagtctttcaactctcttcatcctgaaggtttagcctgccatttacatttgatgcacatgaagaggctaatgggaaggaaatctatagaactggaattggaagtcctttcgaatcccaaatccccttggtctaagagccagtctctcttctttctagcattttgaaaaaggtcgtgccacagcagagatggtggttaaagatctcctaaagaccagaatctaaggcccctttgtgatctaaggctctgagtacttggagagacaaaactcactccttctttgtagatt

SEQ ID NO: 1884882 - DNA, 4001 bp, Homo sapiens
gagatggattaaaatctttctgacttaatttattacagagcacctaccccaatgcctgactcaaatatgctcaataaatgtttgctgcatggaaagtataatatacagaaagaccaaaagctccataaactcaggtcccatgttcgttcttatttccgaattcccagtatctagcagaatatctaccacagcatagaagaaattcaatcattagataaataaacttttgccccctctagttcctcttcagcacagctcaagagggagagactggtaggggagacatcaaggatgattatgggtaaaggctgcttggaatggaaaacttgaaattacttggagaattcatccactttccatcaaaaaaaagcttgggagagcagaaagagcacaggctctgagttcaaattcagtttccaaaaatctgcaattttgataaattaaccaactaacctctccaagactcagtttcctcatcttaaaatgagaataactcatatgggtgctcactagaatggaagctccatgaaggcagggactttactttgggcccactgtatccacactgcatttaacagcacctgggcacagcacaggctctcaaatatttgttgaatgaatgtgtatgaaattgattgagctaacacaggtgaagtattaacagagtgcctgacacgtaattaccaccggggcaatgggaatctttgtcatcaccaccaccgctactgtatcggtattattacagttcccggaggtcgtagagcggccgcttcggggggaaaggcctggtttcaaacctcgactttcccattctctggccgtgtgacttaggataaattactgaaactattcgggttcctttttatttccacaaaaatttgtgttgggagaattagaggatatagggaaattacctaagagagtctggagccccggtggcacgagatgcatgctagagattagtattaaggcagaaaatcgccgagtcctcttttatccagataactgccttcaattatttcccacattactgtagctgagtacataacaagaacgcaaataagggtggaaggaattcccgagaccgaaaccgctaaatgagaaaagggaattaaaccgtgcttgacagttcccaccaagggatggcagtttccgcgaccgtcggccagtccagccagcccagccagccgagactgaagcaggacagtcagcgacataacgaacaaaaccgaagcagacgcttagaccctccctctaacggtctccccgccgctggcctcaggcggccgccagactcccgtttccggccctcgcggtaccacagttcccagcatgcccttggcgggaattctttccggctggatgactaccaatcccagcatgccattcggcacgccagtaaattagatggaagagcgggatagccccattgcatgcagggaattgcagtccatttagcggctggttcatagatgggcggggaagagccgggttgctctagtcctttgagaatgattcatagaggagggtcaggaaagaagaacggttcagtctgtgaaagcccccttaaaagactggacagttctccgagggagggagaggcaggagagcaagcagggccttgggcctgactccgcctcggtccgctagccaggcctcgaccgagtcctgggccttgtcaggggcggccgtgaggcgccggttgctgggggagcggtgacgtcgcggggtgaaagttgaggggcggtgacgtcgggccggcccgggcggaggctggcgggttggaggcaggacggagggagggaaagagggaaggaaggaagctgggaaggagcgagcgggggcgcgaggcgtttacctggaggcagcggcttgggcgcgcagagcggccgcggctcccccgcacctgcggccatggatgaggagcgcgccctctacatcgtccgggccggcgaagcaggggctatcgagcgggtcctgagggattacagcgacaaggtaaagagtcctggccccgggcgtgcggtatcgcacccccgggccgccctccgtgcttgcacatcgcatccttccccacccccctcattccggggatgcgcattgctctcccccgaaaacgtttccggcttgggcatgcgtgtttgtgcccccagccttttccatccatgcatcctgcatcccactacccccactgtagcgcccactcctctgattcctggcccagcagcttgacctccggtcctcctctcaagcgtgcaagtcacacccccggaatccgtagatgtgcatctgtgccccgtgccccactcctggatgcataaatgcatgagaggcttcctcacctgtatagcataaaaatacgtgcttccctgcataaacacggcccttgacatgcatcaaatgtatcagcaacgatggcagtttctatacgtttagcactgtacggttttcaaggcattgatgtctcatctatggtctcctttgatcctcagagtgtttatagggtagatggtatcatcctccccattttatagatgaggaaaccgaggtgcaaagagctgaaatcacgcccaaggtcatggacatataatgttgtaagtgggtggagaatgtaactcctaatgatacctgttatttgtatcgcattaacagctttcctatccattatcttatttaatcttacagcaatcctgtgaggtattatctgcattttgcaattgagactctagattggttaagtaacttgcccaaggtcatacttggagctggtattccagtttagttctttccacttcacaactctgcgtaaaagagtatcttgttataaatcccagtcacttctcagaacctctttccaagaaccgttagctcttcattacttttccttccaggaattttacatgctcacttcaaaagatagcctaccacacctttatcctttggtttagaagactgctttataggaatgactggcgactcccttctgtgaaaacacacccaacaccaagtcacaacctagctgttaatgtttttctttcttttgcccccgtacatcgtctccccttcagtgtttgctttgtgtccaccactgcatccatccactttgtattactgacaattggtgtcttatttttgaatcttttccacccggggcagaaatggcatactggtggctgaattcccgtttaatcttcccaacaaccctgggaggagagtgatggtattccccaattcacaaatgataaaatttagaatgataatgtggtcccaagtccacacagccactgagagatagagctgagatttgaatttacgttgtccaactccaagtccagcgagcgctctttctgccgtactgtgttgctttccttgggaagattcataggttctatctattcatatcttagctccttcactttctgatacactttattgttgaacatgtctgcctaatttaggaataactcattcaatgcatagttgtacatattgtggagattatgatttaacccgatttattactgctttccagaaaagatataaggcagcttcaaactgattttcagaagcaagaaatgcaaagagaacttggccatttgttgaatcaactaatgtttatttagcacttactatatgccagatacccagcaataaataggaatttgtttctgtaggggaggaaggaggaaaaaccttcaactggatataatcacgttctttaatatttctccttccctttatggctaaactaattagactccagatttgcttcctccaatttatctcttctcattggtctccctccagattggtatctacttaccactcctggccaggtgctgtcagagcttaaatcctgaacatctccagctccccttttgtattgggaatgtttttaaggttgttttgcatggtgtgtcttgcttaaggtggtatctgaagtgtttcaaaagattcccaaacccttgtaattttgggatcaagcctgagagtgctctgac

SEQ ID NO: 1884883 - DNA, 4001 bp, Homo sapiens
tggcggcccagggcttccagcatgtgccctaggggaagcaggggccagctggcaagagcagggggtgggcagaaagcacccggtggactcagggctggaggggaggaggcgatcttgcccaaggccctccgactgcaggctccagggcccgctcaccttgctcctgctccttctgcttcttcttctccagctttcgctccttcatgctgcgcagcttggccttgccgatgcccccagcttggcggatggactctagcagagtggcccagccaccggaggggtcgaccacttccctgggagctccctggactggagccgggaggtggggaacagggcaaggaggaaaggctgctcaggcagggctggggaagcttactgtgtccaagagcctgctgggagggaagtcacctcccctcaaacgaggagccccgcgctggggaggccggacctttggagactgtgtggggcctgggcactgacttctgcaaccacctgagcgcgggcatcctgtgtgcagatactccctgcttcctctctagcccccaccctgcagagctggacccctgagctagccatgctctgacagtctcagttgcacacatgagccagcagaggggttttgtgccacttctggatgctagggttacactgggagatacagcagtgaagctgaaatgaaaaatgtgttgctgtagtttgttattagaccccttctttccattggtttaattaggaatgaggaacccagagcctcacttgttcaggctccctctgccctagaagtgagaagtccagagctctacagtttgaaagccactattttatgaaccaagtagaacaagatatttgaaatggaaactattcaaaaaattgagaatttctgaccacttaacaaacccacagaaaatccacccgagtgcactgagcacgccagaaatcaggtggcctcaaagagctgctcccacctgaaggagacgtgctgctgctgctgtcgtcctgcctggcgccttggcctacaggggccgcggttgagggtgggagtgggggtgcactggccagcacctcaggagctgggggtggtggtgggggcggtgggggtggtgttagtaccccatcttgtaggtctgaaacacaaagtgtggggtgtctagggaagaaggtgtgtcagcagggaggtccccggcacagctcccatcccagaacccagctcacctgccttgagaggctcggctacctcagtgtggaaggtgggcagttctggaatggtgccaggggcagagggggcaatgccggggcccaggtcggcaatgtacatgaggtcgttggcaatgctgggcaggtcaggcaggtaggatggaacatcaatctcaggcacctggcccaggtctggcacatagaagtagttctctgggacctgcaagattaggcagggacatgtgagaggtgacagggacctgcaggggcagccaacaagaccttgtgtgcacctcccatgggtggaataaggggcccaacagccttgactggagaggagctctggcaaggccctgggccactgcacctgtctccacctctgtcccacccctcccacctgctgttccagctgctctctcttgctgatggacaagggggcatcaaacagcttctcctctgtctctgcccccagcatcacatgggtctttgttacagcaccagccagggggtccaggaagacatacttcttctacctacagaggcgacatgggggtcaggcaagatgacacccgctgtcctgagcccatgttcctctcccacatcatcaggggcacagcgtgcactgtggggtcccaggcctcccaagccgagccaccccagtcaccccctggctcctgggctatgtgctgtacctgtgtctgatgccctgggtccccactaagccaggccgggcctcccgcccacacccctcggccctgccttctggccatacaggttctcggtggtgttgaaaagcagcaaggagctgacagagctgatgttgctgggaagacccccaagtccctcttctgcatcgtcctcaggctccggcttggtgctcacgcacacaggaaattccttcagcttctcctgggagggccaggatggccaagggatggtgaatatttggtgctgggcctaatcagctgccaccccatcccagtcagcctcctctgggggacagaaccctatggtggccccggctcctccccagtatccagtcctcctggtgtgtgacaggctaagttatgtgcgcagccagcagacctgcagggcccgctcgtccagggggcggtgcttgctctggatcctgtggcgggagcgtctctgcaggccagggtcctgggcgcccgtgaagatggagccatattcctgcaggtgctctggagcagggtacttggcactggagaacacctgtggacacagggacaagtctgagggggccctaagaggctcagagggctaggattgcttggcaggagagggtggagttggaagcctgggcgagaagaaagcccaaggtacaggtgggcagcagggcagagaatgggcggcctcagaggcacggggaaaagtctcaggacacaggggtatggggactaccttgatggccttcttgctgcccttgatcttctcaatcttggcctgggccaaggagaccttctctccaatggcctgcacctggctccggctctgctctacctgctgggagatcctgccatggagaagatcacagaggctgggctgctccccaccccctgcacacctcctgcttctaacagcagagctgccaggccaggccctcaggcaagggctctgaagtcagggtcacctgcttgccagggccgatcttggtgccatccagggggcctctacaaggataatctgacctgcagggtcgaggagttgacggtgctgagttccctgcactctcagtagggacaggccctatgctgccacctgtacctgctatctgaaggacagcctccagggcacacagaggatggtatttacacatgcacacatggctactgatggggcaagcacttcacaacccctcatgatcacgtgcagcagacaaagtcgcctctgcagagggggaatggagaccggaggctgagactggcaaggctggacctgagtgtcgtcacctaaattcagacggggaactgcccctgcacatagtgaacggctcactgagcaaaccctgagtcccgaccaccgcctcagtgtggtctagctcctcacctgcttccatcctccctggtgcggggtgggcccagtgatatcggctgcctgctgttccccagatgtgccaagtgcattcttgtgtgcttgcgtctcatggaacgccatttccccagacatccctgtggctggctcctgatgcccgaggcccaagtgtctgatgctttaaggcacatcaccccactcatgcttttccatgttctttggccgcagcaaggccgctctcactgcaaagttaactctgatgcgtgtgtaacacgacatcctcctcccagtcgcccctgtagctcccctacctccaagagcccagcccatgcccacagggccacactccacgtgcagagcagcctcagcactcaccgggcacgagcgagcctgtgtggtgcgcagggatgagaaggcagaggcgcgactggggttcatgaggaaagggagggggaggatgtgggatggtggaggggctgcagactctgggctagggaaagctggcatgcctctaaaggttggaatgaatggcctagaaccggacccaataagccaaagccacttccaccaacgttagaaggccttggcccccagagagccaatttcacaatccaggagtccccgtgccctaatgggtctgccctgattactcctggctccttgtgtgcagggggctcaggcatggcagggctgggagtaccagcaggcactcaagcggcttaagtgttccatgacagactggtatgaaggtggcc

SEQ ID NO: 1884884 - DNA, 4001 bp, Homo sapiens
ctgtcctgagccctggggacacgctgttgcactctgttgagcctgacagaatgcctgctcttccaggcacttactctcctgggaagcacagccaggtgaacaggccacgagaatacaccgtggtcagtaccactacaggggcagaccttgggtgccacacgaacacacaaaaggagcttctaacccagtcttggctggacagggaaggtttcaagtgcagaaaagaaggttccagaaggaaaaaaccagtagtatcttgctatcaaatctatccattatttaggtttctttgggaaatttccttttcatttggcattatgtcatcgtcctttcaagggtattcactttttgaatacatttcaatcgatatatatttatcgaaccctgaagactaaaaagcctcatcgtcattctcctggaggattcaccatttgctcggggctaaaggtgtatgaagacaaacctttctcctgagaaaaaaaatgagttcttaggtcaaatatttcaataatctaccctttaagaaaaatgtaacactgccttggaatgcatgatttcttcataagacttcctttttacaattgtgtgtggctttctacccaaactaactttaaacatccctccacaataaaattcaggaaggccactttaataaaacgagggggaaaatcccaccaaaatgtaaacttaatatttcaacacaattaaatttattaataaagaatttctattgcatagtgaacaaagcattggatttacctgacagtttggggtcaaattccagttcctcctcttagagaaggaatggccttgggcgagttatctaacttctccaagcatcagtttcctcatttgtaaaaggtcaataatggggtaagaatagcccctacctcagagttgatgagagaaatgaatatgcacacatttacaaagaccttaaagtagtgcgtaccctaagccttatatgaagattattattctttctaattacaataattctaattgcagaaatctatgcgaaaacaatacacagttctggccaaaagaagttaaaacaaatgtgaaaaataagcgacatccagaaacttcagcagctcccttctgtcctatgcctcaaggtaccagagagggaaaaagacccccaggagaggctgtgaggaaacctgaactgcaaacccaccacgatgtcttcctgggaaaggcaagttggtaaagaaagatgtgaactctatttcagggtagtatgtttttttcatttgcttccaagactttgatggaatgacttgagaggaaaagttcacaattactagaaagaacctaaaaggacatgagagatgaaaccgttgcagtatttttgaaataaatgttttcctgcaagagcagagtcatgggcggggtgtctgtgtaatatctactcaacacagccgaagggtaagaggaaatcttggtaagccgacttccaagtcttaatggggaaccatacggaaccaactgcacgccaaatcccacgctcaccgaagcttcagggattttcttgtgggtctgggggtttaatctgacagctcctagagccttcaggacttcccgggcacagataatgggccgcgactgcacccccgcgtccctccttggggcgcaggctttccacagctacagttctccacgtcagcagccacgtacacaagcgccggcagctgccaacagggcgtgcccgcttccaaccctgcactctcccaagcaggacatccctgcaccgcccggcgcgttcgcgaaaactccgcggggcctcgaggcgtcccgggattagccctgacgctgtagggctctctaggttttccacgacgcaggggagcgtaactggagcgcacccgacagcctctcagcttgcccaggctcgactggatggggctttgctggacccccgacccgacccccacacacccgggcggcggggcccaggtacctgccaacgcctccgcacctcatcgtcccctctgcttcccctcctccctctccccgaacccttcccccctcctccccgcctcctccccgcctcctcttcgcctcctcctccaccttctcctccccccgacccctgctcccactcttggctccaagtccgcgcgcgggctggggaggcggtgccgaatgaatcaccgtcacgtgggtcgcgggcgcgcagaggcgggctgcgcccgggcggctctggcgctcggagcgttagtggaaaatttccggagatctactggggctgcgcgccgcaggccccgcccgccgcctccccgctccttcgtatccccacctccttttccccctccctcctccttttctctcttcccccgccgttttccggtcgcagccgggccccgacattgcggaggttcctttctctccggggagcggcgctgcgcacgccccgcccgctgcagcgccccaggctggcgccgccagacccctttgccctggggccgccagccctcgcttccttcgcgcggctccaagccgccacgcggccttgcccccgaccttgcgtgtagcctgctggtatcctgagaggccaggagcggcgtcctggcgcctccgccttcgcctctggggcgccgcacccccgccacctccgttccgcattgagtgagaccccccacatctccgggcggaatgtgagacaaagggagaagacggtgacgatgggcgtcttgtcttctcatttagaattactgcaccgccgtttaaacaaagcacatgcaaggccaattgtgttttacccactcccacttaaccactgagaaaataagctattttctctatcccataacattctccacttcgttttcccaaccacgaacaaaatttattcctgagacagcaactttgaggatttcgttgacctcatccatgtagaagtgacaaatggttacacaacaaaattgtttcactcaaagggggttgttgtgtacgtggttcacctcaataaaacacacatttaactgtttcagcaactgtttagccctggactgtcgcccgggttaatgtcgctgaatggggtggggggttgaaaagtggcattagcgccacgtgtcccaagacgaagtgacatggaaccggaggcaggtgccttaatcagtcacgaagtgccaacgatgtcagtcaaaacagttgggagttttattgagtaaagatctcagaaccaagcccatatattaaatggttcccatctaagaaccagaattgcaggtgtgttaattttaataaatcgttatttcagtatcttagccctgggcaaagaaagatccggaaactgactgaaggccaggaatgtaggttcatcgtggcctacgagtgctttgggtagcacaccttctttcagtcactgtcatttctctttagacaagaagacccctaacaagtattaaaataaaggtattttttaatgatcctgttttggaaaattgtaaggatctgaaatttttaattttttaaaacaatggagcacttcaataaaacttctattttctttactaagaatatacacagcttgttttttagcttaattcttgattgttgctgtgaccttaccacattctgaataaccttaagcatgtatatgagaatcgtatctgtgattttgctttcacatttcactttccaagacacttattggtaattagcaggtgtcagtttacctagccaaagaaccattgtctataaatccttcatctctctgccattgttttctttcacattcattggcatatactacacctagcaaaatagaccattccagggtcaaatgaaaaggccaacaggtaagtatcacaagaaggtcattagtcaagccgttatttcccctcttttatttgggaaggagatgggagaaacagagttctgatactaggtccctggaaagttcttcagtcttgacagaattgggtatgtttgtactaaagtatctgtaaaactaaatttttttaaattttttgttgttgttttgagacggagtg

SEQ ID NO: 1884885 - DNA, 4001 bp, Homo sapiens
gccagtggttgtgtattggacagagcagttataagatctccttcagccaaaaaaaaaaaaaaaaaaaaaaaacctatgattttatcattctatcattgtgaggccagaattaaggctgtagttattaaacctctgattattaattggatgctgaaatacagttagctaactgaacacacaattttaaagaggctgtttttgttcttaataaacatcaaaaaaactattatgtgcaaaataacatgtgggtaagtaggatatacacagaccaagattgaacagacatttcctgacggggacattgctctcccagtttctgctaaattccaattcagtacatcctaacaagacatggctgatcaattgtgtaagctcatgcttttaacaagtattgcttagctcaataactcccatagctctaggacaaacaactgtcctgagccctggggacacgctgttgcactctgttgagcctgacagaatgcctgctcttccaggcacttactctcctgggaagcacagccaggtgaacaggccacgagaatacaccgtggtcagtaccactacaggggcagaccttgggtgccacacgaacacacaaaaggagcttctaacccagtcttggctggacagggaaggtttcaagtgcagaaaagaaggttccagaaggaaaaaaccagtagtatcttgctatcaaatctatccattatttaggtttctttgggaaatttccttttcatttggcattatgtcatcgtcctttcaagggtattcactttttgaatacatttcaatcgatatatatttatcgaaccctgaagactaaaaagcctcatcgtcattctcctggaggattcaccatttgctcggggctaaaggtgtatgaagacaaacctttctcctgagaaaaaaaatgagttcttaggtcaaatatttcaataatctaccctttaagaaaaatgtaacactgccttggaatgcatgatttcttcataagacttcctttttacaattgtgtgtggctttctacccaaactaactttaaacatccctccacaataaaattcaggaaggccactttaataaaacgagggggaaaatcccaccaaaatgtaaacttaatatttcaacacaattaaatttattaataaagaatttctattgcatagtgaacaaagcattggatttacctgacagtttggggtcaaattccagttcctcctcttagagaaggaatggccttgggcgagttatctaacttctccaagcatcagtttcctcatttgtaaaaggtcaataatggggtaagaatagcccctacctcagagttgatgagagaaatgaatatgcacacatttacaaagaccttaaagtagtgcgtaccctaagccttatatgaagattattattctttctaattacaataattctaattgcagaaatctatgcgaaaacaatacacagttctggccaaaagaagttaaaacaaatgtgaaaaataagcgacatccagaaacttcagcagctcccttctgtcctatgcctcaaggtaccagagagggaaaaagacccccaggagaggctgtgaggaaacctgaactgcaaacccaccacgatgtcttcctgggaaaggcaagttggtaaagaaagatgtgaactctatttcagggtagtatgtttttttcatttgcttccaagactttgatggaatgacttgagaggaaaagttcacaattactagaaagaacctaaaaggacatgagagatgaaaccgttgcagtatttttgaaataaatgttttcctgcaagagcagagtcatgggcggggtgtctgtgtaatatctactcaacacagccgaagggtaagaggaaatcttggtaagccgacttccaagtcttaatggggaaccatacggaaccaactgcacgccaaatcccacgctcaccgaagcttcagggattttcttgtgggtctgggggtttaatctgacagctcctagagccttcaggacttcccgggcacagataatgggccgcgactgcacccccgcgtccctccttggggcgcaggctttccacagctacagttctccacgtcagcagccacgtacacaagcgccggcagctgccaacagggcgtgcccgcttccaaccctgcactctcccaagcaggacatccctgcaccgcccggcgcgttcgcgaaaactccgcggggcctcgaggcgtcccgggattagccctgacgctgtagggctctctaggttttccacgacgcaggggagcgtaactggagcgcacccgacagcctctcagcttgcccaggctcgactggatggggctttgctggacccccgacccgacccccacacacccgggcggcggggcccaggtacctgccaacgcctccgcacctcatcgtcccctctgcttcccctcctccctctccccgaacccttcccccctcctccccgcctcctccccgcctcctcttcgcctcctcctccaccttctcctccccccgacccctgctcccactcttggctccaagtccgcgcgcgggctggggaggcggtgccgaatgaatcaccgtcacgtgggtcgcgggcgcgcagaggcgggctgcgcccgggcggctctggcgctcggagcgttagtggaaaatttccggagatctactggggctgcgcgccgcaggccccgcccgccgcctccccgctccttcgtatccccacctccttttccccctccctcctccttttctctcttcccccgccgttttccggtcgcagccgggccccgacattgcggaggttcctttctctccggggagcggcgctgcgcacgccccgcccgctgcagcgccccaggctggcgccgccagacccctttgccctggggccgccagccctcgcttccttcgcgcggctccaagccgccacgcggccttgcccccgaccttgcgtgtagcctgctggtatcctgagaggccaggagcggcgtcctggcgcctccgccttcgcctctggggcgccgcacccccgccacctccgttccgcattgagtgagaccccccacatctccgggcggaatgtgagacaaagggagaagacggtgacgatgggcgtcttgtcttctcatttagaattactgcaccgccgtttaaacaaagcacatgcaaggccaattgtgttttacccactcccacttaaccactgagaaaataagctattttctctatcccataacattctccacttcgttttcccaaccacgaacaaaatttattcctgagacagcaactttgaggatttcgttgacctcatccatgtagaagtgacaaatggttacacaacaaaattgtttcactcaaagggggttgttgtgtacgtggttcacctcaataaaacacacatttaactgtttcagcaactgtttagccctggactgtcgcccgggttaatgtcgctgaatggggtggggggttgaaaagtggcattagcgccacgtgtcccaagacgaagtgacatggaaccggaggcaggtgccttaatcagtcacgaagtgccaacgatgtcagtcaaaacagttgggagttttattgagtaaagatctcagaaccaagcccatatattaaatggttcccatctaagaaccagaattgcaggtgtgttaattttaataaatcgttatttcagtatcttagccctgggcaaagaaagatccggaaactgactgaaggccaggaatgtaggttcatcgtggcctacgagtgctttgggtagcacaccttctttcagtcactgtcatttctctttagacaagaagacccctaacaagtattaaaataaaggtattttttaatgatcctgttttggaaaattgtaaggatctgaaatttttaattttttaaaacaatggagcacttcaataaaacttctattttctttactaagaatatacacagcttgttttttagcttaattcttgattgttgctgtga

SEQ ID NO: 1884886 - DNA, 4001 bp, Homo sapiens
cacctctacccccgctttcagctgaaaggttttaagaaaaatcttacaggttatgaggaccagatggagtttaaaaacagatccagaatttttttttgaaattttaatttaaaagagttctatgagccagaggaattcccaattcactttgaaattaccatacctattttgccatatcaaacacttcaattctgttaattaaatgaactacatagtatccttaaaaatcagccagagaagagaaaaacaaatctcatcttcattactgacttcgaaccaaaacttattctttcaaaggagaagtttaacctactaaaatgtctattataagattttctttcttagaaagtagtattccttctttttcattcctgaaatggtatttcttatacttaaacaagttatggacaattgttagctaagtatcagttatggtaaattgctaaaattaccttttttgtttatggtacatataacacattcctatagcctttaaaactgaattttctttcacaaaaatttaaataaatgtgaaagtaggtaatcactaaagctgaagtctcatggtacataaactttgtgttaactttaacgccaaataaggatgaaatttagcatgcaaatcttccattcacaaaacagtggcaaaactttatatttttaaattgatataattttatgaattctcacatatttattgggaatattcaagtttacctaattaatcacccagaaagccagcagcactgccaaaagttctatatttagtagtcactgtgaaaacctttcatttctttaccagttggcaatggctcagtttctattttccaattatgttttggaaaaaggtctatgaccattaactatgcgtttttgttgctatctcatagccagtacactgtacatatttaaagagaaaaaaataatggattgaattttctgttcattcattcattcacttatttgaccactgggagccatgtaagaagctcacagactcagaagctcttcagctcttcctcagactcaagtcactgttggtcactaatgctgacaaagaagtactttccgacacatcttctttccttaggttcaaaagtgattctcgagttatttataggatctctctaacgcctttgttttcttgttcaagttgaaatattagttcttgttccttgcaatcctgttgcttgtcaatttcaatggctttcttcattactgctgccatatttcatttatctggtcaacatgtgcctgtatccttggagtgctgcttttgttaacttcattatttttcccggatcatcttttttgctagccattagcaatctaaccatttgttctcgatacttgctcatcgtaagttccaaggccgactgatgttcttccagggatgtacgcaattcttttctttcttgttgcaattctctgatttgtctgttttcttgctggattcccataactaacgtggaccgtggccgatgttcttgcgacttcattaagctcttgaatttctttctgatactgcttcgtggcttctactcgcttattgagagctgtggtttgctcaatcagagtttctgctgcatcgtcgtgatctcttaatctttcaacaagagttttagcatcagcaagtgccttctcaattgtgcaactcatttctaaagatatatcctgctcttagtccctcgcagccgtcagctgtggcgatgaggactcaaagcctctaccaaccgggacctatgcacccaagggaagagactccgcgcccctaatctgcctcctcagttagcagacgctgaaccagacggaggcagcggaggtgtggccgtgaagccagtagcgtttagccccaccaccggcgggggagacacctctgctaaccgcctccgccaggggcgccaaaaggactccagccttgcgagatttccttcctcgcgttacggtggggcagggccgaacacttgaagctttgcgtgagaaggctgggcggggtccttccaacttaaagcattctgaggttcctgaattattcaggaagtcaaagatattaatcttggacttcagtaagtatgcatgttaaaaatttaacagttaactactaaacagagaaatagaatgttcaacttaaaaatcagaagaaaaaaggactccatatatacaacagaatgcaaataagaagtgtggtcaccatggctcacacttgtaatcccagcactttcgtaggccaatgtgagaggactgcttgagaccaggagttcaagaccagcctggccaacatagtgagatcccatctctacaaaaaaattaaaattagctgggcatggggacttgtgcctacagtaccagctacttatgaggctgaagagggaggatcacttgagcctgggaggttgaggctgaagtgagctaggattatgccactgcactccagcctgggcaagagagtgtgaccttgtctcttaaaaaaaaaaaaaaggaaaaaaaaatgtggttcaaggctaggcatggtggctcatgcctgtaatcccaacactttgggaggctgagacaggtggattacttgaggccagaagttcaagaccagcctgagtaacatggtaaaaccccatatatataaaaaaataaaaaaaattagtccagcatggtggcacatgcctgtagtcccaattgctcataaggctgaggcaggaggatatattgagcccatgagtttgaggctgcagtaagccatgattgcaccactgcactccagccagggtgacagagagagaccctgtcaggggaaaaaaaattattttttaaaaaaaaaagtagggttcaaaaaacaagtataaatgaaaacagcagaaataagtgtaaactatcagtaatcacattaaatatgaaaagattacatttatcaagacaatcagatttttgaaatacaactatgtacagcttacgaagaaacacttaaagcaaagtaagccagagggctgacaatttaaaagatggtttaaaaaaatgtgctacacaaatattaatcaaaaaatcttattggtattcattcattaatattagtaacagagacaaaaagacttaaagtgaaaaagccaggcatagtggtgcacgcctgtagttccagctacccaacaggctgaggcaggaggattgcttgagcccacaagtttgaagccaggctgggctataatatagcaagaccctgcctcaaaaaaaataaatacttaaagcaaaaggcattaatatgtgatcataaagagagagcccacaggattcatcaaaagagaaccccttacacctgcagtaagatactcctctccattatgaacagatgtgtcagcaggggatctaggtaagaacgcccctgctccctccccacactcccaccctcacctccagtgcctgcctgctctccaccaggcctaatctcttcaggttctttatctctgcttatgctgtccatcaaagaagccccagactcccacatctctcatctcccatctcccacattctttttttttttttttttttttgagacagagtctagttctgttgcccaggctggagtgtgcagtggcgtgatctcagctcactgcaacctcaacctcccagcttcaagagattctcctgcctcatcctcccgagtagttgggattacaggagtgcatcaccgcgcctggccaatttttgtatttttagtagagatgggttttcaccaagttggtcgggctggtcccaaactcctaaccccaggcgatccacccacctcagcctcccaaaatgctgggattacaggcatgagccaccacgcctggcctcatctcccacattctaatccccacactgttctgcatatctctagttccgtctccatgtgtcatccacctctccaaactttgaagcgctttccctacattttcagcatcttctttgaatattcccttcaacttcttgctctaattaaaagccggttctcctctggggccacactggcctct

SEQ ID NO: 1884887 - DNA, 4001 bp, Homo sapiens
aaaagaggaatggccagggaaggtctttcagaggaggttacatttaagtaaagactaggggagtgcagaaggctgtgcagacacttgtctgctaggtgtgagtcagtgggaagggaatctcttcctgtactgctcgaccttcattaaaatctgcatttataggacttgcctctaaggatgtttcaaaaattgttggacgataataggtgttccatgaagaagagcagcaggccctataagtttggttaacactaagtttaaacagtttcctttactgcaagacttctcagaacccttattatgctaatgtacaaggtgactccactagagggtgccttattatgcagcatttctaagcattttgaccacgttgagcaggtcagcacatagtgacctataaaacactgtaactttttagaaaggcaaccatataggacttttaagacttgtcttgaaggatgtgtcaaaagcatgtccagtgctctcaccctgggccaaacccctgtccctcaccagctcctctcatccctgggcagcacattcccatcctccaagggtgggtttgattttggagccaaggtagggaaagaaaatggatgatcgaactgggaaaaacccttttttggtattctgaaaataatgagactaatttttttggtgtagctcagaagcttttgaaccagtctctaaaggaatttccagaagactgttgaacaaaggacctcttggaataaattcctaataattttccaagatgactattctgaaaaaaaaaaaaaaaaaaaaaaaaaaaaaacaaacctcagttataattttaaaattctggtatttgtttaaaagtaaggtttcagccttggtacgattatagattacaaaagccaggttcttccttgtttgctggtaaacacatagtaggcaattcaaaatgttggtcaaacagaagagtggatggatagaacgatatggaataaatgaaaataaattatttttctccagctcttggtctttgaggaatcagtggctccgatagcttgttgctcatttctaagaagagcagaaatagtaaagacacacagtaaagagagagcagaaaggtttcccatcctgcataaacagagaaaatttccttctgtccacatgggagagtctgtttttgttttgtttgtttttctttttctttaacctcgaggttggcaaaataccctctttaaaaattctgtataatcaattttattgtatcctcttccataaggatactccaaagttggtcacaccttcgaccagttgaaaggcagtaagaagctcttgtctccaacctgcatcatggccttatagagaaactcccttggcaaattgacaatgacagaagaaatctgggggggtgggccaggtgcagtggctcacgcctgtaatcccagcactttgggaggctgaggcccgtagatcacttgaggtcaggagttcaagatcagcctggccaacatggtgaaaccccatctctacaaaaaatacaaaaattagccgggcatggtggcacgtccctttagtcccagctactcaggaggctgaggcaggagaattgcttgaagctgaaaggcagaggtttcagtgagccacgattgcaccactgcactccagccagggtgacagagcgagacctgtctcaaaaaaaagcacattctgcacatgtatcccctgcctttttttagaagaaattaaaaaataaataaataaatctgggggtggctggtgaggaatgtgttgttgtgccctacagaactgaaatagaagaactcaagatcagagcagtagcttcactgtggttgttgattttagctacgtgatctctgaatagtcaagaagtggtctggtctgaacatattagatgatctggctcttaagaagttataaaggtgaactttttaaggttacggtggtgtgtcataactgtcatcccacctgaagccaccggaaccatgctcctcccccacccacagagtgagttccaggtgggaaggcagttatgacagttgagaagtagtagaagacacggaaggcacagaaggcagacttcgctcagcacaaagaattttctgataaccatactggcaaaatgaactgggctgccttcggagggtctgaattcttcatcccagaaggcattcagatagattcgagatgcccactaagcagaaatatcacggaatggtatcaggagtaaaggagggttggggagagggaaggttttgacgtgctcatctcttccctcctcgcaaaagcccttcccataattcaaaatgccttctcatctgtatgattttgtgactttcattgtatctccatgggtagagaaaagtagttaatatgttgtgcggtgtttctgaaagcgaggtccacggatgacctaacatttgtattgccacgggactgtgaaaatcgactctagacgtactaaataggagtctttaaggggggagcagggcccaggagtctctattttaatggttttttttcttcttcttcttttagtcctagctactagactaccagggatattttaatatgttttgtaagtgattcttagtagtagtaaggtttgagaatcactggcttagtggttcaaagcacttgggaggttcaaatcctgcctctgctccttactcactggctgatcttgggtgcatgacttaaattctctgggccttagtttccttatctataaaaatggggataataattaattctagctttatggggattttgtgagattaaataagataatgtgtgtcaagcactcagtaccagagatctcaaactgatgtgctttagaattacccctatggtgcttgattcagtgctgattcctgggccccattcccagatgttctaaatcagtaggtactgagagagggcccaggagtctgtatttttattaaactttaaaaatgattctgataagatcaaagtttataagactatcttgcagtgttttcagtaggatagcactgtggcttcatagtcaaaaagacctgtctgtgttcaagaacctgttcctcccctaaacagctatatgaccttaaacaaattatttgagctttcttgcctccagtttctcatgtgtagaaagactgtaataatttccattattggttattttacaaattaatgcatgcaaagtcctttgcaaactgcctggcatgtagccaatatataatgctcaatagattatagctaaaatctaaacaaaatgcagcctccaatcccttgttagtcttaattgaaaacattgctaatattaagcctattttgagttaataaaaagttctggtcttcgctttacattcagtgtcaactgaagcactgaatttacctttttaaaaatacagttctttgagactaccatttattgattaagaaaaacataggccaaggccaggcgcggtggctcatgcctgtaatcccagcactttgggaggccaaggtgggcagatcatgaggtcaggagtttgagaccaacctgaccaacatgatggaacaccatctctactaaaaatacaaatgttagctgggtgtggtggcacatgcctgtaatcccagctacttaggaggctgaggcaggagaatcgcttgaacccgggaggcgtggaggttcagtaagctgagattgcaccactgcactccagcctaggtgacagagcgagactctgtctcaaaaaaaaaaaaaaagaaaaagaaagaaaaaagaaaaggaaaacacaggccaaatgaatttttattagaggtgcagttagtagtcacaaacatatcctgcttgggtccccacagagaagggaccctcaagtgctggtatcccatttggctagacatgagagatcaagtactaatggaaaatttttcatcccctctctgctttgcaaagtatttgacttaacgttttctgtaggaggcaattttggttatttttacctgcctgattgatggctggcactttggtttaattc

SEQ ID NO: 1884888 - DNA, 4001 bp, Homo sapiens
catgagccaccgcacccggcctaaaatttcattttttaacgcatatttatctcaattgttttttgcattttccccatgtggctcatgagcacattattctaagcgtaagtggtagataacctgattcaggtattttgaagaggaaattttgatagcaaaaacaattttttttttttgagacggcgtctcgctctgtctcccaggctggagtgcaatggcgtgatctcggctcactgcaacctccgcctcccgggttcaagcgattctcctgcctcagcctctcgagtagctgggactacaggtgcccgccaccacgcccagctaatttttaatagagacggggtttcaccatgttggccagaatggtctcgatttcttgaccttgtgatccacccgcctcggcctcccaaagtgctgggattacaggcgtgagccaccgcgcccggccagcaaaaacaatttttaaggaaattttgaagtgagaagtcaggcaaagaggccccaaagatcaaattgcaggccaggcctgcacaactgagaaatgagaaagtaccactttcccattttcaaacattataacaaacatttctctatctgattctgaaaaccctgtaagaaagacaaggcagatggttttattcccatttcaagagattgatgatttacccaaggtatatagtttgcaggtacacgtggctgataaatgttggaaactggctttcccaactcttcttttccttgcctgaagctctgtcctggacttaggaatcccagtggtgatttggagtggacaagacttgagtcttgaaggacaggactgcagggagggctggtcctgaggaggaagcatcttcagatacctaggtcttgggatcttgggtggggaataggctgcttggggaagggctgaattggaaggaggagctagaggtctgactgagggaatggagagggggcctcaaaaggaagccaggcaggctgccttcttcccagctccagaatggcaccccctctaaagtcacactcacctacgtacatcctggagtgaaactccttctcctttctgcttccaccattactctaatcctcaaagggttaaccagctttcacacgattttcccatctcccaggtaacttgggcagctgctccgtgctggaaataactaaagacccagtttctcagttcgtgcacttagcaatgcaccccagtagcccctccaacccccagcagagaagcacagccctttgggtaaaagatgcctgggggtgaggctgcaagttggcaggtgcgggggaggggctcccagagagtagggcggggggttgtgggggcggcagggagagtgccccttccctgggtccctccactgggccccgaggttcgcctcggggccgctgccccagagactggggggaagaggaaagaagtggtgtgcgggcaagcaggccgcacacacctggcgccttgtggaatgagagcttaattaattattaaactgagttcccgcgggagggcgcagggccgtgacaggcagggcgggaatggctaggtgggggctggggctggggcaggggcagggaggaattggggatgaagagtgggcgcggggcgccggcccaacccctgggaccctgacaggaaggaaggcgaccctcggtgggcggggcgggggatgtagccgtgaggggtgggtttgcgggcgcgctcggggacccccggggtgagggcgggagaggaatgccggaggaggcggccggggtgaagggaaggggaccgggctgcgaggtcccctccccgcggggtcttgatcccagaacagtagctgcttgtcttcccaggactgggggaggaagcggccggaggagaggagggggcgcgcggagggaggggtcccattatttggcctcctccgcccctaccccgctgctaggaaggggagtgggcaactcggcccccacttctggggagggggagggggatgcccagacaaaaggagcttgtgcctttaaggcggggagtccgggagccagcggggaggggacttctggatccggggtagagggcggctgcgctggacagctcgggagggggcgagggccgggcggacggcggacggcggacggcgggcgggacggccaggacgcgcgggctcggaggaccgcgggacggccggccggccggccggagcccgcgggggcggcggggcgggggcccagggcaggcgcggagccgggccggcaggtgagcgcgctgagggctaggggaagtggccgctcgggctcccggtgcgccaggattggaacgcacccgagcggctctcgacaagagtttgtgggtgggggcgccgaagccttggacgggtcgtctcggcagtgttgcccgagggagttggggttggcaaagggaagtcatggaggcagtgggatcgaggactcctaggtccggcgctcgccacccccgtcgcccgccgcctgcctccctccacggggcgagttccaggctggcccggaggccaggaggatctggcacgtactgggggaggggctggcctgagttttttgctgcggggctgtggggtgtctccgagtttgggggagattccatttaggggagaggaaccggcctgggcagagggagggatgccctctgtctgcgggagtccctctccttcccctcacccaaaaccttgggaatgaaaggggtggggtcggctccccacatcccccaaggcctgccgcagggtgggcaggggagctgactttattcaaagcagactctggggctcgactgaaaggctagaggtggaatcaggcgtgggagcctctttgcccatatcctctccttaccagattacccctgtgagctggagggacctggtgggggttgcatagtaaagggtgatgtgggagccctctgtaatctttagggagagtgaggactggggatgggagaaggcggcagcgggcactggaccgacagatacaggccctgggtaggctcctctacatctggaaaggcccagaattgaagaattgaggcccatgtccgagtatggtgggtggtgctggcactgctgggccccgcctgggcagtgcctcttaccatgaactttctgaagtcgtttttaatcccctggagcctccttttgccaaggagggcaggggcagatgggccctggggatgggatagacaggaggtggccaggaaggcttggcaaggcagtgggcagagccatccttagggctgggccttggccttggctggttccaaactctggtctcagcctgatcagggtttgggagggacttgaggtctgggaggcactgagcctgggcctgccaggctgaatgggacatggctgtggctgtgggagccggtggtatgaagaacagcagatctgtgagagtgcaaatggaccaacactcaggggaggagaaggtagaggcacaaggcttaggagcctgactctggggaggagggaggtggtctgtgctcccagggctcatagtgatgggttgctggacaaagtgggttgggggaccatatagagaaattttgtggcttggaacagtgctctaccctgtttcctgccataccagtctggcatggggtgccagaaatgttgggaggccggcaagttctgcgggatgggcagtgcctggagtggagcccagggtgggatggttgcagttggttggacaattacatagctctgaagctatccccttggggggggtcagagtgttcctgggagggtcatgcattctcctggatagcatttgcccctttctctgtgagtatgagccagatgctaggatgtgtttccagggggcttggaacatggccagaaactagtcctttgggaacaggtccgggccagtgctggtgggggtggtgtgttgggggagataagaacagggaaggggactggtgaatggaggaggctgaagcaaaatgttgtgggtggtggatggtggtgggaaacctgctcactctgggc

SEQ ID NO: 1884889 - DNA, 4001 bp, Homo sapiens
taatttttgtatttttagtagagacggggtttcaccattttggtcaggctggtctcaaactcctgacctcgtgatctgcctgccttggccttccaaagtgctgggattaaaggaatgagccaccatgcccagctaaaatttaatttttttttttttttttgagacggagtctcgctctgtcgcccaggccggactgcggactgcagtggcgcaatctccgctcactgcaagctccgcttcccgggttcacgccattctcctgcctcagcctcccgagtagctgggactacaggcgccccccactacgcccagctaattttttgtgtgtttttagtagagatggggtttcactgtgttagccaggatgatcttgatctcctgaccttgtgatccgcccgcctcagcctcccaaagtgctgggattacaggcatgagccaccgcacccggcctaaaatttcattttttaacgcatatttatctcaattgttttttgcattttccccatgtggctcatgagcacattattctaagcgtaagtggtagataacctgattcaggtattttgaagaggaaattttgatagcaaaaacaattttttttttttgagacggcgtctcgctctgtctcccaggctggagtgcaatggcgtgatctcggctcactgcaacctccgcctcccgggttcaagcgattctcctgcctcagcctctcgagtagctgggactacaggtgcccgccaccacgcccagctaatttttaatagagacggggtttcaccatgttggccagaatggtctcgatttcttgaccttgtgatccacccgcctcggcctcccaaagtgctgggattacaggcgtgagccaccgcgcccggccagcaaaaacaatttttaaggaaattttgaagtgagaagtcaggcaaagaggccccaaagatcaaattgcaggccaggcctgcacaactgagaaatgagaaagtaccactttcccattttcaaacattataacaaacatttctctatctgattctgaaaaccctgtaagaaagacaaggcagatggttttattcccatttcaagagattgatgatttacccaaggtatatagtttgcaggtacacgtggctgataaatgttggaaactggctttcccaactcttcttttccttgcctgaagctctgtcctggacttaggaatcccagtggtgatttggagtggacaagacttgagtcttgaaggacaggactgcagggagggctggtcctgaggaggaagcatcttcagatacctaggtcttgggatcttgggtggggaataggctgcttggggaagggctgaattggaaggaggagctagaggtctgactgagggaatggagagggggcctcaaaaggaagccaggcaggctgccttcttcccagctccagaatggcaccccctctaaagtcacactcacctacgtacatcctggagtgaaactccttctcctttctgcttccaccattactctaatcctcaaagggttaaccagctttcacacgattttcccatctcccaggtaacttgggcagctgctccgtgctggaaataactaaagacccagtttctcagttcgtgcacttagcaatgcaccccagtagcccctccaacccccagcagagaagcacagccctttgggtaaaagatgcctgggggtgaggctgcaagttggcaggtgcgggggaggggctcccagagagtagggcggggggttgtgggggcggcagggagagtgccccttccctgggtccctccactgggccccgaggttcgcctcggggccgctgccccagagactggggggaagaggaaagaagtggtgtgcgggcaagcaggccgcacacacctggcgccttgtggaatgagagcttaattaattattaaactgagttcccgcgggagggcgcagggccgtgacaggcagggcgggaatggctaggtgggggctggggctggggcaggggcagggaggaattggggatgaagagtgggcgcggggcgccggcccaacccctgggaccctgacaggaaggaaggcgaccctcggtgggcggggcgggggatgtagccgtgaggggtgggtttgcgggcgcgctcggggacccccggggtgagggcgggagaggaatgccggaggaggcggccggggtgaagggaaggggaccgggctgcgaggtcccctccccgcggggtcttgatcccagaacagtagctgcttgtcttcccaggactgggggaggaagcggccggaggagaggagggggcgcgcggagggaggggtcccattatttggcctcctccgcccctaccccgctgctaggaaggggagtgggcaactcggcccccacttctggggagggggagggggatgcccagacaaaaggagcttgtgcctttaaggcggggagtccgggagccagcggggaggggacttctggatccggggtagagggcggctgcgctggacagctcgggagggggcgagggccgggcggacggcggacggcggacggcgggcgggacggccaggacgcgcgggctcggaggaccgcgggacggccggccggccggccggagcccgcgggggcggcggggcgggggcccagggcaggcgcggagccgggccggcaggtgagcgcgctgagggctaggggaagtggccgctcgggctcccggtgcgccaggattggaacgcacccgagcggctctcgacaagagtttgtgggtgggggcgccgaagccttggacgggtcgtctcggcagtgttgcccgagggagttggggttggcaaagggaagtcatggaggcagtgggatcgaggactcctaggtccggcgctcgccacccccgtcgcccgccgcctgcctccctccacggggcgagttccaggctggcccggaggccaggaggatctggcacgtactgggggaggggctggcctgagttttttgctgcggggctgtggggtgtctccgagtttgggggagattccatttaggggagaggaaccggcctgggcagagggagggatgccctctgtctgcgggagtccctctccttcccctcacccaaaaccttgggaatgaaaggggtggggtcggctccccacatcccccaaggcctgccgcagggtgggcaggggagctgactttattcaaagcagactctggggctcgactgaaaggctagaggtggaatcaggcgtgggagcctctttgcccatatcctctccttaccagattacccctgtgagctggagggacctggtgggggttgcatagtaaagggtgatgtgggagccctctgtaatctttagggagagtgaggactggggatgggagaaggcggcagcgggcactggaccgacagatacaggccctgggtaggctcctctacatctggaaaggcccagaattgaagaattgaggcccatgtccgagtatggtgggtggtgctggcactgctgggccccgcctgggcagtgcctcttaccatgaactttctgaagtcgtttttaatcccctggagcctccttttgccaaggagggcaggggcagatgggccctggggatgggatagacaggaggtggccaggaaggcttggcaaggcagtgggcagagccatccttagggctgggccttggccttggctggttccaaactctggtctcagcctgatcagggtttgggagggacttgaggtctgggaggcactgagcctgggcctgccaggctgaatgggacatggctgtggctgtgggagccggtggtatgaagaacagcagatctgtgagagtgcaaatggaccaacactcaggggaggagaaggtagaggcacaaggcttaggagcctgactctggggaggagggaggtggtctgtgctcccagggctcatagtgatgggttgctggacaaagtgggttgggggaccatatagagaaattttgtggcttggaacag

SEQ ID NO: 1884890 - DNA, 4001 bp, Homo sapiens
aaagataagtggggtctaataaattctgttgtttttgttgtttattttttcaaggttgatatagataccagtatgtcatatttgctgatggagatgtttcagttgaggatgaaaaaaggataatgtaggagagtggagaattactagggtgatattactgatccagtgaaagaatataggatctattgtagaacatgaatactgcatctacagttccaggagtctaggcagagtgtaggggcagagatggagtaagtaagctggtgtggtgatgggagcatttggaagtttcctacaaattgttaaaattagaacaagttggaagcaagggtatagacatgagaatgagcatgaggagaatggagatgaaggacaaggtataaattgctaatgaatggcagtgaaagagttaatgcactagggaactataatacaattgccagtccctcaccctacttctttgtaactccatcataattatacctggtgtgattctctgacatgtgtgttctaagatgatctttgataaacgcctacttgagtttaagattcagcacaaatatttctcccttcattaaagccttgactacaagcagctaacttataatctcctctcctgcttcaaattcaacatagttctatttagtaattatttcttttgtgttacagttgtttgcttacatgcttccatattcagttaaagataaactactttcaggcaagaaataccattttttttcattgttatatcatcagcaggcagcactgtgcctaaagcttgatacatatttattgaaagactgattattctagaaggtgaagcaggtgactaagtttgaagagcaattagatgcactgtcttggaaaatgcttttatctctaaattgttctatattaaggaaggaaagactagttattggtatccaactgaatcaataatacaataattttaacaatttaatttaataattttagcagaaattgtttacttacattttctgggaaatcttaaaatcccccaaagaagaaaagcaatgcctccacatataaaaattgagatgatcattattttcctttctattataccaaagagaaacagatgtcattgtttatgttccagagagaaaaaaagcaagcaaaccaacaaaaaacccatcatgtttatctcttttctctatcttccgcgtgttctactgttcacaattcagcaattaatgtattagaaaaataagaaagggaactaagacctaacgtttgaacatcaggagcctcgaaggtgctttggctccactttcctgtgctatttggcagaactgtgttactaattcttctgccctgcttccagaacagaaaaccaacagtttcctcgcagcgtcttttaataaaatactgccttttccaagggaaaattccaagtatttttaatgaaatactgtcttttccaatatgatggaggaggctggaatcgccaattatcattattattgaagtctttgttttattaatgaaaactgcttttacttaagatctatattatggtcgctatcccctaccctgcccttccctcccaatgctaaaagggtgcaagctaggatcaagaaaagatgctagaataatcacacaacctcacccacctggcgtgttggtctgctgctccacaacctccgtcccatccttactctccatcccttctccctccatctccaaccctcacgaggaaggctcatccttctgtgtgtgatcacagaggctggaataatcctgcgggtgaattgcaaattgctaagtatatttggtgagtgcaaaccgcaggaaactgacgacccggtttttctgaggggtggtgcggcagcaagacagtaggagaaacagcacagcaacctagcatcctccactcagccgcgcaggtggacttgggccagatggcccccaggggcgtgtcatgtgccttctctgacgtttgtacgaggcaggggcagcaacggcagccgggcatgcaccaacggtgcctctgccccggcagcgatgactctacagcccatgatttccgcagcccacgattggctggggcacagcgataagaattcaacctaatgggcacctcacctcccacctgcttggtacgcagagcagagaatggggagtcccataccctccctttccggcttctttatattgtctccctaaaaatctccgattggacacaggtatataacataaattgcctgcactggaaagtgtacacattctctcacgccacaaagtggatctgcccccattttcttgtttttaataacttttttctgttctacatttttaaccactgtgttctaagtgtacctgtggagtgtttagtaaaatgtgggaaaacaaagccattgtttttacatgttttcataggaactaatgaaagcttgtttcatatacaggcagtttttattttgcactgtagtgtgtgataataaaaattactgcacaagctgatatcacaccaagctattttaataatagggaaaagtatgatttttcctttatcctcttttcctgattgaaaattactttactgtcactcataaacgtatagggaaatgtaaacaacaataaaattaatatttttaaagtatgctataattaaaacattaaaaacactgagtttcaagtgttttgcttaaaagaaaatgagtagtgtgaattgagtacgtgctgttgttgttctatcgcttacaatatggagccagcatcttttagatgccttctcaagcttttttattcctaaatttggatagacttccaatatactattctttgcacttgaaatgttaggaaacacattgagagttcatttgatgtgaacactttagctcgtataacttcctctgggacctcttcattcttttcatcacaaccacttaccttatttttgtcaataagtgtgcctttactaaattcctctggttgcattatctagagactcttcaaaaggtgaattattaataaccctatcaacagctattgcttctctaacttcatttctcttctattttatttcccctttcagcgccatcattttttgctgcactttgtgtcactaaccaatttcctgtttcaattaccttcctcttcttgtcttcctgtttcaaatttcctttggaatttgtcatacagtgacaaacccatgtgacatttacaaaataatacagaataactctccatcttattctgtattaactgataaaagatgcatggtgaccaatcaatcattgacagacttggaaaaaagtgacatggttggtcgttaatcacaatacaaacatgtatatagtgattcgtgaactgaaaaactagcatggaagtttctactttatacaattacttacagtaaatataatacaaatacagataagtacgctgaaagaattaaactgtgctgttggggagttatttaattaaactgtgagaagtgaagtttatgcatattagaaccacgcaaagtaaagtttatacacacaccctactccccacagacattctctttaaaatatacatatacggccgggcactgtggctcacgcctgtaatcccagcacattgggaggctgaggcaggcagagcatctgaagtcaaggagtttgaaaccagtttggccaacatggtgaaaccccgtctctactaaaaatacaaaaattagcctggtgtggtggcagacgcctgtaatcccagctactcaggaggctgaggcaggagaatcgcttgaacccaggaggcggaggttgtagtgagccggcgtcccgccattgcactccagcctggagatatatatatatatataaattttcatatatatatataaattttcatatatatacacacacaaatacatatacaaacacatacatatgcatgtataagcatatattgtatgtgtatagaccttattctatacataagaattatttatacttatttatgtaatgtattcttgtgacttcagtaattaatta

SEQ ID NO: 1884891 - DNA, 4001 bp, Homo sapiens
tctcccctgaatgtcttgccatcccatcagactcagcatggagcctgagacaatgtgatttacccactcgttcattccttcattcaaaagatagtggatttcttgttcacttactctgtaccaggaactattttaggtgtctaacagtaaaatggacgtcatgaggtaatgtccttgcccctggaagaattcaagtgccatctggatagatgggtgacacttatgccatgtgacatttgcactaggtgggaagtttggtttgatttgacaaacatttattaaatatctctaatatttaagccacctcatgtccaaaagccttgccaatgataagattctgtgtctcagcctaattaatcaccattttctctccccctgatagctgtcagttatcccgtaagtcttttataaactcccaccaggcaagggcttcaggctgtttctctgtagatgatgcccgggtcaacacgtctcatgctgccttctctcctaagcaccagccttatatttccagctcccaggaggcatcaccacctcaagtatctcccaaatcagcatgtccaaaacacaacgcagatttccacgcaaaatcagatccctttctgtgttctctgtcttagtgatggtcccctccctcctcctacccaccctgttccaatgtcattctgactccttcacttctgcatctaattattggctcatcctggtcagctcccagctgtcccttccttcccttccatctacacaggtcttcatcatctcttgcacaaatgattgccatggtattggcttccagctctcccatttctgacccttctaaagtgtccttttatcaccacctgcctaaggcacaggactgatcacatcgcctgtctttgctcagaaactgagcctccccagaggctgctcagctctggttgggggcctcaggcccatccaaccagatgttggggtttgaacaaaagcccagttagtaatgagatgcttcatttccactaggagagggtggatcaactttgggtgccaaatgtttgaccaggcagtaaagcctagtaaaaatgccctgtgatggcactgaccaccctccacacatagcaccactcccatgtcaacctgatctcagagcgtcccacccaccaccacccaacatgcctcccaccccagacacaacatccacttccagacctttgctcatatgtccccagctcctctcaaccctccacagcctctgtttgttggaagctctgtgaggacagaaggttgtcatactattcattgccagcatcaagaagagatattgtatttccaaacaaggtcacatacacaaaaaaagtagagatgctcaataaatgcttaatatcacctctttcttaataccttcccttcatgttctaagtcagaacccatcattcgctattcctcacccccagaacattctggatgtaccttccaccttcattccagcatttccttccagccagcataatctttgcatgtgtttctctcctgaccacacttagagctctcgagggtagaaagacatctttatcatccttacagctcttatggtgtctggcttgcattttgtgctcagtgatgttcaactcaataagcacaggtccagcctggttgaatgaaacgcttattgtgtgaagcctctcttcctgttgcagtgaggctgtcagttcctggtctgatacttcttttgcctagcacagggctgcatgcatagcagaccgtacaccagtgtgtgctgatccattgatgttaaagtttcgaagttgaatggtcaagctcagagtcattcttcctccctgcatgcctgcaccagacactccctaaaaaataacacattatgattttttgcttccttggacgaaagccccacttccctccactagccttcactattgcttgtgtcatctttcccctttctaactcttccagaccttttgagtcagctcctgttgtgtttctggaatcaggggtgtgtgtatgtttgagattcctcagttcccatggtaaccaaattctttattcagaatactgagctctgacattgggtgagataaaacactgccctggaggagagcttctttcaagatgaggcgtttatagataaagacgtattcacaggcttacaaagataatgtatagacttcacgtttctttcttttaggggctcaaagcactttatgagcatttcttaactcaccttcaagtgcgcgcaggaattcggagagcagtgggcccactgttattgtgctccatgtccagattggaagctgaggcacgaaccaatgaggcaaagtgtctgtgaacacaagcagagtcagccagagctaggctcccttcatacaccaggggattccgggtagggttcagtttctggcttgtttgtgcagttctgtgatgggagtcagtgtggttggttaaattagcagagaggagaactcatgtatctgttcccatagcccacccagtttgtttgttttccagtaaaaggattctacgatgaagcaatagggaaaattttatctgcattaccagcatttcagtctgcctgggaataaatgtaaagaattgggggttttcccggagtgaattttaggactccctgagtgatgacattctccatctcactctctgctgggtttccttctgcttctcagccccttctcactgtcctttgaccggtcctctttcttcacccaccatttagatattaggattctaaggagcaagcttctggcctgctgtttgcacaacatctctaccacatgtcacttcttaccatgattatagccagtacctacccactgggcactcccaagtttctgtcactagatccttctccttcccaaattggtatctctgactccagttctgtcccaagtctaaggagatttttacatggtcagacacacatttagataataattgttgcatgaatgtatttcacagagggcccttaatattcatatgccccccaaactaaatcatgaacacccctacagctgcccctcctgcctaatgttactcttcagcctttaatccctattctggttagcggcatcttcttctacccagaggcttaactggaagccctggagaatcctctcttccttcctctctcttacctccctccacatacaggtacctctcaaatctgcctttctcccaccttcatcatctcacacttggctgttcctgggctccggtggccccacatctctcaaccccttgccatttcccctgtccctccactgccagcagagggatccttccaaagcacaattggatcgtgccagtcctctactttaaaaccctttccaggccgggcgtggtggctcacacctgtaatcccagcactttaggaggctgaggcgggtggatcacctgaggtcaggagtttgagaccagcctggccaatacggcaaaaccccatctgtactaaaaatacaaaaattagctgggcgtgtgcctgtagtcccagctactcgggaagctaaggcaggagaatcacttgaacctgggaggcagaggttgcaatgagccgagattgcgccactgcacttcagcctgggtaatagagtgagactctgtctcaaaaaaaaaaaaaaaaaaaaaaaaaaaaaccctttcgtaggtctacctgtgcatataggatgaggttcaaactctttagcatggcattcaaggccttcgcatctggctgcagtggatccacttctcctgtttcagttcccaccactgtcccctcagatgtttattatgtgaatgagtgagtgaaacttatgtaaccacttcactcactaggtcctaagtgctgtcatctttagctctgtcaggctgaagacatcactttcattgtttagcccagaattgttcatttaaccaaggggtccaacatattcaggcactgtgttaggtgctcagtgtacatcagtgaccaaaaaataacaaaaatcctgccattgtgcagcctatattctatcaga

SEQ ID NO: 1884892 - DNA, 4001 bp, Homo sapiens
tatggcctttatagtgtatggttttgatcagagatcatacacaatgacatcaccatcttacactatttatcatggcagccagtgtttttctctatgaattccaagaagtgccaagatctattttatttgtaggattcagccttctagaaccattgtctacaattttgttattaaaagttttcctaattttattattcccataatcaaatttttaaccttaagaaatttcccacaaggatagcaaggtaggttccatagggtgctggaatgtttagcgttatactactagatttgaccatttgcctcatcaattaataaaggaaaaaacataatgaatcccacaaaatataatataatccagaagagaattatcagttctaaattttcaattgttatggatgtaaaagacattcttcatactaatttttctacccagcaaaattatgaagctttatcatgtgccttataaagactgccacacaagacctattcttggtacctctgggaaaatggcaccatcttcctattttctagttccttatccagcggaaatcacatgcatctaaaatggctagaaattattcctaacggtcttccaaactgcatgttgggaagaactagaagccactagaaagatattcactgagcgttcatttcctaaatgatgcaatcagtttcattcatattcgcatgcaagaaagaggaaagaaagtggtacctgccagggccgggagcggtggctcaggcctctaaatcccagcactttgggaggtcgaggcgggcggatcacgaggtcaggaaatcgagaccatcctgaataacacaccccgtctctactaaaaatacaaaaaattagccaggcatggtggcgggcgcctgtagtccccgctactcaggaggctgaggcagagagaatggtgtgaagatgggagatggagcttgcagtgagccgagattgtgccactgcactccagcctgggcgagaaagcgagactccgtctcaaaaaataaaaaaataaaaaaaaaaaataaaggaaaagaaagcggtacctgcctccatgatcctcttcaacagatctgtaaagactgtgtgtgtgtgtgtgtgtgtgtgtgtgtgtgtgtgtgtgtgtgtgtgtgtgtgtgtctcactggaaggacagtggctcaacaaaaggcttttgttgttgttgttcgggaaataactgtattaaatcttccttgaaacaagacaaatatcttaagtatttttcatttgaaagtaatagaaatccaccattcaagttcaagtggaagggggaattgagaagagaatacaaggttatcttagagttatcaaatacagaaagtatatttaggccctaacaaaaaaaatgaaacacttttaaagctgatttgtccctctctcagacaacttctctacttttccaggctatcttctacaaagcagtttttttcgtttctccataatagcagctttcaagtgagttgagtttcctgtctccaactctctctaacttataggtagaatatccattattgtctaattcagtcactggggctctgaatttaaattatcaagagactgagtctgattgtctcagcctgggtcacattccatcttggaccaatcaaatgtggccagggattgggggtttacctgatatgcaatgtcaccagggctgactgtggctggaaggtctgaagaaactgtttcctcttctgccaagcaagtcatcttttatagacagtgagtgctggtcataaagcttgttgcatttagagaaaattaatttctacagattttataaatgccctgcatactgaagatgttaaataaatggtaatcatgataatactgatttgaaggcattctttctaataaggcgaacatgacatttaactactactacgttataaatatttttaattagctggatatagaaaaacatttgaaagtcaggcatacatttaataattacattttgaaatttaatttctcacaatggaaacaaaaagttcatattgaaaaaaatcttttataaactactattagtgtttttcatcagatttctatcagtagttatatacaaatgataaactcaagtgtatgtttaaaactcactgtaaagtcagcataaagaaaaactatcagcttaaaataaaacatcagaaggttttaacaatatttataatatcttccacttacagctgctgtgacggccacattcatgtactcacatatatatgctacaacaattcttacatttagatatattttaaacattttacaaacaaggaatctaagattcaggaatattatattttgcccaaattatacaagacaagtatgtattggtagcaggattctctaatagtaatcaggtaatctttcaacttcccaaagccatctttgcaaaaattagaggaatctaacagtttctcaaggcaataaaccaacatctgctagaaaattggcattataaatagaggaacccataatgactacaaatgtgaatgccgccccccccaagaattgggcaatgcaaaacctgcacaacaatatatgccagcctgttaatttaaatagtacagatgttactagtcaattcttctttttacatggagtactattcattaatgccccggccctccccttctctcccgccatttacccccaaccctgttacctagataaatgattaaattctgaaaatgttttaacccatttgttccattgatatcccagtgatcaaagactttaaaagcatttttcaaccacggttccattaaatctctctatataattcaatcaataaaacattttgggatcctagaaaggcacatcatttatggcccactatgatcttctttatttaaaaatatcttagttctatggctaagaagggaaatttcttaacaaacctcaaatgttcctccattttgttgattcctagtttgaaaaagcaaaatgtgacatcattcaagtgacatgtttagaagacttaactacatgcattaactatgtttaccattgttggcttatttcttctatgcttacatggctaaacttcttccagaatgagagctttgccaccgaatattccactagatgaaaaatgctcaaggaaaatggaggagagaaagaattacagttcaaaatctccagggaggtatgtatagttagggaaagtgcaattaatattattagaaaaggttatatttgggagaggaggaagggaactcctggttttacagtataagctacagaaagtaaaaccttatgaaacactgggtgatggggactgaggttgaggagggaaaaggaggaagataaatatagtatatatgtgacaacttgaaaaacacttgcccagacatttcatgctgaattcacggcaccattttactaaacagcaccttatatgactacatcctttcatttaagaaatgggaggagaggtagaaccagcaggattacttgaccttgcctttaatcaaaggagtccaaacttttggcttttgtgcaatatcaaatgtgtacaagagaacatcaagagacgtagagtagtggcctcaaaatatatctttgacttttttccagtagccatattcatactatattttaataaccctataagtacccattttagatattgtttctatgttagtgagcaacgtagtaacctaaatgatggtacaataaatttgtttacatttacaaacttcaggaagcaaagtcttttggaatggctttatgtatacatgtatgtgtacctatatgtatctattagtccattttcacactcctatgaagagatatccaagactgggtaatttataaagaaaaagagatttaatggacttacagttccacatggctggagaggcctcacaatcatggcagaaggcaaaggaggagcaaaggcccatcttacatggtggcaggcaagagagcatgtgcaggggaactgccctttatattatgaaaccatcagatttca

SEQ ID NO: 1884893 - DNA, 4001 bp, Homo sapiens
tgatgttatcccccaatgaggaggggtactggcagatagctgcggaatttgaagttccgaaactggtgagctttttagtctggtcatcttattttctattcttagaatctctgggtctaatgtaagcacgtactaatggtgttggtaactcccattcactcagagcttcctgcgggccttacctccataagtctaactacagccttacaaaataggtagtagcattttccccatttaccaagaagccacttcaggctgcttagagcagtgaactgacttgccccagttctcagaggtaagaagttacgattcaaacctcagggctgacttcagggccagagctgctcatcactgtggttccttggccttcttcagactaacacggtggaatctcacccttgggaatcaaagatcagtttgacctaatatataagtgagaatgagttcagtggtgttatcccagtccatctgggaaggaaggtttccattcctacactttcttcatcccaagactgtctcacctgaaatttaaagtaactcttgcgtgaagatagatttaagttggtgttaattgggtagccatgttccaggatgtcatgtgtgcagctcagccagccttaagaattctttatgtcgagcttatttctgagttcattggtacaggaacctctagatttgtagagtgggagatgatttggtgttaagaaggaagtgctcaaatctgtctatgctgagttaggatttaatttaaacaaacttgattttggcactggtaggagagtgagcagaaaagccaacactgagtgatgaattgagggcctgacctggaaccaatcctgttcctccctctttctgtctgttgggaatcttcttagactagaataacttagaaagccatggcatcactgcttcacctccaggagcgtctgcactttgagtatagtgctcccctaaaatggcctgatgctgtcagctcatctgggttttattagaaaaatgtgaaagtacatttctgttctcaaaacttccatagtacttactatttagtctgtgattaaagaatactgtgtcacaaggtcaggagatcgagaccatcctggctaacacggtgaaaccacgtctctactaaaaatacaaaaaattagccgggcgtggtggtgggcgcctgtagtcccagctactcaggaggctgaggcaggagaatggcgtgaacccaggaggcggagcttgcagtgagccgagatcgccactgcagtccagcctgggcaacagagcgagactccgtctcaaaaaaaaaaaaagacaaaaaaacaacaaaaaaacgaatactgtagaccagcaatcactgtatggacccagatacttacttaagatgccagtttctctgtaaagtgcaaatcctgccttggcaataaggtggcatcctggcacagactggaagctttttgaactagtttacagcccccagcaaatggcaccaccactgtcaatctgagcctcttggtctgtcagaaagccaacacggagataaagttaaagggctagacggaggatatcagttgtaggaaaatgagacatgatttgggggagtgagaggaaccgagcagccattgttcaaggcgggttttatgcacgttttaggaattatttttcactttgagtgaaaggttcccacaaaatgctctgagtatccttggaaaaggcacccctggcccgaagagccaagccagttttgtcttgtccatatacgcccctgaatggcagtggcagtgttcccaggtctgcgatattagcctagtgcggctgtcctttgtgatggacccgcagcttgcggagctgggcccgagtattagcagagtcccccggatgttgacgctccctccagctcttctggaccgtgttctggaggccggctttgaactctttggcatatggtcagggcagcgctgtcctttcacactgtggattttcataattagtgtggctcaccttctatgtgtcctctcgtgatttactcgcagaggcgaaagcctgttgcgaacggcaccgcggagaaatgggccgcctgtggatggacagaatcaaattattcttgaaaagtgcgtctcagactcgtgcacattagagaaagtgccggcggtgacgcagtcaggactggggagcggggtgggtagaaacatgcgtgtttgtagagccttccttaccctctggtggccaaatggaccctgatgacgttgaaaccaggagacagcagatcacttggatatttttaaccttttggccacacattttgacacaaatgttaaaattttttttgcgaatttggagctgaatgttatttattcagttcattgtaaacaaacaaacaaacaaaaaacacaacaaaaccaaaaaaaccccaaccttttattttttgaattgctattacatccccatggttcagaatttaaaagacacaataaagctgatggtgggaaatctccccatctcataatccacttccctccttgaaggcagccattgttagaagatgtatggatgtgcgagtcaagcgcattgtgtactttctccacccccaccttgtacacatgtcagcaggtggggttacctaactcatcttgcatccttgctttacccgctaagcttatctgggagaaccatgccatttgtttcgttttataaagaacgttttcatgcttccctctaggactgcatggtattccagcgtatagatacactgagttatttaattagtcccttagtaatgggtgtttctgtttttctagtttttagctaagacacaattgtactacagttcatgaataaccttgtacataatcattttttatatatgtgagtttatttgtaagtaacttctagaagtggatatcctgggtcagagtgcatgttcatttggtattttgataagagtagccaaagttcccttgatacaagttggacaagattatatccccaccagcagtaagtgggatccagaaacatggaacatggttttccctccttcacttccagcccagggtgttatcagatttcttgatctttaccgatatgaaaggtgaagcatcatatttcaatgaattttcattttatatttctctttttaggtgtgtcttatgtttctcttatactgagcatcttttctgttgtgtaagagctgtttgtgtttcatttcctgtgagtgtttcatttgcccatctttttctgttgggttgctggtcttctcattgatgtgtaggtggaattgcatatttttgatcaagtcaggatgaatttatgggactaaacaactcttaccttttaacaggttcagtaccttgaaatagttccagaaaccagaaggtaccctgtggcagtagccgctgctggagatctgatgtacctgctcaaagccgaagactccgccagaaccctcctttacgcccacggcccgcctgtcacatgtctagacgtctcggccaaccaagttgcttttggtgtacagggtctgggatgggtgtacgaaggaagcaaggtacacaactagcaagatatataattaacaaaaaagaatatagatttattttttagaagggaattgaaaaattaaagctcttcaatatttttccagatatatcaggccagtatataagcatggtcaaaaaattcaagaacttcaaaaggattgcaaatgaaaagtaatcattttctttctcctcccttcccccaacttccctgcacagaagaaactattaacagtttttaggtatccatctagaaaaatttaatgcatatataggtacatttgtatactaaaaacatattgttgtagagatgggatcatagtatacatagtgttctgtacccaacatttttactccataatgtgccttggagagaggattccatgtcagcttttaccaagctctccctctctaggattccagcatatgcttctagctcatagcctgtttagccaggcccctcactggtaggtgtttagc

SEQ ID NO: 1884894 - DNA, 4001 bp, Homo sapiens
ctgttaaatgtgaatgtctattacacatccagatggaaatgttgaacaggtatatggatatatacatcagaatgtcagtgttgagatcagaatctcttacgctatcagaaccaaatgttttaataatgccacaaatgtttcaataaatgcctatgaaccaggtgattcttgagactcttctttgtataggatttatattttcagacagattttagctggtatttttttaaggagggcaataatcatattaccataataagtgatatcatcataattgaataatgagcttaggcatatgctttgaaaaaaaacctacatacattaaataaaattgaattcaaatgaatatcttttggaaacaactactgaattcacaaatgtacataaaaagttcttaagcttaatctaagtaataatataaaaagaaaaatactattatgaataaaactctggataccagagtggacaattgagtctaacatattcccagagaagtatttgaagtagactaacacaaagaaatcttgccttgagaatctttacaatcttttacttaaacctttaataaagattcaaataaaatgttaagaaactttctaaatggttctgaaagtaatggtccagccagggaaataaggtctctcgcctctgtcttggggctttcagaatagactggatgaccttagaattaaaggcagattcatgtttttctgaacagtacctccttgtattgacaagtgtttccccaatagtttgttttacagtaaatgcttcaactaaagaatccaattattaacccattcacactgtttcagtttgcagataaccatttgcccagcacaaaaatctttatattgttctcagaaattgattcttgactctacacagcaaatccttcgtctttattgttttgacccattacaaatgctttccactatgatggacttatattctccttttctcctctagcacttactttcttttttccccaggagtccaagtcttggcaacctttgaaaaaatcccatttgagagacctttcaggaggccaaatgctaattttaccagcaacagcttcacatcacagtactggaatgcggtcagccaccgggcccctgccattatctatgactgctatctgcggctcactggaaggaagcccaggtgagaagctgagtcaatggctttgagagtgtcactgcatgggagattaaggccccaaaatctttagtgcttccttcagccgaggattaaaggagacaactgaatcttacccatatatacagattgaacacacctaatctgaaaatccaaaatctgaaattctccaaaatccaaaacgttttgagtgctgacatgatgccacaagtggaaaattccacataccttacctcatgtgatgggtcacagtcaaaagacattcaaaactgtttcatacataaaattatttaaaatattatgtaagattaccttcaggctctgtgtatatggctaagtgtgtatgaaacagaaatgaattttgtgtttagacatgggtcccatccccaagatagctcattacatatatgcaaatattccaaaatctgaaaacaatcaaaacccaaaacacttctggcccaagtatttcacataaaggatactcgacctgtataagttttgaacaaagcagtcatagtgagaagccacaaaagacattaaaaatgttccagcacaataaaggaaggtaaatgttaaagaggttgatgaattcagcaagtaatcattcatgcgaaaagaaaagcaattgagactctgtcactagggttttctgaataggtagataatcttaaatatacaataatgatgacaacctcacttactgagagtttactgtggcactcgtggggctaaggctgatgcatgatgatcccattttcattgtcacagctacccaaggaagatgtcctcatcatcccaattttacaaatggggaaatagaagctaaggaaagaatctgaattagtctcaaaggaagtgacaggaaggatgtggagaaagccgagtctcaaagtcagtattcggaaccagatttactgccacctagagatgagtgaagaaattagagggaacacagtgtgctgatgctaaggcagctgtcaccacctagctgtgtgacacaggacatacgcctttatctgtctcgcttgaataatattatgtgtcagaggagtcattgttataattgcctaaggcaattctcgtgatcaagaatcagaagtatgaacagtattgccttctgtgctagcccctttataagggaggaagtcttcttcagcgtgtttgtcatctttattagcagtgcaaatgactaaaacttagccaatgtagagtttatctaaatttttaaagacctcatttggagctcataactcagttcttgagcaaggtgaaaaggaaacattgtgattatggggaaaatatttgtatggggcttattaaataaagacaggaaaagaagaaaacccaaatattgtaggcagaaatgctaaaggttttaaaatatatcaggattggaagagggcctgcataaagaacaaagttcagttaggaaaaaagagaaacacagaaggaagagacacaataaaaatctatatgtatcttgtgagaagtcaaacagtaatatttgtgggaaatgggttggtttgttgtgtggtatgtattttagcaataatctttatggcagaaaaagctgaaatccttctagaccctttcctgctccaggtgtgcttgtgtatactctcctatgcttttacatccatatatggacgtacatagtttgctttgcagtaggggggtatgtgtgtatataaatcaattgtacatattttacaactttttccactaattttccatgaaaatctaagtcattctgcccggtgttgtcttttttttctactgcaaatagggcaatgaatatcagtgtgcatgcctctttgtagaatgtgcctgtgtcaggagaggatgctgaggagggagactgctggattgaagagtatgtggagtttgtgactagtgccaggtgaccctccctaaggaagagactgtcaattggcactaccacaacagtgtatgaagggtacaaaagtcttttttttttctttttcttttttcttttttttttgagatggagtcttgctttgtcacctaggctagagtgcagtggcgagatctcagcgcactgcaacctctgcctcctgggttcaagcgattctcctgcctcagcctctcgagtagctgggattacaggcgcccgccactgtgcctggctaatttttgtatttttagcagagatggggtttcacgatcttgaccaggctggtctcgaactcctgacctcaagcaagtcacccgcctcggcctcccaaagtgctgggattacaggcatgagccaccgcgcccggccaaggggtacaaaacagtatgtcttaccctcttaatgggggtaagaatactttgtaaaaatcaacttctgaattgtcaaactcataaggaatgacatctttttgtttttttgatttgcattcatgattgctggaggggctggactttcattcatttattggacatttaagttttcccctctgtgtgctgcctgcttctgctccctattttcctattgggttgtccttattaatgtatgggaacatgtgtgtgtgaatacatatttcatatattttctccaggtctgtttctttttagctttgactataaagctttttgtaatatgagtgaagatacatataatgcagggcttaggaacatggagtttggagtcaggcttataggatttaaatcctggcttcaccaatttagccattagagccctaaattacttcatctctctaaatcctaacttcctattctgtaaaatgggcacagtaatcgtaacctattttatatagtttaatatgagtgcttagaatataataatccctattaatactaaagatgtttaaaatttt

SEQ ID NO: 1884895 - DNA, 4001 bp, Homo sapiens
tttttcatttgttttttcaacatacataagcactgactatgtattgtgctaggagctgggtaagtggttaaaaaaaaccccgtgctttctgccctcagacagtttagagtctcgtgaaaatacatattgtgatatataatcaataaaactttattgaaagaatgaatcttacatcttaaactcctttttcatcttctttccccaaactcctgacctacattcctgcgccctttcccctgataaatcccacagatttctcaaatccagcagctgaattggattcatgtgctatggatacacataaataagtttgccccatgttcaagaaactcacaataaagcaccttctctccccaaaccttctgctgattttagtatcaatgttactaactccttcttattaccaaggggaaatcttggtattctttttgacttcttcctctttttcatatttaattctttaattcaagcaattatccctcttgttgaggtcctttcacctatagcagaggttgaaaattagtgacccacaaattgtatctagctagtagaggtgttttgttttgtataatattatcaaaaatatgattttcctgtttctcctgaaaaatcaggcaacactgagtccttatttttgcaagaattggctggagttttagatgggacagctcaatcaactctaacattccaatctctatcactccttgcttttgtcacattcagtccatttcctcacttatgaaactttcttagtccctaatttaggcatctgagtttgccgtctctggcctatatgatcatagactgtcagtagtggaagagatattaaaagatcaactcgtctaacagtctcctgcttcctctccccactctttaagagacggagaaatgaggtctaaagagcttacattacccaatcaatttcatacagctaatgtgtaacaggattctataatatgccattaggcctcctccctcatacggatcatgttaaacttatattttccctttggtttaattgctaggaacctcagagcccaatttgtggcacccctctagtaaatacacggaccttttggtatgaagttttggggtattaatatacccctggctttattttgttttccaattacctttacctcagtttctcttcatcattttctcctattatagtgtgtattttttttccccaagcatactcaatcttttgtgaaagaggtacatccgtacaggcgtaaactgtcgggctgtattgtctggctcccaatttctttctttcactgtcattctgctttggctactcacattctctgttttccttgacagccaaacttcttgaaagaattgtcttcacatgctgtgtccacttcatcctgtcttttcaattcactgtaaacagatttaaagccttcaatgccttctttgttgctatgatattaataccaaaattatattgtattcatccatatatgaaggacacaaaatggttttccctaaattatctcaactatgaaaaaatatgcagagaaaaaaattaataggtaatgcatgaaaatgttacttctgggtagctggatgactggtgagatttattttcttttaaaaattttccacagttttaaaaacaagcgcattagaacacatcccgatgtaaattagaaattctcaacttacattttctaaaaggaggcagaaaactagagaagcgacagtgaggagccactgggccacacttcatttcaccttaagactgactcagagaaaaacaagagggtacgactcagatccccggggccagcagcagggccgcggggcacgactggataaccgcttgtgaagaaaattttaagagagccctcacgaccctttagcgcatcctaaaagacctctgaatatctctgcctctcccgctaacggctccaaaccgcagataacggtcaatcgcctccggttgtcctggtaacagccagcaaccacaaccctgcctgcgtaactcctcccagaacaccgtgcgtcttatcgcttcacttccgggttcggagggccgacttcttccggaagtatctgcctgccagtcacctggcgttttctggctgtgtggctttactagacagaatgtggcgtattgttgggcagggccctgaggacccttttgttgtttcccccccgtttaacaggactggaaagctaagcaaaggctttactctcacggaattggatgaattggacgttagtttttaaaaagccgaagggtacatgttagctttatttaaccattccacaatgtatatatatttcaaaacatgttttatactataaatataatttttatttgtcaactaaaaaacagcattaagtgttaaaagctgttaagtcagaatatagagatgaatctttgaaattagaatgctttatttgggaagaaaatagtaatttggggcatatatgtagactggggtggtcttcgggatgtctgaagagtgaagaggttagagactttataagaaggagaaatgttacgtattggtctccaagagagtttattggcactattaatgttttggtggggttggcaaactgattgctgagtgacggtggtgggtaaaattagtcttagaattgtagcagactgtcttagtagcctttagattaaattggttttaagtgttagcaggcagtttcagcagccaggcctgtagagaattatatttttcaagtgatatttgtgacctgaatgttttttccctctggcctctccactctttaactggtatgacaaaagtgacccgatttatatgatcaactttcacagctgacaggtggtaaactctttacaattatatgtaatttatttgttactgtgatagatttatacaattttaaataatttagttcccattaaaaaagcaattatttttgctttagaaaatgaaggccaaaaaaacccccaaaacacaaaacctccaaatcctacccatttaaggacaaccaatgtgaatactttgtaggagtcttccagaccctttctatgaattatagtaagtacaaattcaaaatggaatcatactgtatatgctagtttggaacttaaaaaacttttttttttttgagacaaagttactgtgttgcccaggctgcagtgtagtggcccgatctcggcttactgcaacctctccaccacctgggctcaagcaattctcctgcctcagtctcctgagtagcttgggattataggcggcgccaccacacccagctaatttttgtatttttagtagagatgaggtttcaccatgttggtcaggctggtctcgaactcctcatcccaagtgatctgccttcctcggtctcccaaagtgctgggattacaggcatgagccacccgcgcccagcctgaattttttttttttttgagctgttgtcttgctctgtcgcccaggctggagtgcagtggcgcgatcccagctcactgaggcaggagaattgcttgaacccaggaggcagaggttgcagtgagccgggatggcgccactgcactccagcctgggcgacagagcaagactctggctcaaaaaacaaaaaaacaaaaaaacaaaacaaaacacccaaaaacttttaatgaacatattttgtttaaaaaagacacttaacatggttgtatatattccattatacctcttgttggatatttaaacaattgatgtcttcccctgccgccccttttttttgaggaggaggtgtcttgctgtatcacacaggctggtcttgaacttctgggctcaggcagtcctcctgccttagcctcccaaatagctatgattacatgccactggcctggccatttttgctctcaattagtgctgcaatggagaaatgaaaatccttatagctaaatctttgcccttgctctaatttctttgtggtaattctttttctttttaaaactcatttgtatttgctgttcattatctcttccttaatgtgtttttattccatacctatgt

SEQ ID NO: 1884896 - DNA, 4001 bp, Homo sapiens
tcttccttctaaacacctctcctcttccttcagatgttacatttttcaggaagttgcccttggttcctccaaaataaaataacatctttctattctatggccaattcacactttattcttttttcattgttccatcacattatctttcaccatagttctcagtgtacatatggtagagacatttaatcatgtaactacatggctctcgacctgctactgtattgtactgactgagcatataataggacataactgtcctatcatttctgttattgcccaaatggccaccaggctcagcaagcccccatcatcacctcccggcaggcctggcttccttttgcaacctggtcctcaaatgcccaacactgttcatccttataatgactctcctttgagtaaaagcgagaaattttggttaatgtgtcatgtttacatcccccatcttcccctcacttaaggttgctaatcagctctttttaatcaccacttttcccatcaacctcaaagacccaagcatcttcctgttccttaggctaaaatccttgagcagggtcatgctgcaaagccaggggcacctcttttaggagcctcatcattttgcagttagaaacgcacgcaagcagccctgcctgacagctttgctacagggctgagaattcaaactaatttctgtgccagagaacatcatgtgcttacttagcagcaaggagagcattttctaaataattaattgcaagctcaggatcttcctgaactgtgctcagttcctggaatccaccctgaaggatattgcatgctacctattcataactgtcactgtagctacagatctgcctcagtatgcttttgatttttctctctgcttttctctaaagaaaaaaaaaagaattcctagccctaatgtgattttaaagatttattttgactagtcaaaaatgaatataaaaaaagtttccctggatgctaatcttccaaatgcttacatttgaatttgtccttggcatgctgttcctcacattcctgctcacacagtctcaagtcctttgctcgagcatgccttctagccttgcttttgtttgggggtttagtatatgagacgacaagtggtacaaattttgaacaaaggagatgtcagttcaggggagatggatgggtgatatcaaagcatacctgtgcaaacagtaggaaaaatacttccccacaatcctctaaatccattttggccaagtaaaacttataggcctaaaccaggtaatagatcaaaaatagctttatgttaaataaatactccaaatctgccacgaattgtgtgtttttttcagtgttgtattgtggcaacaaaatagattgttaggagctgtaagaaatgaccgcacccaaacaaaggctcataattgatataaaagacaaaggatatcagtgatgctcagatacctagaaatgaaaatcctacaattctagagctgtgagtggtcactaaagctagtcctgttagaaaacctgggctcagacaggtaaaggagcttgcccaaccaaagtctcacaatcattttattagtgccaaagctagatgaaagtttcatgcctcctttaagccatgtcactaaaccaaaccacatcaatgtcatacataagaggtggcctgttgagatttgccgagtttatcagagaaaccagcatttaagaaaacaaacaaacaaaaatcctatcaacgattaaatgaagtcccttgtttggttgaagacggcataagaacgacataaaccaaatcaaaatagtctcaaggtggaagacctaggaatcaagtgttaaaatcaagaaataaatttgttaccaaatggtctctccttgttctccatccttgtgtttcttttctcttcctctttcttcaagcccctttctttcctttcctcttccctcttctattaaattatccgaccaaaattagccagcagctcttaaatcaagtaacccatttagggaaaagtctccgccatttatctttaattaatcaaatggcaaatgtgaagacttgctcagagccaccttctggggaatctctgtgcaaagtgtgctatcagggttcaagagctgtcagtgcctcccaggagctttcttctcctcattaaaaatagtttcaacctgattgcataagtactttgaatggttgcttaaagtgacttagtttaagtagttgccacccatggctcagctgtcagagtccagtatatgaggacttaaaaatcagatcttgacaaaactttttatctccatgaagatctagaagctggaggaaaaaaaaaaaatccatcacactactcaactcaccctcttcattatcctgcctgtgcacagcccagcatggtcttttctcacccccgagcttcatccacacatcttttcatacactatcctaaggcaaaaaattctcaatgaaatgccatcagaccaggtgttttctgtttcatttttctatatagtgcacaacttttaaactgtgtcccacagtgagatctttgcaaaactggcacccatccttgtattccctcagtaggacccaaattctggtttaagttctcttccattctattttctcttacccaccccaacctggggtttcttctaacattccagtgccaaagttactaagggtgcgttgtattcactatgtaaaccttgtcctagtgcagtgcctgctagatagtagtacctggcatgtttgtggagtaaaggaataaatacaaactcatatttctgcttcctccttgaagcagtggctgcctttctctacctctatcttctctgccactcaaagcacttgtcacacccgaacatttcagcagaaatattcttcacacagtcctatgtacctctttcagttgaagattctgttttcatgatggagctggacactaagtttttcctagttggatcttactttttctaaggcaacgggggacatttccagtgagtatatcattagagcgatttttcagtggctaaccaagctgtcgcagacatttagcactgccaattagtgaagttctttgatgttactcgctacccaatcctcctttatttatttatacaaaatatttcaatgcttcattgtgcactaaaaccagctccagacaaggaccacaagaagcaagtcgatagggggattaatagggcgttgtttgtagaatgcagaattccataatagatctaaaattaggcttctggagcatgagatgttttcaaattcattactgctttcaaaataacataattttctatatgaaaacagcttggaattcttaggaatagaaattgaaggtggttttatttacctattttttttgttttgtttctggtggctgatgattttcctttttatgcttggaaggtttcatgaccttgtggaatatgatctatagaatataatagtttggtgtatttggtttccaattttgaaaaagagtaaattaagaaatatcattttaattctgagaactttcatcagtagttaatcaagaggtagaatttttcaataatatttttcatcctgcttgtaccaggcgtatactatggcagagtaattgattgctagatttatcacgctggggaagctggaaatattttgttgtattgattaaggacttagcatttctgtgaaacatatctgcatacattccaggcacctggagggaataaaggtatgataatctcaagataacaaggaaacttaatattgtaattaagctatatattgattctaatttgctattaaatttgacatggaaagggattgaagtagaaggcagagtctcccctaaaatatctctaccaagagaacatagctttttacctattacttgaaaagtgtccaccacatattttcagaatggatttgtgggctgtggtcatagcagccactggctgtcacagtctatgaaatgtgaccaggtggaaaataaattcactgagtcttcctctgacagagggcctagagaaaaggg

SEQ ID NO: 1884897 - DNA, 4001 bp, Homo sapiens
gtgaaggtagttaaatcctctatcgttttaaaaggagatcttacgaatacttttggctttaaaagcttatgtcactgattcataatgtaagaggtgacattaaaactatcctccaccctctcaccaccatcaccacccccagacaggaaaatgcaggcaaaaatgagactggattccctgggagtggtgggagcaaattgattgctatttaaaaaaaaaaaaagaaaaaagcgggggtggtgcttttagactcccaggcatgagatcttggtgctggaaagtgttaaaggactaaagcaaggatctagagtcagcagttggttgaaggaacacagcaggatgcaagcacatgatggctctggtggatgacttcatgagggtgtagagcgtagaacagaagagagaattagtcccaagagagaagtcagcatgctctgagcaggcctattgctccattggtcgcactttctctaaaggatgtccagagttccctggctgcttaggttaatacagcagaaacaagagcacaccctgccgcttctctagctccagctctgaccatcctgtgttctcttaaagcagctgacttgaagaaaaagtgaatgtcttgagcccttggctcttacacctattctacgagctagaagtgatttcggcaagtggaatcagcttgatacatatcacttttgttttaagtacaactacattaaatggagctatgtttgtccagtggctgaagaggttacctggagctaagggtttgtagaatagttgcactcaaatatattcaagtacctagcaataaaaattaaattgaccttaagaactcttggttatattactaatttgtacatgcctaagatcagaagtgtgtcctgtttccaattcatcctttgtttccatttcgtgtagatataaaacagatcagtaactctggattctatagaaaacatatttgtctaaggttattgaccagataacagaaatttggataaacacacaatgccttggttttcttgataatgtgttacgtttacagagaaccttctcattctcttctcatgtgactctcaaaaatctctagaatgggaattattatgactcgattttacagaggaggaaataatagaaactcagagaattttattcaattgttcatttgtgccaccctattctttgggacccaattttgttctgggcaatagaaatgtagagatgaaaaaaaaaataagcatggcctgtagaagttcaccatctattatgtagaacacataggtaaacaaaacataggcatgtgatcagtattaggttaggcagatggactagatacaatgatggaaaatggaaagaatcaccaaatttgcctggctgtgagtgagtagtcttctcaaagctggaaaccctagaggtaggattgttgttgtttttttttttgagatggagtctcagtctgtcgcccaggctggagtgcggtggcgcaatcaaggtagatcttaataagaaagaatttgctagaaagacaaagcataaggtggaggagcagcaagaggtaaggcacagaagcacggaactgtgtgatcagttcaaggaataacaagcagttcagcatggttgtaaagtagagaaggaaggaaaatgagagtgtttgctttaggaataagttcacctgtgatgatcaaggaggttctgggttggtgaaatgaagtcttcaggaacttggagttgttcggtcttgtttcaacacacatggcctctatttccaagatctcttcatacctccaaatggctgctctagattcactcaccatatccatattcagcgcagcaggaagggggaagggaaaaaaaaaggaaaaaagacacgcaccagctgtcttttaagatttacaggagctgctgcaagacacttctgcctacagctccttggccagagctggtcacatcgtcacaccgcctgctgaggactttcaatagactctgttatgatgatcaatgagctcagttaaaaatgtgtggttatattaataaagaaaaatgagagtatgaaatttgaggacaactacaagtatctgccactgagtgaaaagaggaaactgatcataaaggattacaaagatcattgaattaactatgaatcattgctttgaagctccaactttgccctctggccaatggggagtcactgaagggttttgatggaggactttggatgaccacatttccatttatcattaggattgatgacagactgtagagggtaagattggagacagagagaccagttaggagactgttatgttgatcttggtgaaagatgatggaggtctcaactaaatagcagtagagagatggggcaaaggaaagaaaaggcaaaacaccaagatcgttacttaccatgctaggtaagtagtaaggggcagaatttgaaccccaatctttaatgcaagtccatgtaccatgagattcatgtgttttttaaaaaatgttttaattgacaaataaaaattgtatatattatggtgtacagcatgatgtcttaaaatatgtatacattgtgtaatatctaaatcaagctaattaacatatgcgtgacctcacaaacttattttttatggtgagaacattttactactacatttacatctactgtcttagcaattttcaagtatacgttattattaactattatcaccaagttgtacaataggtctcttgaacttattcctcttgtctaactgaaattgtatatcctttgacgaacatctccccaattccaactgcccccatccagcctctggtaaccaccattctactctttacttctatgagatcaacttttttcacatataagtgaaatcatgtagtatttgtctttctgttcctggcctatttcacttaacataatgtccaccaggtttactcatgttgtgcaaataacaggattttcttctttttaaaggctgaagagtgtcccattgtgtatatattccacacttactttatccattttttccactgaagggcacttagatggattccatgccttggctattgtgaataatgctgcagtggacatgggagtgcagatatctctttgacatactgattttattttatttggatacacacccagtagtgggattgctggatcatatggtaattctatttttagttttttgaggaaacttcatactgtttttcataatggccatactaattaatagtcttaccacaagtgtgcaagagttccccttctctacctcttgccaatacttattatcattcgtctttttgataatagtcattctaacagttgtgtggagatgagactcatgtttcttaatcaacattatagtaagctggatttcaaactaccacaagcactttgcatctatgtcatgttgtggaaatcagatttaccatggtccagacccaggaactaaagagtccaaaagcaagacaacatttgtgacacgataacattttgagatattttgtattttctctgcctgcattcaagcagatagaagaccctgggctcccttgtcttatgggaggtctgagacaggacttcctgggttttattcctaaaagcctaagcacatgccagaggagagagtttgaagagagaaagattttatccaggctaggaagacagttttctttttctttttctttgcaagacaattttattacttgtaacaagtaaggagaacacaagagatagttcccaaagcagtgtctgtctgagcaaagggctgggtcaggttttataagcatagggtaatgaggcatgatctgactggatcttgcaatgaggtgatgccagaagcatgacctgactggatcctgccatggggtgatgccagagctcaaactgattggatcctggatcctgccatgtgaatccacctttttttttttttttgagtttgagtttgaatttgacaaatttattggtattttggtaaagacattcatctcagtcgtttctctctccc

SEQ ID NO: 1884898 - DNA, 4001 bp, Homo sapiens
tgacctatacagggtcttcattcatccatccatccattggttcatccgtttgtatatttagaaattctattcagtgcctgctgcgtgccagtgctcttccagcccgaggatacagccaaccaacatccctgccctcgtagagactccattctagtaggagagacagagagttaaaaacttttttgtttttttttagagatggggtctcactatgttgcccaagggggctgggctcaaactcctgggtcaaacaatcctcccaccacagcctcctgtagctgggactacaagcgtatgctactgtactgtgcctgggcaggcaatattttaaaaagaacatgctacgacacatggatgaacccataagacatgctcagtgaaagaagccagacacagaaggacaaatactgtatgattccacttaccatgattatatgatgaggtccctagagttgtcaaatgcacagcgacagacagtagaacagtgagtgctggggctggtgaagagggaatggggagttattgtttaatgtgtagagttcagctggggaaggtgaattggttctggagaaggatggtggggatgttgcacaacaatgtgaatgtgcctaatgccatagaactgtgtgcacttgggagtggctaagatgggtcaggcacggtggccacgcctgcaatcccagcactttgggaggccaaggcgggcggatcagttgaggtcaggagtttgagaccagcctgaccaacatggtgaaaccccgtcttactaaaaatataaaaattagccgggcatggtggtgggcgcctgtattcccagctatttggaggctgaggcatgagaatcgcttgaaccgggaggcagaggttgcagtgagctgaaatcgtgccactgcactccagcctgggcaagactctgtctcaaaaaaatgaaaataaagaaatggctaagatggtaaattttatgttacatgtacaatttttaaaataaaaaggaaagaagaaagaaaagtaagtcgggtactagataacgatcaacgctctgaagaaaattagaaagggtcagaggaatgccagggttagagtcagggccaagttttacatcagggtgtcaaggaaggccttagtgagaaggggcccttgagcagaggggagggagagtggcaagtacagatgccccaaggcaggaacttgcccacggccttgccagggcggagaggtggcagggcagagcctgcaggccctcactctgagtgggtggagagaggccattcagggctttgagcatgtcctggtccttctggccagtctgttgagggagccaggagaaggctttgcagggtgggggtacaggcccatcctcagctacagctcccacctctgcatgactcctacctgtttgtgggctcagcacaacaggagttaatgatgctttacttagtggttgagtttaaatttttcctgtttttctggagtctccactacccctcctttcccagctttggtgggttcaggtgggtctgggacaggagaggggtggcttgctcagtcttcagtccctgctgtctgggctttgaagccacacagctgccaagaagcagacagacttttgcctacccggcaagagtgcacagtgcccccttcccctgggtctgctcccgagacacctctcaggaggctcctgcagggccagcttggtggggtcgggaccctgggcttcagaccccgccctgttggagaagttacctccctttctgagtctggatttttgcatctgcgaagtgagagggctgggtggcagtcaggtctggattctcatcctgacgctccctgccagaggagcctgagaaagcagcttcgtggctatgtgaaactccctgagtgcccagctccacagcccagccgagaaccaaggccctctgcatttcccctcaggggtctctgccaccacattaaggagtggggggggacctattccaattttacagcccctgcccagacattccagggataaccgcaggagttgctaggggaaacagcagttgaggggttctagaacagggcagaggagaggcctgcagttccagacccacgtcattatggagtctatggtgcccactccccagttggtatctatgctgttccctgagagccccaccatccaccttctctccttttagaggtgcctctggagctaggctgtggacagagcctgctcccctgcccagacactgtggggtaagtaggagaggaggggttgagggaagagaccaggagctaggcctgggcctggaccatgcgtccttttacacttgtcatctcctcaggccttagaactgaccaccagtctagtgtgactatttaagttcaattataaattaaagtgaaataaaatggaaaagttctatttcccactcccattcatcacatttcaagtgcttagtagccacctggggccagtggcaggtcacggcagctgcactggatagtgcaggtgtgtaacatgttcatcactggggaaagttctattgggtggcgccagcatcatctctagagcaaacccatggggtagagattgttgccccattcacagctgaagaagctgaagctcagagaggggtgatgactggctagtcacgtagtcagtgagtgccagtggtcctggcaccgggtttcatttgatctcaaagcatgggtgtggggttggcacatgcatgtgtctccctgcccagctgactgcttacctgggatgggttggaggaggctggaggcccacttgtgggctacacacaggcttttaggatctctgccttgggccccagggccagctggagcctcccttacttggtcacccatggggagcattgctttagtggaaaggcagggtgagatgagcactcagtttggggcctctgggcctgcaactttgggaacaaatcccttaggaggggctctggaatatttcactgggctctgaagacttcattttaaaagtgagaagctgagcacagtggcatgaccctggcctgtatttccagatactcaggaggctgaggtgggagaatcacttgaatccaggaggtcgaggctgcagtaagctataatcacaccactgcactccagcctgggcaacagagtgagaccctgtgtcttaaaaaaaaaatgtgacaacaatagccaaaaggtggaaacagctcacatgtccattggctgatggataatgcataagcagaatgtggtccatccatgtactgggatatgattcaatcataaaagagaatgaaggactgacacacgccacaacatggatggacctcgaaaacaggataccgagtgaaagaagccagacacagaaggccatgtagtttatgagtccatttatatgaaatgtccagaataggcaaatccatagagacagacagagagtagattggttgttgacaggggctgggggagaggggactggagagagactgctaatgggtctccttttgggatgctgaaactctggaactagatagaggtggtggttgcacaacattgtgaatatactcaatgccactgaagtgaacactttaaaatggttaaaatggtaaattttgtgttatatgtattttactgcaataaaaaaagtgagaagaagcggtagaatctagatggtgaatatatggatgttcattataaaatgttttcaactttgccatatgcttgaacactttcatcataaaacagtgagagagaggccgggcacggtggctcatgcctgtaatctcagcactttgggaggccgagatgggtggatcacctgaggtcaggagttcaagaccagcctggccaacatggcgaaaccttgtctctactaaaaatacaaaaattagctgggtgtggtggtgggcgcctataatcccagctacttgggctgaggcaggagaattgttttgagcccaggaggtggaggttgcagtgagctgtgatcataccactgcactccagcctgactctgt

SEQ ID NO: 1884899 - DNA, 4001 bp, Homo sapiens
agggagcagctacagagacaaaaagaaaaccgcaagagtccagaccactgacctgggagccgactagcctggagaaaaatgacattattccagctctgctacttcagtggtgctttgaaataaaatgagaagacaaatgtgaaatcctttgataaagttaaaaatcattctatgtctccaagaatctcaagaacttcccaagtgtgtacacaaactaagtatattgattttttaaaaaataaatgtatacacatttattatattgatttaaaatgtatgagtttaaacaaatcaatcaaaccaaaacatatgaagtagaggtctacaaataataatacatttcaaaatactgaagttataaagcccaccaagtttcttaaacactgttgagtttccctgcattctccagccatttgattaatctttcagtgcctgtggcaacttaaagaaaaatatttgcctttcacggtcagtatcatcccaggatttaacctactgtctgcctacaagctctggagaattagaaaccaagaatgagactgcatacccattaccccttacgaccgtgatgtcttgaatctagtgactcttaaccttgcatgatatcttttatatatttaagacttctatttttagaatcatgatatttatgtctattgaacttagaacttatattattctaagagttcttaggtaatgatgatgacagacattcattcacttactccacaaaaatactagagaggcaacctaaggcagtcattcagagaatggactctagagtcacttaacagtttctccatctataaaatagagacaaacataggacttacctcctaggcttgttgcaaggattaaatgaattaatattcataaagctttcaggatggtgtctggcaacatggttagtgctctaggagggctcactacataagaggagatatttagtggatgcccactgtgtacttgatactgtcctaagcactgaagatactgtggaaaacaagacccatacatgtgaaggtggggacagaaaatagacaaggaaataaatgacataatcctagagtattaaagtattaaacaaagacatgcaacagagtgattaggagcagagagagttggggaaaagcctttctctgagaagaggcaatttgaacactgggaccagagcacccaaaagccaccaggcatgtgaggactcagttagaggattcccagcagagaaaaccacaaaagcaaagagatacagccatgaagccaaaatagcccacttgatctcagaaaataaaccatccaatttaatgtggggaaggcatatgagtcagacaggcaaagccaaattaagccattcaggaatcaggcaaggaacatatatccaggcgggacctcttcacacttgatgccacaatgcaacgatacgttttaaattccaatggaattaatctgcaaattttaatggcaggattcaggagtaggccccttctttcaccgacttacccgtctcctcattaatatttcatataatcttcttcatactgtcttggaagcaagcaagacaacagacagggaatatttccccctatatgaaatgtttttgctacattattttgtcataccaggtgtcaaccacctggtctactgccaaatccactgtactatcttaaagggtccatcctcatcaggttattttcataagcaaataaatacatcataaatgacaaatgctaggttttctctaaaggaaaaaaaaaatcatttatctctagccctggtcccagtcagtattttgcccacttattttgtcttattttgcccacttagacctgctgcttcaagtcctttctgccattgctgaagaaatgacatgaattcagacaaaggaattacctggtccaattgtgtctatctgagacagtcctcaaatgctaagttaacagccatctaggatcacacagctaaggaaggcttcccgccgctgcctcccctgcctttcctgctgagcctgatggatgagcttttgtctttctggcatcccaagcccttcgctttgtttcacttttgacagctatgcaccttgcggagaagccagccaggtttggaaaccagtttggtcctgacagacctgcacagcgggaactcacctatatatgcagtgatctggggcagtgcctgcctgggcactagaaagtcagaccaggttcccagagagccctaaaggcaaccagtctaaacagatacatcaatctgctcactaaagaataaagctggctctcccaatataattacaggctggctgatttattattccaatctttagtgcgtggcaaggttagtgttatttgtgccagtttatggtattgggccaaaacatgaaatatcaagttaatatgattggttccaagaatggatttgcacagagacagctcctgcttatgccaatgtgtgtgcagggattacaccacgtgacaaagcccttttgagaagaaaatgacaattcttcatatattcagaatgatttaatagctggcaagctactgccaatcacctgggctactgccagatctactgaaatatcttaaagggtccatcctcattaggttattttcataagcaaataaatacaccataaatgacaaacgctaggctttctctaaagggaaaaaaccaatcatttatctctaactctggtctcagtcagtataaacatgctaaaccccacatgggagaagaacactttgtaagaagttgtggaaggccacgtgagatcatggtccaaggacactggctttggaatggcagagaccaggattcgaatcacagctccttcacctgacagctccatgttcttcatcacatttcataacctctacaaacctcggctacctcatctgagaaatgggaatgatatgttgttacagggggtaagtggctccagctcagttacctggtataagtgaggcattcaataaatcagtgtttctcaaaatgacaggagtgtgatgataagtcttctaggtttggaagttctctgtggaacattattacatttctgtttacctttcaatcaatttaaaaattaatatagccatattacggatcagctgaaagatctatttggattcagtttgggaactcaattcataatctgtgtttatgattacaattggtaccagatggtactacttgaagtgtcatgagctagagaaaatagaaggaaatcagagttgatataaaggaagtgtttatgccaagtgaaagcccaggatgccttcaggttgtgcacataaatgtcctaagagtttagaacagagaaaagtggtataggaactgagtgagctcacagcactggtcctactggcaccaagaaggcaacatatctgcaccatagcaatgagcaacagttaaattcactaaacaatgcttgtcacatttcatcaatatataattgtgaattttattggttttgttgctttttttttttttttttttttttgagaaggagtctcgctgttgccaggctggactgcagtggcacgatctcggctcactgcaatcttcacctcctgggttcaagcgattctcctgcctcagcctcccgagtagctgggtctacaggcacacaccaccacgcccagctaatttttgtatttttagcagagacggggtttcaccatgttggccaggatcatcttgatctcttgacctcgtgatccacccacctcagcctccctgttgtcttatttttaacatataaaattgttttgatgttgtggtttgcaagtaataaagcatttgtttttaggccttataaaaaaggagagacagatgtagatatataacatatagatgtacatctttatgttataaagtacttgttttaggtcctgtatatttaagtaaagataaaaacaatttttaccggtagatgttcatgcaaatttttttctatagaatgagttcatagattattcaattttcagaaacccagcaataactgg

SEQ ID NO: 1884900 - DNA, 4001 bp, Homo sapiens
agctctcagagcaaacatggaagtgataagcatgtattcctatcaaagatggggaaacttcattccaagacaagctggaatgttggtgtttaccaataaacgcttgttaaatgaactgataaatcaatgaaccaatgaataaatgctgccttaagcttaagccctgtgctaaactacagaggtatggtgatatcttagtctgttcaggctactataacaaaataccttaaatgggtaatttataaataacagaaatgtattgcttacagttctggagagtggaaagtctaggatcaaggtaacagcagacttggtgtctggacttgctctatgcttcaaaactggtgccttcttgttatattaccaaatggcagtaagggcaaggcacctcttttaagagggcactgtgatggttaatactgagtgtcaatttgattggattgaaggatgcaaaggattaatcctgggtgtgtctgtgagggtgttgccaaaggagattaacatttgagtcagtgggctgggaaaggtagacccacccttaatctgggtgggcaccatctaatcagctgccagtgtggccagaatataaagcaggcagaaaaatgtgaaaaggctagactgacctagcctcccagcctaaatctttctccactgctggatgtttcctgcctttgaacattgaattccaagttcttcagctttggcacttggactggcttcctcgttcctcagcttgcagacagcctggtatgggacctcatgatcgtataagttaatactacttaacaaactcatatatatatatatatatatatatatatatatatatatatgaatgtgttttatatatatatatatgaatgtgttttatatatatatatgaatgtgttttttatatatatatatatatcctattacatatccttaacaaactcatatatatatatatatatatatatatatatatatatgagtttgttttatatatatatatcctattagttctgtccctctagagaaccctgactaacacaggcactgatccatgacttaatcacttcccaaaaggactcacctcttcatactatcacattgggtattagttccaacatatgaatttgagggggacactaacatttagacaatagcaggtggtaaaaaagacacattgtcctcaccttatggaggttccctaagggtggaagggatggaagatatacaaggattaaacagttcaagctacaggacaagggttgtcttaagaaagatggcttgactgagagaaagcaaattggtgttcttcagtcttttcatgggtgctagatacttccttgttgccatttctgcattgccagagccacacacacacacacacagaacacaatagactttgtacagcttccagtgcaaaattagaaaccagagctcaatatctagttgacagtgacaatatggttattagaaaagcctaagtatgacatgtcttgaataatcaatgattgaatcatgtgcctttaagcttagcttatgccaaatgcctccaggaaaggttatttaaaaaaaaaaaaactcagaatgtgctcactggcttacagtgattgagttatgctgtgggccatggtaacttctctgcagtgctcaaaatagatgaagggcagatcagtcaccctggggaattttatctgcctcatttatgcatccagagatgctgcttacataaagccgaaataagcacaaccaaaaggcaccaaggaagacgaataaaaggtgacgattcaaatagaaaccaagaaaacaagaaagcaatcaacagcaaagatcaggaccagtccctgttgtaaagatctgagtaagaattcggcctgtgaagatggtacagtacctttaactttctgatatcttctaagaggcagatttagaaacctcttcctggagaaagccacagcctccagctgttcttgttctacacattcaggcatggacccttgccacagcctctcaaggattcacacttcacactggcagagcactctctcactcctcctggagatactggctccttcttgacctgcaggcagagcaccagaaccatgtaaaaatgtgactcaggcaactcacagataagcaaagacctccaggcagagcaccagaaagtcaatcaagaaccatgcaaaaatgtgactcaagcaactcagagttaggcaaagaaactgaaagtttcaagagttccccttggccaagtttacaccaaaacatttttattatgcgagtagtttttaaaggaaatcattcatcataagtttgcagaaaaggtctgctccttgtctccagttgccttggagatcgtcaaggggtggctggaggtgaatctaagagactggaaattcagttcatggtcaaatccatcagtgttttaaaacattctaaaaaacccaacagcaccatctgtaaggactgcatcatttgcgaaatttcttgctaaatcagctggccaaatgcaaagccaattgctttggcttccgtacaacaccatgctgcagccaggaagtattttaagtggataatgagtagtctcttctctcaatgaatacgttcaaataacatcgactgcctgtaatatgcaaagttcctagtcaaggctgccttaggaattcctgccccttaacttaacgctttaatctttatcagggaaaatatccctcttctctagtgatgtttaagaaatcaattccctggcaatggcccaatacactttccagctcatacacagacatgtaaaactgcacacacagagaaacacccaaatgcacaccattcgtactagttctgagatatgcaaggcttacaccctgcatccaagaatggctgccaagtttttcctttatttagttataatacctcctctaaaattatttggggacccaaaatggcctttttgtgtgaggaaacacacataagaaatacctctctgcctttttcccttgaaaaatatagttatctatggaaaatctgtgtgctctctctctttgtctctcagataaaagtggcaaagcagatggaagctccttctgtgaagaaatcaaattctatactccttatatccaacctccattactctatttttgtcatttaagttatatagtagatatgtaataaatgcttcattatttcacttattaagttggcttctccctcaaggtactttagaactttggtacccaacagcagctctgggatcatgagcttatcagaaatgcagacactctggtcccatcctagccccccctcgaatcagaatctgcattttaacaagatttctaggagatgtgtaagcacattaaggtttgagaagcactgttttgggacacaccttgattctcttttttttttttttttttttagttttggtttctttttttagacttagggaatacaagtacagttttgttacatggatatattgtgtagtggtgaagtctgggctctttgtgtacccatcacccaaatactgtacattgcacccaacaggtaatttctcatccctcatccccactcccaccccaccctcttatcttttggagtttccaatatctattattccactctgtatgttcattacaccttgatttttacactgttactgttagtctagtaagttctctcactccgcaaagatcatgtcttgccatgggggacacttttctagaggatagtaattatgagctgatgcttttgggcactaaccatgtgccaggagtggagagggcacatagttaacatgagaaagatttactcagttagtaaaaggtggaggcaagttggaactcaatctggcatctgggtccatgttttccaggtgctgcttcccttattgggcccctgcagggtgcagaacggtcctactttctgcaaggtgtttgacgtccctgtctaccacacactataactgcatgataccttcagaatcctgacaacctaaggactgcccccacatttccaga

SEQ ID NO: 1884901 - DNA, 4001 bp, Homo sapiens
gcttgaaccggggaggcagaggtttcagtgagccaagattgcatcactgcactccagcctgggcaaaagggcaagactctgtctcaaaaaataaaaataaaacacatgaaggaatttcacagagctaaaggtcaagtgcctgagaaagaagtttgcccataaaatgctttgaaaagaaaggagaaggccaggcgcagtggctcacgcctgtaatcccagcactttgggaggctgaggcaggtgaatcacctgaggtcaggagttcaagaccagcctggacaacatggtgaaaccccatctctaccaaaaacgcaaaaattagccgggtgtggtggcagacacctgtaatcccagctactcaggaggctgaggcaggagaatcgcttgaacccaggaggcagaggttgcagtgagccgagatggcaccactgcactccagcctgggcaatggaatgagactccatctcgaaaaaaaagaaaaagaaaagcaaggagaaagctacatctatgaaaaagctaggcactgtcagatgtggtggctaacccctgtaatcccagcactttgggagacccaggtaagaggatggcttgagcccaagagtttgagaccagcctgggcaacaacataagaccccatttctccaaaatatttttaaaaaacgggggaggagaggaggtcaggcatggtggtgcgtgcctgtggtcccagcaacctcaggtactagggaggctgaggtaggaggattgctggagcccaggaggtcaaggctgcagtgagccgtgactgtgccactgcacgtaagccgggacaataggacaagatcctgtctcaaaaaaaaaaaaaacaaagaaagaaggaaggaaggaaacataatttaaaaaatcaagtccaaaaaaaagcaagcaagaagtaaaaaaaaaaagctcagcactgtcacaagaaatatatggcaagaaaagctggcaatttctatatacctgtgaaacccaaattgtcacttgccttaaggatcaaatgtatcaatggtgtgagcccaaaactctgttgcaacttcttcactttccccagatcttcaatggcagctttgttaaactcaacaaggcttcagttaacacgctgaggattgtggaaccatatatcacatggagtacctgaacctgaaatcagtaaatgaactgatctacaaattggttatggcaaaatcaataaacaaattaccttaacagataacgctttgattgctagatttcctgataaatatggcatcatctgactggagaatctgattcatgagatctatgctgttgaaaaactcaagttcctgtgatccttcaaattatcttctccacgagggagaatgaaggactacctattttgtattaataaaaggtataaatgccagcaacagaaaagactatatcaacaggcttattaaacggataaactgaagcatctaacattatttttgtaatctggtcagttaatagccagtcactactttcaaactggaaaaaacaaaaaccaaaacaaaaatgtgactgactccttcaagaccaaaatacaccactttttgcctagacggcactttgaaatagagggcaataccatcatatttcacgcttgcctttctactttttaatacaggtgaactttttctccttaataggaaagaacaccaagtaaagaacaaatagcagttatggaaaatagttgcaaaaactgcagggggctacagaacaaaggactgagtgtaggcagagagatagagatccccgaggtgtggggcagagcccacgcatctgaattccaagaacaggcgctttctgacagagaataccaggaaatgacttcacatttttccagactatcaacatacttcattcttcccagtaggagaacccagggcctgttccacgcccacagactttggtcaggcaaagcggccgcagggcgtctgggctaaacgcaaccaggaacacattggcaaacttttgcgcctgcgcccaccgggcgtgcacctgtaggctgaagtcgcgcatgcgctagatgggaacgttgtttcttctcccctaccccttttctgtgggtctgttttagggacagactgcttccgggtcgaagggcttgcttccggagagcgggaaggctaaaacgcggtagctaaactgcagccaactttggttgtgtgtggaaaaggctttagccatggacaggtcagtactgatggtggcagctgagcccgaagtcttgcccgtctcgcctgttggcgaaacgaaataggtgaaactagactcccagaagaagccaaggaggtcccgggtgcttcccctaaggctccttccccatgccgggaaatttggccacaaatggggaaaaagccgcttggcgtgcgtcggggtggggtacagatcataatagtcccttactttcccactacgttctgcgatctattcggcgctttggggcagcaacactgttcgctcctggggtgggcggggtaggtagcgcggcgttcgaaatgctaagtgaccagcctgagatcacaaagccagtcagtgaagatactgggatctcagcccagactttctgattacaagtgccagcatcagattctgagttccctctatgatctgggtactgtgctagccgcctacaacaaagatcagttattcaagatccttcccctcggggaattagttgtgtaatggagacaaccaagcagtgtaaagtggtaagtgtttgggggcgattaagtctccttgtcactgtaactatcaggaagacccctcaaagaaggtaactttctagctggtctttgaataataagagtacattattcgtactccaaacattgagtacctactatgtgactgccattgttctaaaggcgttgaatatatattattagcttatttaatcttcagaacaagaaaaatcctatgagatgggtactgttatccttttttcatatataacactgagactaaaagaggttaaggaacttgctgaaagttcggaagctaataaatacaagaaccaaattgccaacctgcatctgtgtgtctccagcctacctgaggctctttgaggagtaagtagttgttgaccaggtgctcaagggggcaaatgtaggtctttgtaaaagaagcatattcagaggtgctaggatatgaaaaaaaagtacgtgtagctcagtggtcacatgcagtatacgtttaaagtgatgtttgtggctgaatagaagactgaacccctaaactggggtcacattgtaaatatcattttaggaaatttttacttctatagaccagagagctatctgaaggtttttttttttgtttttaattttaattgttaaacgtttaaaattgtttctatgtggttgtttcccatactttcctgctgaaggaatatctgaaggttttaagtggaggaaaagcatattagattcttgtcttaaacacaggccttttagtccgcacaatttagtttctagacctttgagtgaaactgacagggagtgttgtgatgggacaggagacctcctgggttgaaataacttgaagggtcattttgctccaatttaccacaattcttttacttacccttctatctcacaagctctgtttgttgttgttgttgcaagctctgtttgttgttgttgttgtttgtttgttttttaatagtacccatggtttaaagcattttggagactgcagaaaatcttttaagagagaattcctgcagttaggtaactcctcaatccaacaagggaaataagattcactttcatgaagcaattatctaaaacagtgttataatatagattccaagtgttgaaataattccttaggagaaaataacatagtgagtactagaaagtcagagaagtctttgtgcaggtaagatttgagtaaggctttgaagaataagcaggatttggagccaggagtgcgttctcaacaaaagatctaagacttggctactagaatgactatac

SEQ ID NO: 1884902 - DNA, 4001 bp, Homo sapiens
tatttatctaaatcaattctaaagacaaaaatatcaaatcaatgttaatcaaatggaatgcaagctgaccctgagtataaggggaaggaaatgttactcaaaacatgtgaccagctagtttttatatccttttacttttcttcttttaaaaatatataaaaataaaataactacaaaattacacatacatgattgtctgcttcaatgatgtagttaccgtctgtttttaggaagaaagtttcttctccagaagctgtaccattgatgtatattgtacagttgggagaagcaattcaaagaactaaggagggagtaaacttccaataagttcctttgcaagatatttcagggatgctaacaatgaacccaactgaggatctgtggttcttcctcctgggatttttttttttttttttggaagttgctgggtttcttttaaatactcttaaacaaaagggaagggtgtataattggaaacaatggctctgaaccagatcacaatatctggtctcgtgtgtgtgtgtgtgtgtgtgtgtgtgtgagtgtagagacagagacaggatcttgctatgttgctcaagctagtctcgaactctgggcctcaagcaatcctcccacctcagcctcccaaattgctggaattacaggtgtgagctaccacacctgaccctcaatctggactttagccaactgagtgatcagttacttgttgtaagagatctccattctagtgtttttgaagatgacagaaacccctcaatgtaagaagaaatttaaaggaaaatgccatgtgtggttacttctgaaaattcacacactttagagttttgttatacgcaaggtagtagaaatcatactataaaagtgtcaagtttaaagagtttgtatgttctatgtcaaaaattgttttctatcccatcctccaaaactgtatcttgtagacacagatgtgagaatttagtttagtagatgttcatcactgttataagtgaccccaatttacagaatttatcttctgttttctgttgtcacatcaaccagtctaatataattagacacatgaagtaaatgtattttgtaggtttaaaatatgccatctgcttgacagttatacatattgcaaccaccatttagtgccagcattataaaaaaattatatatatattttttggggggaaacagaactactttgttgcccaggctggagtgcagtggtgcaatctcagctcactgcaacctccacctcctgggtttaaacagttctcgtgcctcagcctcccaattagctgagattacaggcacgcaccaccacgcccggctaatttttgtatttttagtagagacagggtttcaccatgtcggccaggctggtctagaactcctgacctcaagaaatccacctcagcctcacaaagcgctgggattacaggcatgagccaccgcgccaggccataaataaatattatcacaagaaattaaatcaaagtaatctcacttttaattggcaaaaattaaaaaaaactcaaattacgtggtcttaaggaaaaagagtttaagctttacaatatattgacaacatagtaacattaaaaattaaaagcaaatattattttatagattaaaaaaatcacccaggtagatcctgcgcctggccagccccgcccagccttccctccggcccacctgacggccttgcgtctctcctcctccccaacttgtggccggcagctgccctccagctttggctccgtggactggctctcccagagcagctgctcagagccgactcacacctccaggcctgccaggtctcccaggggagcctccctggcctgtgtcagatatccggcacccgggagccccctcaggccgtcagcatcaaggagtctaggtcctcaaatcggcctgcgccggagaggaccgtggttgggttgagtaaggggccaaacccctggcgggcccccagtgtccgcacagccttcaccactgagtagttccgcgccttggagaccgtcttccggtaccaccagtacttgggctctcaagagcggaagaggctggccagggagatgcagctctgggaggtccagataaaaacctggtttcaaaatccccggatgaaacacaaagggcaaatgcaggactcccagctgaatagtcccttctctgagtcactccatgcgtccctggctttccattccctgtcttctggccttcccaatggcctgcagctgctgtgctctcgggcacccctgcccaggccccaggctctgatgctgcccccggctccttctggggtctctgccgagtgggacaagaagccctggcctctgcatgggcttcctgctgtgggcagcctctggcgtaccatcccccaagcccaggaagtggcgtgaatccgctaggaccagccctgtctacggggctctgaggcctgtgtgctctgctggagacaagggttgcattttgagtaagcgcctctgactccatgcctcccacacacgcggccttgtgcagatcgcacctggcacctacctggaggactcagctgttctgtttatatcgtgggggcacctctcaccctgacccacacaaaggttctggagatttctggagaatgtatttattaaagctacctctttactgaaagttaccaaaagggtcggtttacgaagtaaatgaagggtcagtgaacagagtcagacgcagaagtgggtttgttattggtagggctttcagcatatgataaaaggataatttgttttttaaaaagtgttggaaaaactgtttttccatttggaaaaagtaaaggttgtaagctttgtgtgtaaaaaaaaaaaaccatgaaggattggaagggaatgcaggtgtcgtgtttataactttgtggttcgagttccttttaacaaggacgccgaagctggaaagcaggagggacaagggtgaaaattaaggcggggtgctggggccctgcagtgcgctctaggtcgtgcgtgagctgggactgtgcccgcagcctgctgggggctgctcttctccagccagggaaagcagaaagcagggcagctggaacctgctgctgtgcctggaccgaagcctccagcatgtgcttacctatccccctcctcgcagcagcctcaggacaaaacagaatgactcaaggacagcatttcctgcagaaagtcaggaagtgcccattatgggaggcatggaagcccccccaccccgggtagtactctccctcattgatggaccattcttggtgcagactcctcactgcacacaccaaagctgagacaagagcgcatccgtccacgtcgccccaggaggtaggcagcgcgaggcgcccagacagacgggttcagcctgcaagactgtgaggcgacttgtgaaaccgacccaagcattccaacaggaacaaaagtgtggtcctgtggccacgtccacagcaagttccactttccccttgctcatttctgcgttgttggaggtgtttacaaccagcatgtgcttttataacacaacctcaggtaagagtggaagagctgccgtgcgtcctggagagtgataatgtgacggaagcctgggcgaagccctcggagagcagtggctggacaggggctcctgggtggggcttggacagcactgatttgtgggtgtggaaggggccacgttgtccgtgataaaagtaaaaatgcgccgccaaaaaaaaaaaatcacccagcactttgggatgcccagatgggtggatcacttgaggcaaggagttcaattccagcctggccaacatggtgaaaccccgtctctactgaaaatacaaaaattaaccaggcatggtagcctgggcctgtagtcccagctactcaggagcctgaagcacgagaatcgcttgaacccgggaggtggaggttgcagtgagcagagatggcgccaccgcactccagcctaggtgacagagcaagactctgtcaaaatttaaatatatatatatttatattaca

SEQ ID NO: 1884903 - DNA, 4001 bp, Homo sapiens
actcttctggcaatctgggggaagggcagagactatgccttgtatttacaaaggaagaaaccaagaaacacaaaaaggcaagagagattctccttactgcggagtctgccccaagatggcagtgagacagtacttgcttgggttacagaacacaggggccaactctctccctactccacagctacattccagagaatggcattttcggagcacaagtggtttccagggccaggcaacaaaggacttatcagactaactggaagagagaagctgatgtccccaaacccactccaaactccaaactccaaagtctccattctatgccccaggcacatttactcttccctggagtgcagtgtacagacctgagctcacttgagagcctgggacagcccatccatgttggcaggctggctccctagagccagccatctcatccttgtgagttgataatttagcacaactcccccaaaggatgcattagtaaaggactcttgaagatgctgaagaattttcaaaccaaaggaatgaattgctaagaataaagtaagttggaggagatgcttttcagcttggggcctgcccagcatcacgctgtgtgtcactcaataatctatcaattatagattatagttaatcctgttgaaatgactacaggaacccagcaaaacatgccagaggatcctctttgacctctatcccaagcaaacatatggtggtaatggatgtcaagacatgggagggagctagaaagttccactaaagctaagtctaaatgaagctcggctctgggtggggcaaatcttgagaaatggcatcctattgcagtttggttttctttccgtgtttatcatctctatcagtattctcctttaggcacagcgtaaattgaacagaccttgggagagagaacacaaggactggaccacctgctctgctatatcataactgaatcttgggcatattttctaagaatttttttcttttagagacagtgtctcgctctgtcacccaggttggagttcagtggtgccatcatagctcactgcagcctcgaatttctggactcaagtgatcctcccacctcagcctcctgagtagttgagactataggtacatgccaccacacctggctaatttttaattttgttttgtttttgttttttgggttttttttttgagacggagtttcactcttgttgcccaggctggagtgcaatggcacaatcttgtctcactgcaacctcctcctcccggcttcaagcaattctcctgcctcagcctcccaagtagttgggattacaggcgtgtgccaccatgcccagctaattttttttttgagacggagtctctctctgtcgcctaggctggagtgcagtggcgtgatctcggctcactgcaagctccacctcccgggttcacgccattctcctgcctcagcctcctgagtagctgggactacaggcgcctgccaccgcgcccggctaatttttttgtatttttagtagagacggggtttcactgtgttagccaggatggtctcggtctcctgacctcgtgatccgcctgcctcggcctcccaaagtgctgggattacaggcgtgagccaccgcgcccggccatgcccagctaattttttgcatttttagtggagacagcgtttcaccatgttggccaggctggtctcgaactcctgatctcaggtgatccacccgcctcagcctcccaaagtgctgggattacagacgtgaaccactgtgctgggtcctaagacttaatgtactagtttcctggggatgccataacaaagtatgtatcacaagcttgagtggctaaaacaatagaaatttgtcatcttacagttctggaagctgaaagtacaacaggaaggtgttggcagggttggttccttctgacagctgtaaggcagggtctgttccacgcctctcccctggcttctggtggtttgctggtcctcttaggtgttccttggcttgcagatgcattatcccgacctcagccttcacgtggcgttctccccatgtgcgtttctctctgcgtcccacttcctccttttaataagagcgcagtcatatgggagtaggctcatcctaatgacctcatcttaacttcaccatatctgtaaaggccctatctccaaatgaggtcgccttctgaggtactaggggttaggggtacatttggggggtgaaggaaacaattcaacccataacactttctttccctctaaatggggattagaatacagtatttcttcatataattgcagtggttgtgaaagtgtctcaaagaggcttggttcctagaagctcagcagacatctggtttgtctgaaagtacatgtgccttggagctgtctgagtcagactgcacccttagggagcagggctcaggtggggtaatcaccctgtgagcatccaacacaggtaaacaggtgcttggccaatgcgtttccctgatggtgaagaggaaaggctggagagaaaaatctgctgataagccagggctagaaaaagtctgataccaagtcctggagaggatgtggaacctcaggagcccctgtgtgcagctgtctcagtgtgcactggtaaaaacactctggcaatatgccaaaaaggcaaagctgtatatgggatgccccagcaattccactcctaggtgtaggtgtatactctagagaaatgcctacataggtgccccaggagatgtgtgcaaaaatattcatagcagcattgtttgttagacctaaaaatgaaaaataacctacatttcctcaatgtcatgcatgcatctaatggaatactatgttacacagcaggtgaagtcaattaactagagctgggcataccgtatggatgaatctcactaacaaaaactattcagcaaaaaagagcagattgcagaagaataaatacagtgagtaggacaaaaccaacgacatattgcttagaatgcatatgtaagtatttgcataaagaatataaagaagtctgggcctgataaacaccaatttcagcaggcggaagtggaagtgcacagggagcttcaacagcttattttttaaactggtgatgagtgaagagtactggttatcttattctttataacttctgtatatttgaaatgcaacattttttaaagagccaggacttgaggagagtcatataaaggagactgagatgccagggacaatttctactcgtgggaagattcagagttgttcctgtcattccctggaacccagaatccagagtcaattagttaaagactctgacatctgctaggcgggaggcaagagacctaacaaggtaaggctagggggatgagaggagggaaggacgctctcatgctgcccctctttgatctgaacccagttactggcctgcgcgccagccctgggctgcagataatgccaggagaaaacagctgggcagtcctgggaagcctgggagggatgcagaggagggcgggggccacacacgctgggaggtgcactaaggctgctgcccccacacagtgacaagcgcttcctcgcaaaccacctggcacgggcaccctgacagtttacagcactgtctctcactctccttctctctctctctctcacacacacacacacacacacacacacacacatacgccccatccaccgcccgctctgaccaggaccccagcgttggggatgcggccaagtcagccagctgtgggccctgccaaccctccctctcttctaggactgggtttttccagccggagtctcactccctctacagcaatctcgggaaattggagactgacgcggctgctcctgcatgttatttatttttcctctttccctcccgtggagaccctcctgttggaaagagagctgcagcacgggacagagacaggcaggaagaagcagagaggactcggtgacgcccccaccgagcagcccctggcccactcctccagcaggggccatgagcaccaagcaggag

SEQ ID NO: 1884904 - DNA, 4001 bp, Homo sapiens
tctccccctcacacatctgtctgcttttctgagctagagtcttctgttcacaagtgcccatcaccgtctggactatcttctttctctttcaccaggttcctagcttagccactaggtcttccaggtcctccagagtttcttcaacccatttcttctctcttctctttacatgcagtgctccaggatcttgaagcgtcatagccaagatgctgagtgggtttacttgagtataagattgaaaggagggaggaagaggagagggaaagtgcagaactggtcccagcaaaggaccccaggttctggcctgggaaattggtgactattgctctcaaccattcttactttgaagagttgggttgcagagggagcaattcatctctcttgtccctcttccacgttaaggcttctcatctccccttggctctgaactatgcagtttctaccaggaccataggaagcaattcagagccagaggcctgtggatagataggtcagctttaattgcctttccgtatgaaacccttccagttgtcccagagccactttctgccatctgtgcaagccaagaatgtccttctctccatctttcctacctccatcttaaacatacatacaaaataactgccagcttcctttcttattttgtctccaaaattgactgtcacaggggaatgagaaaatgttctaagctacaagattcccgtttccttaaagtgatatcctgtcctagtgaaccagtcaggtaacaggttctgctgcatttgttttaaatttcccctcctgcttttcagagctggtgctgaacaggccacacccctaaagacaaaggagagaaaacacggttttctcatcctctaccatcaggtacccaacaggaataggccctgaagtgattcagactagcaaatgttatggcagatggtcaggacgcaggttaccacatccagggacttcacttttgcctttaaaaattcacagccgtaacttgtgctcaggacttcccctttagctggctgctccctgggattttctcctgctttagagttttgtttcatttttttattgtcttgatttcccagtagcagccttgccctaaagcttgactgagtttatggctcctaaggagctttcctaagactcttgactatttttcttcccccttcagtcaagtgtttttacagttaagaattaatttgtaactgcatacatgccctgccagtctgtccctgtgttgggtggctaatttatgtagcgggtcttttttatttcttagcccccatgactaattatctagtcctaacttcatttttatcagtgggaagatgtgtacgggacctcagtgaggagcactgccagaaccacagtaacaaaatggcactgaaataaggaagcagcaggtcagaaccccctagatagttcttgagttggttctcagtctcactaaggaggcagaataattgctgccctgaaacttctctgatagtcaaaggtaacttcacttaccttgttattgctaccagccatgtggtcactctccccaaatctttgtcttccagatccatctggaccagaaccaaacatcatggaaggtgtcacttggcccttcctaaagtccatggcgtttctagaggcctaagggaggacactttcagaaaggagctgagtgtatggtgggtgtcctgaattcgttcatgtgaatacaggactcaggcttcccaccccactccaatgtgagtgctcgatacacaagcactctagctagctgccacgtacccaaggccacagagggaggggacagaaccaggtcttctggtctgctcactttctgccccattcccctaacagaaagtttgcttagagttgaaaagtctaagaaagcctcccacaatactagagaggccaacaaaaaaaaagtcatgccccctttacttactcttttgctgctggttatgcatctcaaatctgacttccttagccttcacctccctccttggccctaagcattagaccatgtactctaagtagtggttaaagagggactgagcaaactgaacctcctctcgctcacttctctatccctgttctgttggttttggctcctttcttgattcactgccctctagcaccacccatcctggtagatggagtgcttaaccccaaccgtgccctatgtacagcctgaaccaccaaacagacaccaaaaaaattcttcctgtggtttctggggctcccctgctccacactgagaggctccttaaaggtgctagcccctgatacagctatccccgccagttttctccttttttcataacttccttcccatccccaaatcattaatttttcattaatattgtacattatatacacaggaaggaaatacattattttttttaaatttcataaccagcctgtttagattccagtcttcctagctatatcacatatgccttgttgatatgctctttctgctttctttagacttaatgtttgacgggggtgggggtgtctggaagaacaggaaaggtggggatcctaaggcagattaaaggactccctccaccccactacagcctcccataactctagtcatccctctcatagtacaggactgatttctctgtgtctgtttgtacacacaaatgtgcatacagacataaattcccccaccccataccaaggtggttacctagcaggaatgagcgtaggtggctgctggccaccattaccaccgtctgcatcagctgtgttgtctctctttggggtaaagtcctaccccagaatgagaaaaggctggggagagtagggcaggttaaaggagcttatgtcctctgtagatgtaggtttgtatcatagctactagggtttatttttttaatggggggctaatagcacagagttatctcaccagcagtagctactggtgagtgatgttttagctgtaagaagtggctatgagcaatagtttcactgactttaccttagggcagtgccacagtaatctgggaacttgttagaaatacacattctcaggccccatcccagacttattgaatcacagactctgggggcagggtttaaaagcactccaagtgattctaatgcacactaaaggttgagaaccatttcttagggataagctgggaaatttttacaggtgtggaggatatttcaaatacatcttttgcctttgcactaacatgctttcatttctttcagtctcttcctccattccctttaaagtcttccccatcatatcactgatctcaaaagctagatttgtcttcattttagtcgtatccctaaaaccatgcattggtctggacaggagttgtcccatattcccttgcagactggtcactccatgttctctgttacagtaaggaccagccaagcttcagctgtcccattcctccccctacaacacacacacctttcaggcagggaggagatgagcttccagccccaagagtggaggctgccacatcctaacatagtatctattgaaaaggaagcagtgtgtatctatgattatatctctgttcatctatatatttttgacatgtagcaacacctctccatcttatcaaggaactcaactcggtctgggtctccccagtgcccagtggtggcctttgacaggtaggaggatgcagtgctgcaggctattttgttttttgttacaaaactgtcttttcccttttcccctccacctgattcagcatgatccctgtgagctggttctcacaatctcctgggactgggctgaggcaggggcttcgctctattctccctaaccatactgtcttcctttcccccttgccacttagcagttatccccccagctatgccttctccctccctcccttgccctggcatatattgtgccttatttatgctgcaaatataacattaaactatcaagtgaaccactgttatgtctgatgcttcactcctctatccacagcccccattgtccccttttctgggaggtcactggcctt

SEQ ID NO: 1884905 - DNA, 4001 bp, Homo sapiens
aagttctagactcttgagaactgagcagtctccagagtttccacaccctgctccccttcctctccctccagctcttttaagctggagaagtgtgaagaaagcccctccctttgctccactttcaggtgattttgtgaggaccaaatatttggagccttggcagccaccttgtgccaatgaggaaagaccaaaagaattgcagaggcttttccagagctctgactcgagtcaatgaaccaatcctagaaacacctgttgcttgttgggtgagaagtttcctggtgattaggctgcatccactcgggcaaagcacacaagcaggtggactcactgattagtgaggaggcagcgggcaaactaattattactgcacaggcagaaagtgctctgacggcagtaagtctaagatgatgggggacatctaattcaaacttggggggtcaaggaagccttcccagaggaggtaagccctgagctgtgaaacataggataagcaagagtcatctccatcaggtaggaggtaggggcctcagaccacctgtccagggttgaaagagagacagaacatgccagtgtggctgccggggaaggagcatctaacataagatgaggatggagaggtgggcaggggtcagcccaaccaagagcaatggagagccatggaagaatttttaacagaaaattagatgtgtaatttagaataatcacagtgagtactgttgaattgctggctggatacaataagagaatagtaatagctaatatttatacaacactatgtgacagactctaggcactttataggcattagaacattagattacttaatccatatgttttgctaatatatatattaacaatagtagtagttaatatatatgattactaacaatagtaattatgtgagagagatagaccatatatatttttagtaattacaggagagatatatatgatatatattatatacatctctcacataactattgttagcaatcatatatgttaactattactattgttacatagtatatatctctcacatgattatgcttgttgtatatttacaagtatatatggtggggggcacattggggatgtctcatctccatatctcatattcatcttgtagtatgtgtatatagatagatagaagatagatagataaatatctcacatgattatatatatatatatattatactgtgagtataatatatatatactcacaggtgtcccacagcccatagcaaatatagggagaggtatatatcatatgtatctctctcacatggttactattgttatccccacttacagataaggaaactgagtcaagtgtaaaaacaagaatctgtagccccactgcctacctgagcctgagtgccacgtggcacttggaggaacagcagtggctggaggctaatttcctgtttgcactttgaaggttactgtccctggtcagagactctgatgggacacaagtgtggagtctgtgagctctgacacagacttttacttggcaaaggttcggaaaaatcaagtggctgttaagaagatatatgatttctactgagggccacgcaaaaggcaagtgtctcacggatgaactgagtttgctcttttgatcctgagaacagctctgtcgaattggggaggtgttctggacattttacagatgacgaaactgaggcccagaaaagttaagtgactcacccagggtcgcagtgttactagaaggtgtgcagtggtcttccagggaagatcctcttgtatcagaaggaagagatgatcagttcagaaggcccgagaaaagacaaggtcatttgaaagtgatagttcatccaggtgtgatcctggagcacgaagtgacaaaaaagtcacatgtcaaggcaccgacgtagaaagggtctccctgtctcagagcccacctggtctcttccttctcagggtggctcctctctctctctctgcctctgccccttgtcttagcccagcatgggtgcaggtcccaggttctgtgacatcacagttcagggcccaaagcccaatctcggatcacggcattgagagtatctgattggccactggccagccaatggtggggcaaactttggagcaggctatcacggttggaacaatcagtgctgaaggagttgaagaggatgggcaagccacggcttctccttctggaaacggagatcatctccaaagaagaccatcattttctactatggacaatgtggatgctagttctctcccattcacaggttcagcacatgttacagaagagcgttttccttcagagattattcacagatgtcccacagcccatagcaaatacagggcatattaagttcaaataaatatatgcaaatatgtgagtgtattgacataaatactgcatttatattcatatactatacttaaaagtattgaatatattttcatgtatgtttatattatatatatgtatttcaagctctattgtatatatgaatttattatatattaatgtatactacataaatatgaatatatgaattcaatatatttcaattagttgtccatatctaaagagacttcacgtaagaattcatgttttaaggtatcttttaaaacgaaaatcaatgtaccatagaagtaggtaacatctatgtagcatttccagtgtgctacccctgttttaaatgatttctctgcatttatgtatttaatcctggactcaacactcaccatgaggctgacactgttagttttcctgttttactaatcagaaaacagaccctgataagttagctgactgggccaaggtcccacagctagttggtggccccgctgggattagtagctgcagtgtggctctgaagcccttcctgtcagcacctaggggcagtgacctttgggacaggcggctctggctgccacgggcagcaggtggctgaggctgagtgtccccaagaagcagagttttggctggtaactttgttccagtgccaacaggccaagacacacttccacgctgcctgcctaaccactgtgggctttcacatttgttattctgataggttacagggcttgaaaattcctatatgagctgcacttggagttttaaaacacatttcattttctaaatttgaacgtaaattaactcatcaacaaaaggaaaaccagaactaaagtttggataaagaaagcccctgttgtggctataaattctgttctcaatggtatagttcaggcttcttcaagtagattgagccctgagaacttgtctattgtattttcccctggtgaatcagtcagacaaatgggggcaccttaattcagaaagaaacagcccagctgtgacatttgtcactgcagaggcctggcccatcggtcaatcccttgtccctgggctgacagctctgtgttcccctgtggtcccactgctgtctgaccacctcctctcctgactgatgatgacacctctttgcaggtgtggaaatggcctgtagcctgcaggagcctgaggagaagagaggagctagcagccccagtcaagtctagcgaagtgcatcttggcctgcagtgatggctgtttcccccagaaaggtcagtagcacagaagccgctcatagccttcctgaagtgggcatgactccctgtgtcctatccactgacaatgcccatatttcaccagtgaggcctggacggtttgccattgacgagtgtcaggtagaatttcccattgtctcttctcatcttctggcattgagtggccagtctcttccttttattagtcatatcaggcgtcctctgacagatgcacagggagacggaaggttttgggttttctgctgtggcgacgaggacctggctcacacggttatggagatgagacttcccacgatgtgccccccaccatctgaagacccaggaacgccagtggtgtaattcagtctgagctcaaaggcctgagaaccagtgggggctgataatacaaatcccaatctcat

SEQ ID NO: 1884906 - DNA, 4001 bp, Homo sapiens
tctaagttttaagccccgcgtacgttaggtatttgtcctaatgctctctcgccccttcctccccacccctccctcctgacaaggcctggtgtgaaccaacccaaatgcccatcaatggtagactgaataaagaaaatgtgacatatatacaccacggaatactatgcacccgtaaaaaagaatgagttcatgtcctttgcagggacatggaagaagctggaagccatcattctcagcaaactaccgcgggagcagaaaaccaaacaccacatgttctcactcagaagtgggagttgaacaatgagaacacatggacacagggaggggaacaacattcttttcctttatcttatatttgtatgttgagaagctaagaatgattctaatttaggcagttcaagcagtgtttttgaatcaattctactctactttatgttggatgtctccacaatggaagatattagaggaatattggagaatagggtgatgaggcaataggggttgctatgagccattgaagacaggctagggcatgaccctttttgttcctgaaatcactctgggtgctatagcaactcatcccctgatggagacattatctgcacaatctcactgcatctgcctcgtctcatctccgaagaccacagcggctgagagcagaaagatcaccagcaggtcacccctcattccacgctgaagtcccctccagcacaaccacaccgcctggtcatccagcccatgacctctcagaggatgcacaaagggagggcccaataacttttatttacttatttttatttattattattattatttgagacagagttttattcttgttgcccaggctggagtgcaatgacatgatttcagctctgcaaacttcgcatcctggcttcaaattatctcctgcctcagcctcccgagtagctgggattacaggtgcccaccaccacacctggctaatgttttgtatttttttttagtagagacagggttttaccatgttggccagtctggtctcaaactcctgacctcagatgatccacctgcctcagcctcccaaagtgctgggattgcaggcgtgaggcactgcactcagcccccaataactttttaaggctctaagaaaatgtcttttttaaaattaattaattaatttatttatttatttttgagatggagtcttgctctgtcacccaggctggagtgcagtagtgagaactcggctcactgcaagctctgcctcccgggttcacgccattctcctgcctcagcttctcgagtaactgggactacaggagcccgccaccatgcctggctacttttttttgtatttttaatagagacggggtttcaccacattagccacgatggtctcgatcccctgacctcgtgatccgcccacctcggcctcccaaagtgctgggattacaggcgtgagccactgcgcccggccgaaaacttcttttttttaatgaaggaattacaaaacgggctttgaagtaatgtagaatacacttatatatttacaagttgacatggggacacactcccacagagtgcacagtgacgtgagtgtagtaacttaatgtggtaagattacatgacccctgcacgtgatgaagtctggccatgagccctgtgggaggaaattttgataaatgtcttccttcaatcatttcactgtctgcgtcctggttctgaacttcaaaagttgcatgtgaagtctcttgcgaatatgagactcgggccacatagccgatcgcactcacccatcatccaagatgtctgcctgggctctgatctgctctgttcttgctttcctccagggacgggtggctcagtacctcacagaagcaagtcctgcctttggaaaggaagttctttactattttgatatgaaatatgcctgcttagttctcagagcaagagtgtcaagagtacacagcccaagaggcccggtggaagctgcagccttcttaccttcttatgttggagatgggaagccccagaatgtcccttccacagcgttctgtggtcggcaagtcaccaagccagcctggattccaggaagcagaaagggagttcccttccgcctccctaatgccatggaatggggaagggtacaactctaggatcagacccaaagggaactgttgtgaatcttgattttgtgacttcttggctattggatttgggccaattatttgtcatctctgtaccttaatttactcatctatgaaagaaggactaaaaatacttatcataggagaagacaatatgtaagccacttggcaatgtgcctgggacctagtgagcgattcttctcacttattattgttttcgtcatcatcgacatcatcgtcaccattacttttcattgtctttggaaatttggacagagaccacaggcagatgcggtgccgtattcccacagggctggagcagcgggtgtgtttttctgtgatagcagcgcttcccggaaccagcagggtacacgttatttgacctgaagggcgagggagttcagagcctacagtgatgagagaaagccctgagtgaacgtttcctttcagcttcgtgagaggaagagtctaaataggggagccatccccaaaacctgaccacgagcaagggtgcaaaatagggtgcagtctcttcacatatctagacaggagtatgaacctccttgggagcgtgcaggctggcaatacccgtgtgtgcatgtacgcgtgtgattcctgtgtgtgcgagcttctgtttatgtgtgtgagtgtgtgcatgtgttagtatgtgtaaatgtgtggtttatgtgtggtggagtgagcacatgagcatgtaaaagtgtgtgtgcatgaacagaagtatgtatgtgtactgcatatgtatgtgtgagtctgtgtggcatatgtgtatgtggagatgtgtttgtagtgtgtatccgtgtgtgtacctgcaagtatgtttgtgtttatgtgtgagtggtacgtagtatctatacacaggtgtgtacattgtgtgagtcgtgtgcatgtgtgtgatgactctgtgtttgcgagtgtgtgtgctgcatgtaccagaatgtgtgtatctgtgtatgtgagggtttatgggtgagtgcaatgtgtctgtatgtgggcatgtatatcatgtgagttatgaatatgggtgcaatgtatgtgtgtatctttatgagtgtgttgtgcttgtatctatacatgtgtgtgcacgtgtgcatgcatacatttgtgtgtgtgcatacatttatgggtgtgatgtgtgtgtctgtctgtgggtgtgtatgttgtgtgagttgtgtgtatatgtgtgatgaatgcatgtgtatgtgcatgcatgcatctgtgtctactcgtactttatgggtaagaggtgtgtgtgtgtgtgtacattgtgtgagtcgtgtgtacattgtgtgagtcgtgtgtacatgtgtgatgaatgcatgtgtatgtttgtgcatgtgtggtgcatgcatctgtacatgtgtgaatctgtgtgtatgcatatatttatgggtaagatgtgtgtctctgtatgtgggtgtgtacattgtgtgagtcgtgtgtacatgtgtgatgaatgcatgcgtatgtgagtgtgtggtgcacatatctgtgcatatgtacatctgtgtgtacacatatatttatgggtgagaggtgtgtgtcttcatgtgggtgtgtatgtcatgtgagtcgtgtgtacatgtgtgatgaatacatatgtatgtgagtgtatgtatagtgcatgtatctgtgcatgtgtgaatctgtgtgtatgcatatatttatgggtgagacgtgtgtctctgtatgtgggtgtgtacattgtgtgagtcgtgtgtacattgtgtgagtcgtgtgtacatgtgtgatgaatgcatgtgtatgtgagtgtgtggtgcacatatctgtgcatatgtacatctgtgtgtacacatatgtttatgggtgagaggtgtgtgtcttcatgtgggtgtg

SEQ ID NO: 1884907 - DNA, 4001 bp, Homo sapiens
cattattttggtgtggaggagggtataaatctcagctgtactccgttgccactaggtaggacacggaagatgaccagttctctgggggagtaattactactcactggcttcctgagcagcttgataatgttctgctcctgttttcagcctcactgtggccaaggcaataatttgataataagagatcctgattaaattaaggagccatttgcttctggatgatgatgttgataaaagggttgatgtccacactgcctgctcttttcaaaggtcagaaaacagtcttgaactaaaaactacggcaacgagcaaaataatcagaagcagcatagtttatgctttcgtttcctttgttgttgcatctgggaaagtgtctgttctttgcagaaatcctcactggctccttttgcctcacattgtgaggaggtgaaattggaagtgtcacattgggaaagtatctgtataatgagtctgtaagctgcaaaactctttgtaaatcggaatcaagcactcaggagatctcggtcacttaagcttggttctcacacccgtgcatgcttgcacttgcatgttttttaagacaacagcttttgctttagtagttgggcggtcgcaagtgaacactgtccagtggttcttctggtgcccagactcggaggagatgggactgctctcaatgtgtttgttagaaacgaaactgttcgcactataaccccataaccccttacaatgttcagaaaaaaacaagaaggggcttgaaatacccactagtgtgccgcctgctcagcccatctgggtctgtgaaaccacatctgagccctgtgggctgtggtggcgacacaggcagagggcgggcagggttgccagcgccccgcctgggctaggaacgcctgtgcgcagctccctgagagctcggggaccacgcggaggttgtaattggtctctagaccacacctagttgttgagtgccgctgcttgaaaatctcagttctgccgagatcgcagaatacacacaagctacctttgggcaccagagcagacagaaccgcggagcttcagggtggaagattcgtggaaactttgccaagtaagtgaggtggggagagaaggaagccagtgcctgacactgtggggagtggctgggcaaagcagcattggaggtgttgtagggttcctactgtctgatgagctggtgtggggttcttactgtctgatgtcgtctctggtggaagttagcagggctggggcagatgcacagagcacggtggcgggggtgagcccaggatcggattgatgcccacccaccacctggcaccctgcagtcccagctggccagaaggcaagcatgctggaccacaaagcaaagatcctccagctctgctgctggcaagccttggggccaggggactcacagaagagcaggtttgggcctgtgccttcctcctgcccaaatgggtctctctccccttccccttccagccagggccgcagctggggctgcagcttgagtgacgggaaaagaaaggtttactccaccagcgcattagcggcactcacagcattaaaaatgcaggaggtggtgggaggagcgggccagggaggaaaactcatgcagctgcggggcgcggggaagagccgggcttctgcctcctcagcccggatcagagccgaagaacgagggcagtttgggttgagaaggattctccagtgtaaccgagaagcgagcgtccaggaggctgttggggaggtcggcactgtgggcttcctggccttcgtttgctgtttcgagggccaggacctcgtgtgttcccgtccgcccctctgggacggcgccagcccggcaggccgccgaccgtcctggggctcccgcgcagcgcgatgccggcctcgtccaccgtccacgtgctgcagctgctgcgggagctgctcgccttcgtgctcctcagctacacggtgctcatcggggcgctgctgctggccggctggaccacttacttcctggtgctgaagtgacagcgccgtcgccgcgcccggccccgcctcccgcccggccccgcctcccgcccggccccgcctccctaactcaccaggaaattcccttcaagccctggcccgaactgagtccccgcccacccgccagcgtcacggcgcccgactcagctccgcgccggacccacctccgcgccctcaggccctgcatatgccccgccccgcgcggaagttccggcggttggttgccttgcgcggccgttacagcctttgccctaagcctcgccccctttccccctgcctgcccaatcccgactgcttccttgggtgggggcgtggctatggggcgaggcgctctcaggtggaggccgtgccccgctccgcgctcacgaagctgcgtcacttccggcgtgtgcgtctggcgtccgcgcgctgcacaatggcggctctgaagagttggctgtcgcgcagcgtaacttcattcttcaggtaccgctgcggccgcgtagaggggacaggaccagagggagggaccgacgcggacagcgctgtggcccggcccacggcgcccgccttccttacgcgctcatctctcgtccgcccagctgggtcgcggcgtctcgctccggtcgggaggactgaggacagccccgcctccgccccctgggtcaagcccggcttccttttcagttcgtccatcttctagaaacgagtccccgagaccccgggctgccttcttggggctgctccgcctcctgaccagccctcgtcagccactcgaagtccctgaggagacgtggagaggaggagggacacggcatggggggagtccgggaagggagacgagcgtctgaagacgtcctcccgagggcagaaggggccgggggagctggcgcagggctctctacctagcgctgcaggctcctgggcgattgtagcgggaccgtcacacacaactggcacccaggccaggggtccagagctaaattctgcctgcaggagcggttattgtggcatccgtttctaaaaagtttaaaggcaacattttattttattttaatttttttgagacaagatctgcctctgtcgcccaggctggagtgcagtggcgagatctcagctcactgcaacctgtgcctcccggcttcaagcgattctcagcctcagcctcccgagtagctgggattgcaggcgcccgccaccacgcccggctaatttttttttttctttttgttttgtttgagactcagtctcgctctgttgcccaggctgaagtgcagtggggcgctctcggctcactgcaacctctgcctcccaggttcaagcgattctcctgcctcagcctcccgagtagctgggattacaggagcgtgccaccactccgggctaatttttgtgttttaagtagagatggggtttcaccatgttggtcaggcagatttcgaattcctgacctcaagtgatccacccgcctcggcctttatttacttatttttttttaatagacacggggtcatgttgccagccatgttgcccaggctggtcgtgaactcctgggctcaagtgatcctcccgccttgcccttggccttccaagtgctaggattacaggcgtgagccaccaacaccctgcctgaggcaacattttaaacttggtgtatgttgaaaatttcaaaacccctcagctgtcctgcatcctcatttaggttcctgcttggctcgagtttgagtttacagcccctgcaagtaaatccaagagcctgttacagattggcggtcgtgccttatgaaatctgacttctacttccaggtacagacagtgtttgtgtgttcctgttgtggctaactttaagaagcggtgtttctcagaattgataagaccatggcacaaaactgtgacgattggctttggagtaaccctgtgtgcggttcctattgcacaggtactgtcgtgtgcagtgattcttatctagtgtaccgtgtcctcttgaagtctcaagtgggcggtgaagc

SEQ ID NO: 1884908 - DNA, 4001 bp, Homo sapiens
tgtaggactcaacctggtttctgattagaatcctctgaagaggtttttgcagattaagcttgatttaattggctaactttggaattaataaaaacaacaaccaaggccgggcgcggtggctcacacctgtaatcccagcactttgggaggccgaggcgggcggatcacgaggtcaggagatcgagaccatcccggctaaaacggtgaaaccccgtctctactaaaaatacaaaaaattagccgggcgtagtggcgggcgcctgtagtcccagctacttgggaggctgaggcaggagaatggcgtgaacccgggaggcggagcttgcagtgagccgagatcccgccactgcactccagcctgggtgacagagcgagactccgtctcaaaaaaaaaaaaataaaaaaaaaaacaacaaccaaacaaaacaacaagcacaaaacacctctccaggtatctctaacgtgtagccaggagagctacttctgggactgagccagccttatacgaggtctttggactacacagcttttaattagagaccacatggttctcttaaggaataatagatactcttcaaatttattctttcctgtgatttttagtttcaggtacatttgaaaaataatcataggtgtaaatgaatagattggaatggcccaagaatgtactgaacatttacaattgtgtttcagccttggtacttttactttatgtatataaaactctaatattatatttctctgtaattaatacttatttcttaaatgttatttaatgaagtagttcacctttatttctgcaatgattattaaattatcaatctttttcaaatgcagaataaaaatttgcctacccttgactgtaagtttctggctagcactggagtttctttcactggaggcatcttccttagattctttgcctgcctcttctttttggtggtgccatactagttagacacacctctactgtttctcttagatttaataaaggtgttggaggctattcttgctgttttgtggtttttattctatttcttcatttccaatattacttggggatatctttttgtctatgctgttccctattccacccctttccagggagttctgggcacagcattttagaatgtacagagataaaccagaatgtgcctcatcatgcataatccacatgccaaaggacctgcaaaccatgttgggtgatgaacatttgaaggaaatgaaggcaattgcccaaagaaattatgatgtgaaattatatggtaaatgataacttccttaatatatttttcttccttaataaaaagaattgtcctttttaattatagaaaacccagatcctccaaggccctaaccctgttccttgatatgcaactttctttaggtcagggatgatactcatcattcaccagtgttgccacttcctctgttgtattcatgattgataggagtactaattgatcaaagcattctttcctgcttgaatctggatgtggcttcaggcagccactactaattgattggtattggtgttaaaaatgacattatgtgtaattcctaccttaaaggtctcttgctaattactgctgccaggaggataattctgccctttaacaccaagggggcttcatgatctatatttaaataagtctcctgccataatacccagataacagttgagacaaaactagaatatttattaagactgtaattaagtgtaagtcactaacaaagtggaaatagaataatataaactagataatcttgcctgttcttccctaatccatcgttagcctgggatcctctagcaggatacctctttgtatatctcctggttttcctccatgaggaagagagaattttaaactcctaatcctttggaatatttcagaatcttcaggacttaaaaattcagatccaagaaaatgaagtcccaagagagaggaattgttctatttgttgctttctgaattctaggtgaattgcctgatattactgaggactggcaacagaatgttcatatgacatgtctttaagagagaccacacttaactacaattctactatgacctcaaaatcccaacattccttcagcagagccacactcttaaagattataaatgttgtcttcaaataattgaatatttgaaggtgtaagtttattgcatatttcttccaagggtcagctagatcagtgggtagaaatcagaggggggccagacctgagtttaacagaaggttatgttttctactaataagacatgccctaatgttattaagctgccttatgttttagtgctcctagtcattggaaagatttagacagtctggattgccctgtgccagagatagagttgagtggactcccttagcagatggaaaattgaacttaatctcccttcccttatcaaagaatcaggagataagaagattcaaatattcagttatttgaagacaatatttatcaaagaatcgaagacaacatttatcaaagaatcgggagattctttgataagttaggtatagctaccctacacggtacagcaggagtatttataaggaggtaatctataaaccatttgaacttttctatcctgacagttgctggccaatgcaggactgattataagtaatgatgacacatctgtaacttctaaatgggaaggtcttcgaatgggattgaaaagacaaagtgatgaaaaaataattgtgataatacatactgttccaggttttaagtgagtacaacatagctgcattataatataaaattgtacaacttaaaaatacacatatatgcaatctataattacaagtttatgtgtacaacctagtctatttctaaaagaattgttcacataattttgatcttaaaattgtaagatggaatattatgtaactaacataacactgctacggaaaatatataatgttgtggggaaatattcacacactactgaagaaaagcagatcataaaaataacatgaagaatgattctacttttgatggggaaaaagtatacatttatgtttttaaatatagattaaaggtgcttttaattttgtaagaaaaagaagactggaaggatgtacctcaaaaagttaataatggatattataggggagtagaattaagggtgacttttgtttctattttaaatgttttctaaaatttccaaagttcttaaaataagcagacattaccttagtgttatcttagttttatatttctgctgtaacaaattattacaaacttcatagtttaaaaaacatgaatgtattatcttatggtaagataatgtattatcttataggttaagagtccaatgcaaatttcactgggttaaaataaaggtgtttattgggtaaaatcaagtgctgcattcctttctggaggcattaggggtaaatcactttcctcacctttttcagtttgtagaggctgcctgcatttcttggctcatggcccccttccttcgtctttgaaggctgcgaagttgcatctctctgaccattctttcatagacatatctcctctgatgggcttcaactagaaaatgttttctgcttttggcattctcttgattagtttgagtttacctaaataatccaagataatctccacatctcaagccctgtatccttaatcacacttgtgaagtcccttttgccaagtaaggcaacacagtcacaggattcggggattatgacatgaatatttttggtgggggaatgcattattctgcttaccacatgtggtcgggaaaagaaaacatttgtaaaaatgtgttgaatccctactgaactcattctttccaatagaaacgaagtcatacatgaggccattctccaggctagtcatcagagcctatgtgacccatgatagaggggattttactttttcagtaaacttgttcaaatggtcctgttagtgctcttacacatcagtacctgaaagaatgaacaataacaagttcaaatggtttatagattacctc

SEQ ID NO: 1884909 - DNA, 4001 bp, Homo sapiens
actacagcctcaacctcctgggctcaacacgatcctcctgcctcagcctccagagcggctgggactacaagcgcgcaccactgcacagggattattattattattttattattttgtagagaaacgggtgggagtggtctcgctatgttgcccaggctggtctcaaactcagctcaagagatcctcccgcctcggcgtcccaaagtgttgggattacaggcgcctgccaccgcgcccggacgcagatattttctatgggcatctggaatggcgtccccaaagcttggcgccgtgctatggtcaagccgggtcgggggctcgggccagccttcaacaccgttggcagcaatcggaacgatcaactgtaccctcagtaccgcgacctcgcccggtcctgccaatggccggcccctagccggtcctgaggcctcgcgagagctcccgtggctacgccttccccggcctcggaacggccccatccttcctctttccccgcctcccagcggcgctccactctcggattggctgattgatccgagtcagtttttttcctcgccagaaagcggttcgacaattggtccttcttttggcccctcctgcgatgcccgcggattggacggctgagtctggctacgcgggcctccgcgggagcgcgaccgggccaatcaagagcttggcgtattttacaaactgagaaagtagctccagcagcacccgagagggtcaggagaaaagcggaggaagctgggtaggccctgaggggcctcggtaaggtaaggcacgggggtcttgaagggaacgaaggctgctgggttcatagggaggagggcagtttggggcccgagggcgaaagagtaggctcggggtgtctggagatagcacccataagagcggtcttgcaggcgccgggggcttgtgggcgcgtggattagggcggaggtatcagggatggcaggacaggtgccccgagaactggttgatctttgatcttagattctgcctgccttcttccccgtctcaattgtagccatcatgaccacccggcaagccacgaaggatcccctcctccggggtgtatctcctacccctagcaagattccggtacgctctcagaaacgcacgcctttccccactgttacatcgtgcgccgtggaccaggagaaccaagatccaagggtaagaggggcctaatgggggaagacagtagtcacaccagtaatgcaccccaacactaaacctcacctttttgtccccgctccctcccctagagatgggtgcagaaaccaccgctcaatattcaacgccccctcgttgattcagcaggccccaggccgaaagccaggcaccaggcagagacatcacaaagattggtggggatcagtcagcctcggaaccccttggaagagctcaggcctagccctaggggtcaaaatgtggggcctgggccccctgcccagacaggtacctgttggagccatggtaacacggcctccatggctgagtaggggactaggaagggtaaaagtggggttttggggttttgcactcactcctgctgtctcctacttactgtgatagtcctggtcccagctcctggaaagctctttgctcttagaagatctccctttcctccagcaaaatgtcatctcgccaggtgccatggcttgtacctgtaatcacagctactcaggaggctgaagcaggaggatcactggaggccaggagttggagaccagcctggatgacagagggagatcccatctctttaaaaaataaataaataaataaataataaatatcacttcttctgaagccttttccagttccccatgtcacaatcagttgctctgtgttctcctaatactttgcagcacttcttttataacatgtatataccttggcttgagtctgttacctgtctatagtttgatgatagcctcttgaggataggggctttgtcttattcttatgggaccccagtgcttagaatagtgtcttatgtaacattctatgaacatttggtgaccaggtgtggtggctcacgcctgtaattccaacactcctccgaggcaggaggatcatttgagctcaggagtttgagaccagcctaggcaacatagtgagaccccatctctttttctctttttttttttcttttcttttttttttgtggagacagagtcttactctatccctcaggctagagtacagtggcatgatctcggctcactgcaacatccacctcccaggttcaagcgattctcatgcctcaccccgagtacctgggattaccagcacctgccaccacacccagctaatttttgttttctttcttttttttttttttttttttgagacagagtctcactctgtcactaagctggagtgcagtggcacgatcttggctcattgcaacctccacctcccaggttcaagtgattctccagcctcagcctcctgagtagctggtactacaggcgcgcgccaccaggtccagctaatttttttttgtttttgttttttgtagagatggggttttaccatgttggccaggctggtctcaaactcctgacctcaggtgatccacctgcctcagcctcccaaagtgctgggattacaggagtgagctaccgcacccagccaatttttgtatttttttagtggagacagggttttgctatgttggccgggttggtctcaaactcctgaccacaggtgatccacccgcctcggcctcccaaagtgctgggattacaggcatgagccactgcacccagccatctatttcttaaaaaaaaaaaaaaaaataagccaaattcaattgaatgagtctcttgctcaccttgtacctcaaagttcctatgctaggggccctatccccctcagccttcccccttccttttccttctcctctttccttgcagaggctccagggaccatagagtttgtggctgaccctgcagccctggccaccatcctgtcaggtgagggtgtgaagagctgtcacctggggcgccagcctagtctggctaaaagagtactggttcgaggaagtcagggaggcaccacccagagggtccaggtaatgaaacaggatgtgaggagaccaggctagggggcactgaggggggcatcctgagcagtgctgacagcctctgttggtgtcccagggtgttcgggcctctgcatatttggcccccagaacccccacccaccgactggaccctgccagggcttcctgcttctctaggctggagggaccaggacctcgaggccggacattgtgcccccagaggctacaggctctggtgagtgcccttgaggggctgatagtcggtgcttctgggagctccttccagggacaaagctgggctctgggagaagaggtacctcatgatgaggcaagggatcctactgggggagatggggttggtggtgaggcctgagggtttggggtccacctctgattccgttttcatctcttgctcctgtggatcagatttcaccttcaggaccttcctttcacccttccactcgccccagtttccaggagctaagaagggagacagctggcagcagccggtgagaaaggagagggtgtgggagaaggtcatctggaaaagaatgaaccagtgtctgatacaggagtcccccagagttggggccttccaggagctttaggactccccaccaactcaggaggggaagcaagaaacctgtgattacccgggatgagcccttgggatagggttcaggctttcacagccaggcctcagtgtgacatcagtttactcaagtcatggggggacagggaggacagaaatgtgctatctcttttgtttagtggctagagtatagactgtggcaataagtgggatttgggtttatatcctaactcttaacacttactatttgtgcaagcttgccttcacctctctgagctttggtttctttgtcaagtgagaataacatttgtaccatcattagttgtcatgagaatg

SEQ ID NO: 1884910 - DNA, 4001 bp, Homo sapiens
agtgctgcataaatggcagcaattcttaccattatcaacccagtcaaacaagagtgaaggggcttgggaaggagccaaagccactcactagcaatggcaaccctccaggaatgggccggaccctcctctgtcttcctcatgtccactcaagctggaaacctctccctctctctcaccttctaccgccaggcagcccttcaccagatccccccttaaacagcccctgaatctgtgaattttatccaccttcaatgcccaacacaagcccaggccaccatcacctctcccataatggcagcggtagcttccgcgtgtctcttctctgtcctgcagccaggggggcttctaaaatggccaatctgggctggatgcggtggctcacacctgtaatctcagcactttgggaggctgaggcaggtggatcacttaaggtcaggagttccagaccagcttgggcaacatggtgaaaccctgtctctactaaaaatacaaaaattagctgggcatggtgtgcatgcctgcaatcctaggtactcgggaggctgagccacaagaattgcttgaacccaggaggcggaggttgaactgagctgagatcgtaccactgtacttcagctccagcatgggtgacagagtgagactgtctcaaaataaatgaataaataaattaattaattaattaaatggccaatctgagtgggtgcccaccccttcaacctcccttactctgtaacttcccaaagccctcccctgtccacaaggctggcatgatctgcctgatgccccaggtacttccccatcttacagcctttgcacaggtgttccctctgtttagaacactcatcccctcgccaaccccacctcatcactcggggctgctggaggcctcccccggacgtgctcctccacccatctgcattactgccctgttattcttccacaaggcagcttgggctttggctttgaggcactcgccatgtgtgattctgcactccagcatgtggctatttacttaagacctgcttccccctctagactgtgagctcctggagggcggggagggggtctcttgcttgcttctgctctcctagctcacgacatgactctcaggctgggctggaaacacttggttgaataaatgagttctggtccccacccaagcacacaaggagtgacccacactgctgccgggccaaactgcactgaaaaatggcattgctgtgtggacgtggccctgcccacgtcccgcaggcagagcaggaagggctgaggagccctggccaggcaaagggaggtcatggacacagcaccgacacctgcccacccctttccagtgacccagtcctgcctcccacagccgagcagtgctctgtcagtatggatggcctggacaagtagggtaatgcaagaggcctggcaagttgagggctctggcccctggccccgcctggctctccgctgttcccagctgtcttttcctcatcactccctccttggcccagacttatcctttcatgttattcctctggggatggtctgtctcctactggaggcttactcaaggaaatgaatttttagtggtggaatattgagcctgttatagtctcggccaagggtagacggctgggaagggggtccctcaaaccccacctcttagacagttgcctcctgtccctgtgaatacagctgctttgcctggatcagcctccaacctcactctgggctaggccaccttcttcctaggattcagctcaaagttggcgcctcatgttttccttcctccacgccttcatttgcacaccattctggtcccctgcagggcctcattctcctcccccaacatcactgtctcttgtctgttgaagcctaccctttaagatgcagttcaaaaaccacctctccttcaggccaatccttttcaatctcccaatcagatataacttcttctgaatcctccaaaagcacagtactgataaccttcaatcatatatggctttgtctgaaggatactgggggacaaacagctgtctctgttgtacctgacattctagaatgtcatggttctttgttgcatgtaatacaagttggtgctggttataagcttctgaacaatgatgaggatggtggcatttgacattcggtaggtgcattcgactataagttccttgagggtgtggatgagagttccacgtctttgtctccctagcacctagcatggtgccggcacacagtaaattctcagcaaatggttctgtggttcagaatggatgttcacaataatggctctaacttgtcaggcctgtcgtatgccaggctgacatatgacgtatgtgctgagccctgtccaaatgtcatctcactgagttttcacaatcactctctgggccaggcaccaatagtctccactaagaagtaaccccacagggccgggatttgtgtctgttgtggtcactgttgtacacacatcagtgtttgacatggagttggccctcataaatattgtttgaataagtaaatcagttcatggatacccattgtaaagatgaggaaactgaggctcagatttacctaaggtcaatcatctagtaactgggagagtcagaattggcacccagattgatctgaccccaaaccctgtattcttcaatattgaactctaccaggtcaagggatggagcaggaaggcttgagatacacaacccatatctttaaggcactttccatctggtggagaaacggaaatgtatgcacatagcggcacatgcgatggcaacagaacccgtgagaccctggggaaagaactgacttttcgagggcctgctgcaagggaggggctaagcctggcctagaactttagttacctgaaaacttgatttttttgtgttattctaacgtgcagagggcctgtgccaggcctaccaaggagtgagctgatgcggctgagagttttggaatgtgaggctgggatgacaagcctggggcctggctcttctgtgctcagtgaggactgctccagcctcagccccaactcccagcaaagcccaggtgtggggagcaggggaggtgagacagagatgaggagggacagaaatgtggtttcacacctgacccagcaattcctgcagctgggaagcatggcgactcagaatgccgatgcctgcccgaggcttcggcttcttgtcccgcgttttggagaccatatctggagaggcacagtgtgaggggcatggggaggcaggagtaggactgcagcagagaggggttttgcaaccagcctctggctggtcagcacaggagtgtcaggttctttgctgtggggctgctggggatgagagaggcaggaagaacccctgtgaagaacagtgagaagggtaggggccaggggcctgcagggtgatggcaggctttgaagggtgtgaaaggctgccacagctgaggcccggctatacccaggagggagcaagcagcctgatgcctgagctggcctggcccattcacctcttgtggcccaacctgagaaccttcttactgtgggtgagctgggccttgtctagcccctgcctctgcgcccccatcactggcctcaaaagcacaggttctctcttttcttgcacggtgaggaggcagagagtggtgcaggctgggtgtgcgggtctgtgtgtcagggggttattggtgagaatctggggagaggcgcctggatagctctgattctacccacctaggaggtctgagaccctcccaactcctccccgactcccagcctcagtgttgtcgctgaaaccctcttgagctgatggtgcctacgcggggtcaaatgcattcttctcaccggcctcggccccaacgtgtcatgtaacctcgtgttagtcactcaacctctttggccttgtgcttccacatctgtaaaatgagaagttgcctccgcccacacctttgcccctccccaccgccaacccacacttgccccagacagagctggcaacaaaagcagactgcgg

SEQ ID NO: 1884911 - DNA, 4001 bp, Homo sapiens
gagggtcagagaccaaagacagagacaaaaagagaaatagggttttgcaaagactgactgacagaaacagatttcgaggggagagagatcaagaccaagtgagggtttgaaggagacttaggggaggtggaggaagagaaggagagtcttagatccagggtgaggggcttctagcaggaagagggaagacgccaagaccgcgcttgggaggtcagtggtgcgtctctaccccccctgctcccccactccaactcccagagtctcaaggcctcacgtcacacccccgtcccgtcccgtcgacaaggggaaccccggcctgggagagggcgcctccggggatccgttgcctagtccaggtactgcccagctaccgggcgtcgaggattgcgaagcgtcggggcaggctggcacggtgcccacttttcccaaaacgccagccttccaagcccagaagctcgcccggcccaggccgggagcggcccacgtcggacggccggaccgccctgcaggacccagcccggccgcccgcccccgccgccggcggtgagggaggtgagcggcgccgacctgcgggacgagcatcactccgacccagccgggggtgaggcgggtcaggatgctccggtcgcaggaggaaaaggaggagctggaccaaaagcccgaagagaagaaaaggggaaggccgcgcacggagcgcggtaaaggccggcggagctagacgccccgaggtcggagtgaagcgccgggaccgagccccgtctcccagggagtccggggcgcacggcaccgaggagagcgcgggagccaacctgggcgcatcatgcgcagggcccgggacgctgggccggtctacaccgccgcctgggtcacgtggcccggacgggccggcggctgccccggccggggggcgggggtcgcgccggggttgcgctggacgacggagagcggcgggcccgcagcggcctggagcctcccaacccgcgcgccgcgctggcccccgagcgtaggagccgccccctgcccccccgcgccggccccgcgcccggccgcccgccccctatatagcgcgccccagcagggcccgcgccaggccgccagcctcggagtgggcgcgggacagtgcgcggcgccccgcagccaggcccccgcccccgccgcatccacctcctccgccgcctgcgacccaacgggcgccccccgccgcggcagctgccgccgggcccccgcggccaccatgaagaaggaggtgtgctccgtggccttcctcaaggccgtgttcgcagagttcttggccaccctcatcttcgtcttctttggcctgggctcggccctcaagtggccgtcggcgctgcctaccatcctgcagatcgcgctggcgtttggcctggccataggcacgctggcccaggccctgggacccgtgagcggcggccacatcaaccccgccatcaccctggccctcttggtgggcaaccagatctcgctgctccgggctttcttctacgtggcggcccagctggtgggcgccattgccggggctggcatcctctacggtgtggcaccgctcaatgcccggggcaatctggccgtcaacgcggtgagtgccctggggggggggtgggagcctcgaccctggggtgggctcaggaccaggcctcttaccccacctggaaaaaaggggtgccgcagagtgggccagcccacacccttcaccaggaaggcaagagcctcccaaggccaggaaggcaactctccaggctgatatgtgctcccttcctgcccacctcctctccccctcccctcatgctggcccaccctggtctctctccaatgcctgctacccctcctctcctgccagaaacttctgcctcctcctgtctcacctttgagctccaccttcctcctgggcccctcacctctcccatcacctcagtggagcggttgagtagaaccaccagagaaaagcgggctgtcatcacggctttgggtgaccctggcctgtctgtgcttcattgttctcagcgcctccatggggatggttgtgtctgccacagcaggtgtcaaggggctcacatttagaaaccgtagataggaaccccctaatgtggggccagtgcagagcagtttctgttgagtattggttccctctttccccaacctgtgctcctcccctcaaccccgcacccctgcctccctcccacctcctgcagccccagagtcagcccccaaccccatgcaaactgggttcattaatcaaacacagaggaggatttgcttggccattgtcaagctgtgagtcagccgcactggagagacgggtttaaggctggcactggcatggggccaggcacgggcaggaggccgggatggggtgtgaggcaggcaaaccgggcagctgcccacaggatggagggtaaatgccagcttatgggggctgggggttgggcagagccattgataggcccgtgtccaggaaaagctaccctgacgctctgccctttggccacaggcctgagcttcaagcctgtgcaaactatgaaatgtacagtgtctttaacaaatggcttcgctggggcgatgtccacaggacttggcttccaggtgccaaggtgctctaagtgtccctggaggccaaaagccctactccccgagcccctggctatacagccagaaggtggccggggtcctaacccgctatccccttgcagctcaacaacaacacaacgcagggccaggccatggtggtggagctgattctgaccttccagctggcactctgcatcttcgcctccactgactcccgccgcaccagccctgtgggctccccagccctgtccattggcctgtctgtcaccctgggccaccttgtcggagtgagcagtaccgacattgggctggggtgagggtggggcaggcactcaaggcaaataatggagccctggagcggagcccacttcagatggatgagtccagcagagtttaaggcctggatttagggctcctggactctggccctactgggccccagaattgatccccccaaaacctctgggctgaggaaagatgggagtaagtaggaggtgggatgggacaggaatcaaacccaacctcagagcagagaagagaggagggcgtagttaagggtccatggttaaccaagcagctgggatccttggagggagaggttgccagcctgagtttgagacctggctgagcccctggactgcagtgtaaccttgagagagtccagattctgtgggagtggaccaggatgttgcctttctctccaccgccctgtctctatccagatctacttcactggctgctccatgaacccagcccgctcttttggccctgcggtggtcatgaatcggttcagccccgctcactgggtgagtctgtcccttcccctggctccctggagatgagggcctggagacccagcagtggcagctcagagctcaccagacctggattctgtgggtctagagcttgggggtgggccacggagtggtggctgacagagaaagggacacagtaggggatgggattcagctagaggggcagaggtggctttgtatggcctgaaccgctggggacagggagtctgagtatctatccgcttatggaagaggctctactgaacctggaggtgcagaggggctctgtgtcaattcccttgaggatttggtgtccgtccccctcggtgtctgcgtgctggtcctctctgatgttttatttatctgtccctgttgagggggttgggagagtcttcctgtgggtctgtccctgtggacagtctgtctgccccccctttggaagctcatggtcactctctccagggtctgcttctatccctgcgtggaggggacacgcgctctgttcatccgtctctctgaggacccacgtgtcccctctgaaggtttatttgcttctctttccggtgtggttggagggagcctgtccctctgggaatctgtttgccttctttgagggtctag

SEQ ID NO: 1884912 - DNA, 4001 bp, Homo sapiens
aggagagtcttagatccagggtgaggggcttctagcaggaagagggaagacgccaagaccgcgcttgggaggtcagtggtgcgtctctaccccccctgctcccccactccaactcccagagtctcaaggcctcacgtcacacccccgtcccgtcccgtcgacaaggggaaccccggcctgggagagggcgcctccggggatccgttgcctagtccaggtactgcccagctaccgggcgtcgaggattgcgaagcgtcggggcaggctggcacggtgcccacttttcccaaaacgccagccttccaagcccagaagctcgcccggcccaggccgggagcggcccacgtcggacggccggaccgccctgcaggacccagcccggccgcccgcccccgccgccggcggtgagggaggtgagcggcgccgacctgcgggacgagcatcactccgacccagccgggggtgaggcgggtcaggatgctccggtcgcaggaggaaaaggaggagctggaccaaaagcccgaagagaagaaaaggggaaggccgcgcacggagcgcggtaaaggccggcggagctagacgccccgaggtcggagtgaagcgccgggaccgagccccgtctcccagggagtccggggcgcacggcaccgaggagagcgcgggagccaacctgggcgcatcatgcgcagggcccgggacgctgggccggtctacaccgccgcctgggtcacgtggcccggacgggccggcggctgccccggccggggggcgggggtcgcgccggggttgcgctggacgacggagagcggcgggcccgcagcggcctggagcctcccaacccgcgcgccgcgctggcccccgagcgtaggagccgccccctgcccccccgcgccggccccgcgcccggccgcccgccccctatatagcgcgccccagcagggcccgcgccaggccgccagcctcggagtgggcgcgggacagtgcgcggcgccccgcagccaggcccccgcccccgccgcatccacctcctccgccgcctgcgacccaacgggcgccccccgccgcggcagctgccgccgggcccccgcggccaccatgaagaaggaggtgtgctccgtggccttcctcaaggccgtgttcgcagagttcttggccaccctcatcttcgtcttctttggcctgggctcggccctcaagtggccgtcggcgctgcctaccatcctgcagatcgcgctggcgtttggcctggccataggcacgctggcccaggccctgggacccgtgagcggcggccacatcaaccccgccatcaccctggccctcttggtgggcaaccagatctcgctgctccgggctttcttctacgtggcggcccagctggtgggcgccattgccggggctggcatcctctacggtgtggcaccgctcaatgcccggggcaatctggccgtcaacgcggtgagtgccctggggggggggtgggagcctcgaccctggggtgggctcaggaccaggcctcttaccccacctggaaaaaaggggtgccgcagagtgggccagcccacacccttcaccaggaaggcaagagcctcccaaggccaggaaggcaactctccaggctgatatgtgctcccttcctgcccacctcctctccccctcccctcatgctggcccaccctggtctctctccaatgcctgctacccctcctctcctgccagaaacttctgcctcctcctgtctcacctttgagctccaccttcctcctgggcccctcacctctcccatcacctcagtggagcggttgagtagaaccaccagagaaaagcgggctgtcatcacggctttgggtgaccctggcctgtctgtgcttcattgttctcagcgcctccatggggatggttgtgtctgccacagcaggtgtcaaggggctcacatttagaaaccgtagataggaaccccctaatgtggggccagtgcagagcagtttctgttgagtattggttccctctttccccaacctgtgctcctcccctcaaccccgcacccctgcctccctcccacctcctgcagccccagagtcagcccccaaccccatgcaaactgggttcattaatcaaacacagaggaggatttgcttggccattgtcaagctgtgagtcagccgcactggagagacgggtttaaggctggcactggcatggggccaggcacgggcaggaggccgggatggggtgtgaggcaggcaaaccgggcagctgcccacaggatggagggtaaatgccagcttatgggggctgggggttgggcagagccattgataggcccgtgtccaggaaaagctaccctgacgctctgccctttggccacaggcctgagcttcaagcctgtgcaaactatgaaatgtacagtgtctttaacaaatggcttcgctggggcgatgtccacaggacttggcttccaggtgccaaggtgctctaagtgtccctggaggccaaaagccctactccccgagcccctggctatacagccagaaggtggccggggtcctaacccgctatccccttgcagctcaacaacaacacaacgcagggccaggccatggtggtggagctgattctgaccttccagctggcactctgcatcttcgcctccactgactcccgccgcaccagccctgtgggctccccagccctgtccattggcctgtctgtcaccctgggccaccttgtcggagtgagcagtaccgacattgggctggggtgagggtggggcaggcactcaaggcaaataatggagccctggagcggagcccacttcagatggatgagtccagcagagtttaaggcctggatttagggctcctggactctggccctactgggccccagaattgatccccccaaaacctctgggctgaggaaagatgggagtaagtaggaggtgggatgggacaggaatcaaacccaacctcagagcagagaagagaggagggcgtagttaagggtccatggttaaccaagcagctgggatccttggagggagaggttgccagcctgagtttgagacctggctgagcccctggactgcagtgtaaccttgagagagtccagattctgtgggagtggaccaggatgttgcctttctctccaccgccctgtctctatccagatctacttcactggctgctccatgaacccagcccgctcttttggccctgcggtggtcatgaatcggttcagccccgctcactgggtgagtctgtcccttcccctggctccctggagatgagggcctggagacccagcagtggcagctcagagctcaccagacctggattctgtgggtctagagcttgggggtgggccacggagtggtggctgacagagaaagggacacagtaggggatgggattcagctagaggggcagaggtggctttgtatggcctgaaccgctggggacagggagtctgagtatctatccgcttatggaagaggctctactgaacctggaggtgcagaggggctctgtgtcaattcccttgaggatttggtgtccgtccccctcggtgtctgcgtgctggtcctctctgatgttttatttatctgtccctgttgagggggttgggagagtcttcctgtgggtctgtccctgtggacagtctgtctgccccccctttggaagctcatggtcactctctccagggtctgcttctatccctgcgtggaggggacacgcgctctgttcatccgtctctctgaggacccacgtgtcccctctgaaggtttatttgcttctctttccggtgtggttggagggagcctgtccctctgggaatctgtttgccttctttgagggtctaggtgtctgtggtccatgtctctgtccctgggagtggtgtgtcagtatattcgtccccgaggtgggaggaagtctttctccctgaaggtctggaagtctgcatgtctgtctcctctcagggtccgtgggtctgtcctctgt

SEQ ID NO: 1884913 - DNA, 4001 bp, Homo sapiens
gagagtcttagatccagggtgaggggcttctagcaggaagagggaagacgccaagaccgcgcttgggaggtcagtggtgcgtctctaccccccctgctcccccactccaactcccagagtctcaaggcctcacgtcacacccccgtcccgtcccgtcgacaaggggaaccccggcctgggagagggcgcctccggggatccgttgcctagtccaggtactgcccagctaccgggcgtcgaggattgcgaagcgtcggggcaggctggcacggtgcccacttttcccaaaacgccagccttccaagcccagaagctcgcccggcccaggccgggagcggcccacgtcggacggccggaccgccctgcaggacccagcccggccgcccgcccccgccgccggcggtgagggaggtgagcggcgccgacctgcgggacgagcatcactccgacccagccgggggtgaggcgggtcaggatgctccggtcgcaggaggaaaaggaggagctggaccaaaagcccgaagagaagaaaaggggaaggccgcgcacggagcgcggtaaaggccggcggagctagacgccccgaggtcggagtgaagcgccgggaccgagccccgtctcccagggagtccggggcgcacggcaccgaggagagcgcgggagccaacctgggcgcatcatgcgcagggcccgggacgctgggccggtctacaccgccgcctgggtcacgtggcccggacgggccggcggctgccccggccggggggcgggggtcgcgccggggttgcgctggacgacggagagcggcgggcccgcagcggcctggagcctcccaacccgcgcgccgcgctggcccccgagcgtaggagccgccccctgcccccccgcgccggccccgcgcccggccgcccgccccctatatagcgcgccccagcagggcccgcgccaggccgccagcctcggagtgggcgcgggacagtgcgcggcgccccgcagccaggcccccgcccccgccgcatccacctcctccgccgcctgcgacccaacgggcgccccccgccgcggcagctgccgccgggcccccgcggccaccatgaagaaggaggtgtgctccgtggccttcctcaaggccgtgttcgcagagttcttggccaccctcatcttcgtcttctttggcctgggctcggccctcaagtggccgtcggcgctgcctaccatcctgcagatcgcgctggcgtttggcctggccataggcacgctggcccaggccctgggacccgtgagcggcggccacatcaaccccgccatcaccctggccctcttggtgggcaaccagatctcgctgctccgggctttcttctacgtggcggcccagctggtgggcgccattgccggggctggcatcctctacggtgtggcaccgctcaatgcccggggcaatctggccgtcaacgcggtgagtgccctggggggggggtgggagcctcgaccctggggtgggctcaggaccaggcctcttaccccacctggaaaaaaggggtgccgcagagtgggccagcccacacccttcaccaggaaggcaagagcctcccaaggccaggaaggcaactctccaggctgatatgtgctcccttcctgcccacctcctctccccctcccctcatgctggcccaccctggtctctctccaatgcctgctacccctcctctcctgccagaaacttctgcctcctcctgtctcacctttgagctccaccttcctcctgggcccctcacctctcccatcacctcagtggagcggttgagtagaaccaccagagaaaagcgggctgtcatcacggctttgggtgaccctggcctgtctgtgcttcattgttctcagcgcctccatggggatggttgtgtctgccacagcaggtgtcaaggggctcacatttagaaaccgtagataggaaccccctaatgtggggccagtgcagagcagtttctgttgagtattggttccctctttccccaacctgtgctcctcccctcaaccccgcacccctgcctccctcccacctcctgcagccccagagtcagcccccaaccccatgcaaactgggttcattaatcaaacacagaggaggatttgcttggccattgtcaagctgtgagtcagccgcactggagagacgggtttaaggctggcactggcatggggccaggcacgggcaggaggccgggatggggtgtgaggcaggcaaaccgggcagctgcccacaggatggagggtaaatgccagcttatgggggctgggggttgggcagagccattgataggcccgtgtccaggaaaagctaccctgacgctctgccctttggccacaggcctgagcttcaagcctgtgcaaactatgaaatgtacagtgtctttaacaaatggcttcgctggggcgatgtccacaggacttggcttccaggtgccaaggtgctctaagtgtccctggaggccaaaagccctactccccgagcccctggctatacagccagaaggtggccggggtcctaacccgctatccccttgcagctcaacaacaacacaacgcagggccaggccatggtggtggagctgattctgaccttccagctggcactctgcatcttcgcctccactgactcccgccgcaccagccctgtgggctccccagccctgtccattggcctgtctgtcaccctgggccaccttgtcggagtgagcagtaccgacattgggctggggtgagggtggggcaggcactcaaggcaaataatggagccctggagcggagcccacttcagatggatgagtccagcagagtttaaggcctggatttagggctcctggactctggccctactgggccccagaattgatccccccaaaacctctgggctgaggaaagatgggagtaagtaggaggtgggatgggacaggaatcaaacccaacctcagagcagagaagagaggagggcgtagttaagggtccatggttaaccaagcagctgggatccttggagggagaggttgccagcctgagtttgagacctggctgagcccctggactgcagtgtaaccttgagagagtccagattctgtgggagtggaccaggatgttgcctttctctccaccgccctgtctctatccagatctacttcactggctgctccatgaacccagcccgctcttttggccctgcggtggtcatgaatcggttcagccccgctcactgggtgagtctgtcccttcccctggctccctggagatgagggcctggagacccagcagtggcagctcagagctcaccagacctggattctgtgggtctagagcttgggggtgggccacggagtggtggctgacagagaaagggacacagtaggggatgggattcagctagaggggcagaggtggctttgtatggcctgaaccgctggggacagggagtctgagtatctatccgcttatggaagaggctctactgaacctggaggtgcagaggggctctgtgtcaattcccttgaggatttggtgtccgtccccctcggtgtctgcgtgctggtcctctctgatgttttatttatctgtccctgttgagggggttgggagagtcttcctgtgggtctgtccctgtggacagtctgtctgccccccctttggaagctcatggtcactctctccagggtctgcttctatccctgcgtggaggggacacgcgctctgttcatccgtctctctgaggacccacgtgtcccctctgaaggtttatttgcttctctttccggtgtggttggagggagcctgtccctctgggaatctgtttgccttctttgagggtctaggtgtctgtggtccatgtctctgtccctgggagtggtgtgtcagtatattcgtccccgaggtgggaggaagtctttctccctgaaggtctggaagtctgcatgtctgtctcctctcagggtccgtgggtctgtcctctgtgg

SEQ ID NO: 1884914 - DNA, 4001 bp, Homo sapiens
aaagaaataatcccttcaattttgcaaggcctgtggtgtcattcccttttaacagataaggaaaccgaggccaggacgtggtggaaaataatcaaggtcacacatctatgtgcaaaagtggagtaacaacccaggctcctcattcccaggtcagtccagtgacctcaattgacatgaaatgtgtgaggtccttctgtggccctgtggcagggcctgaagaggacagcgtatgtaaatcaagtcttgtgccttcatgagtgaggcagagtagaaaataacagtaattcactaggaccgaatctgcattgtaaacagagaggaaggggctagtatttggcagaaggatgtcaaggaacattttagagataagaggtgacatttgggttctgagggatgagtaggagtgtgccagggtgcaaaggatgaaaagacagctctagcagctggtaagggctaaggggcatggagaaacagcaagactttggggaactggtagaattctaattctggaaaatttgaacaaggtaattttttgtgtgtggttaaggtattacatacatacagtaaaataaaatgcaatagttgctgggtgtggaggctcacgcctgttaatcccagtactttggaaggcagaggcgggtggatcatctgaaggtcaggagttcgagaccagcctgaccaacatggtgaaaacccgtctctactaaaaatacaaaaattacctgggtgtggtggcaggcgcccgtaatcccagctacttgggaggctaagggagaagaatagcttgaaacccggaggtggaggttgcagtgagctgagattgcactattgcgctccagcctgggtgacaagagtgaaaagctgtctcaaaataaaataaaaatgtaatagtctaattgatttttttaaaaaatgtagacatccacgtatctaccacctaggtaaagatactagagattccagcaacctgggaggatccctcgtgcccctttcaggtctatatgagcctccaccgttccccagtcccctggaaggagagggggtgggagaggcaacatgaaacctaaaaaccagtgggcttcgcgcctgtaatcccagctattgggttggctgaggcaggaggatcacttgcccaggagttggaggctgcagtgagctatgatcgcgccaccgcactccagcctgggcgacagatcaagaccccatctctaagcaaacaaacaaataaacacccctcaaaacccatggcttcaggcctggcgcggtagcttacttctgtaatctcagcactttgggaggccgaggagggcggatcacttgaggtcaggagttccagaccagactggccaacatggcgaaaccccgtctctactaaaaaataaaaaaaaaaaaaaattggccgggcgcggtggctcacacctgtaattccagcagcactttgggacgccgaggagggcggatcacgcggtcaagaattcaagaccagcctgaccaacatagtgaaaccccgtctctactaaaaatacaaaaaattatccgggcgtggtggcgggcgcctgtaatcccagctactcaggaggctgaggcaggagaatcgcttgagcccaggaggcggaggttgcagtgagccgagatcgcgccactgcactcctgggcgacagaaagagactccgtctcaaaaaacaaacaaacaaaaaacacaaaaattaaccaagcgtggtggctcacgcctgtaatcccagctactcgcgaggctgaggcacgagaatctctggaacccgggagacggaggttgcagtgagccgagatcgcgccactggactccagcctgggcgacagagcaagactccgtctcaaaaacgaaacaaaacaaaagaaaaaaaccttagtttcagcccgcacattccctcaactcctatcgctgcctgcaaatgtttcgccatcttcttggacaatcctaagagggcattgcagaggcttccggacactgtcgttttcctgggaagtccacaggaactttagcttggacgagaaaggactagggaaaaatttttggtccttcggagccgccgtccaggctcgggccgcgcagagtcgcttgtccctcggcggctgccgtgcctccctttacgtggcagctgcgggagcccgccaatccactgcgcccgcatcagcccccactggtggcgcaggcggaaggggcggagcttaggcggcggtggctgagaaggcagcggggcggcggcggcggcggcggcggcggctgtggaggccgcagtccgggtcctggcttcggcctcagccccaccatggtgacgcttgctgaactgctggtgcttctggccgctctcctggccacggtctcgggctatttcgttagcatcgacgcccatgctgaagagtgcttctttgagcgggtcacctcgggcaccaagatgggcctcatcttcgaggtggcggagggcggcttcctggacatcgacgtggaggtgcgggctagctgcccgcagctgaggcttggtcgcgtggccactcggggattggtggcacctgggaccggcgcggggcctgtgtggggagtgggcttggaagtcgctgtccgagtcctggagaagcccaggccgccaccccccgccccgccccggccacggcgacctcctaacggccccttttcccgcgacttgcctgggttccgggatcccttgggggctccttcggcatgcttggttgctttgggttttctccttgaacgacgggttcctgttggaacctctcgctgagctttgtgaatcaggcgccgcgtgtcagtccgggccccaaaggcgcttctcagtcacagttagctggtggcgggtctctatccagttagcacctgccttctttcgtgttacggattaatgctggaacgtggcacggaaacttttccaaaaaattgattaaaatcgattgaggattaaaaacctattgagtgctaggcatactttcgcgttgtgtttatttttcatagaagcaaccttaaggttctactctttacgcctccagctacctcgtttagtctcttctgccaaggagagatggggagttgggtcatgcgttttaggagtaagcagtgcagtgaagtatcaggagaagacaggagtttaagaaaccagcagtccctaaatctccactcatgttttgtaaaccaaaagaatgatgtgttgctagtttttattttaattcacctgctagcatgattaattgggtctaaggagtttccatttgacagtgtactcagtagggctgggcacaagttacacaatacaagtgaaatccaaaaataaggggataacggaagggagagactcttacacttagctaagaatttagcgatcaactattacagtctcgaagttatgcaagtgacatgcactttgaaagagcgactgacttgatcacagcctaacagctgatttgtagcagactgggatgagagtttgggtcttctcatttccaggctagtcctttcccctaagccttcaggcatctcagataaagcagaattccttcactgtttggcagtaatctggaaaaccttgaaatgtgataaaaattcatcttgtttatattttaaaaaaccacaaacgtttattacctcatggtttctgtggccaggaattatggagaggcttagctgggtggttctggcttggagtatctcatgaggttgcaatcaagatgtcaaccagggatgcagaaattctttattttaaagagatttcttttttcttgagttttgctatcagtcacagttccatgtttgttggtgatattaggccagttagagaccacatttaaggtgagctttctgtttctgaggggtttaataaggataaataagacataaatgtcaggacctaaaggtgttttagaaagccatgaagtcaactcttattttataaagtgggagaattgcagcccaaaatggttattatcacttaccgaagtgaagctaagtgaaa

SEQ ID NO: 1884915 - DNA, 4001 bp, Homo sapiens
acacatgcatacacaacctgtaattatacaccatgcagagattcaaagataccacacaagagcatacgtcaagcacatgggcacctccacaaggaaggggtaatggtagatgagagaggggaaaaaatgagagggcctggcagcaacaatcgtgataggaccataaactaaggagtaggatcaaccaaacccatggctacctgtgttttcaattgttttaaaagaaaaaagaaaagaaaacaaggacagaaaggagagagggagaaaaacgaactaacaaccatacactggggttgattctatcctgatctgatttgcaaaaggcccttcaactcagccttcctgttgcaggttggaaaatatatatatatatatacatatagtttctagtgggaaactaggtatatatatcttcagactcacttggctcaacaaaataccaaacttcatggtagttactattctaagagcaacttctttcttttgcctgtcccatcactgggatctgataaacactaaatattggtgataattatgagaatagtaactggagtttgcatttccaaatgtgtggatgaagataaggttcccttctcaattttttaaatgttaccatttctcgccatcccccaaatttgtacaagtcattctgaaatgaaacaccaactattcgcacattaactgaagaaattaatttttgccccttcttccctctttttgttccaaccattaagaaatgtgagaaactaattagtctttatgtaaatttaaattaaaccatgtatattttgctgtgggtgttgctccttttctactcctgaatgctttgaatgaatattatttattctggtaatgagatgtctgtatgtgcgtgtgatgaaattaaaattaattgcatcaattatatgatttttttttgtcccagagagcctggattaatggaagtctagtttcagtcaggcagttaccacccgtgcccaaacaggactgaaagtattcatttgatttgtcagtaaaagcggactaggggtcgggcgcagtggctcacacctgtaatcccagcactttgggaggccgaggcaggtggatcacgaggtcaggagattgagaccatcctggctaacagggtgaaaccccgtctctactaaaaatacaaaacaaaaaacaaaaaaaaagaattagccgggcattgtggcgggcgcctgtagtcccagctactcgggaggctgaggcaggagactggcgtgaacccgggaggcagagtttgcagtgagccgagatcgtgccagtgcactccagcccgggtgacagagcgagactccgtctcaaaaaaaaaaaaaaagtggactaaggatctctgcagaagcctctgacattcccacactttaccccaggacaaacttcaaggtgggaaactggtcaacaaaataaaggtaagagtttccaatttccaaaggtgggaattgtctccgcaggacagaggtgcagaaacactttcccataaaagaccagatagtgcatattttagactttgtggaggaagaggcaaaactgagaatataacataagtacaagaaaggaaactcctgctttctccaccccatctgctatttccatgatactcaccacttcagatgctgggctgcagtgctgtgagcctgccagctggatggagcctctgagagtggagggggaatcatggtggagcttggtgtctgcagcccacagtgcttgcccactcaatccctgactgctggacataagaaaaacaggcagctgcttggagttggctcacaggccatggtccttactctaaggagtcatatctacccataaaatgaacaatccatggatgaagatgcttaattgagaaaagggagtataataattaccggatgagagggcaggtctttaatctgggtgatggcaggagcaatggattcaccaaacccctttaattttcctgctagccacactactggactatattgcccagcatcccttgcagttaagttggggtcatgtgactgggctctggccaataaaaatgatgtgagcctggcagtagaactttctgccagattccagattccacggtggccatagcagctgtgtgttatgtgtcataatgcagaaagaccagggtcttcaaatgactacataaagcagaggttttgccaccacccgccacacttgggattgtaatgcaaagaagaaataaatctttattgatgaaaaccactggcatttgggggttgttacagcagtcagaagactggctaatagaggcagcaagaaatagaggggagagagaacggtgcccatgtgggttatcctgcaaaaagggctcactgtccaatgtgctggaagccagtactttgacaacaggtttctgagaaaaggaaagctttatactgcaagttgactcacaaggagacaggagtgaagctcaaacctgtgctagtttctattagaaaaggttcacagggtggattctgagattagtaggtaattggaaggaaaggggaggtctggaaagtctttcggcatgtacaattatctttttgtgctaactcatatgcaattgcaggggaagttagtatgaaacatgcagtgaaaattcaggctgtgatgccagtaggctcgtcctgtacaaactccagtcatccatattggttccacctgatttcattttacctcataagcaaagtttcagtgcttcagcaagttttttcttttctttctttcttgtttgtttgtttatttgtttatttatttatttattttgagacagagtctcactctgttgcccaggctggagtgcagtggcgtgatctcagctcactgcaagcttcacctcccaggttcatgccattctcctgcctcagcctcctgagtagctgggactacaggcgcctgccaccacgcccagctaattttttgtatttttagtagagatggggtttcaccatgttggccaggatggtctcgatctcctgaccttgtgatccacccgctttggcctcccaaagtgctgggattacaggcgtgagccaccgcacccgaccattgtttcttttcttatctgccatcccacagcctcaagaatttctgtgagctactggtttctttaacttttgggggcagagtttcacgtgtgccccacaaagtcctaatagttccataatgagggacccacacctcctagagaggggatgtttctgaaagggtcatcactgaggagcagagctggactaatacaagatgagacaaggcatgccaagatagagggcagccttctcagtgggaggctgtcattttcagagagaaataagctatgttttctccatttcatctgcctcctggtaagctatcatcctatggtatctttgagatgaggcacccatactgtgctctgaaaggaacaataaaatcacctgagagtcttcaaactaggtgagagataaacgacaatgttagaagaggagtatccacaaaaccatgagtatacagaataagaagaaaatataagctgagaatagagggagtcagcaacagtggaagatgcggattttagggaaatgtgccgtgcgtgaacaccacaggatagccaaccttatgttgtctatcctagaggagtcactagggaaatatcctagcaaaattactttgtttaacatgaaattttcaataatcagaacttacagagtacagtggttaagagtgtgggcttggaagccggactgtgtgagttaaatcttgtatcatttgccaagtctgggacctagagcaaattttcaccaagccccctgcattttcctgctagccacatgactggactacattgcccagcatcccttgcagttaggttgagatcatgtgattgggttctgaccaatgaaaatgatgtgagcctggcagtaggatcttctgcaagattccagattccagggtgaccatagcagctgtgtgttatggggctataatgcaaaaagaccaag

SEQ ID NO: 1884916 - DNA, 4001 bp, Homo sapiens
cgggagcacaagctctagagggcttccgggaggaggcttagggagctgggaatccgggagcagatggtgggttcctaccgtcgagggtgggagagagggatctgaggccaagtttgaggtaaggactgtggagctccatcagatccccatccccacctcccctcatctgcgcaatcctgcgagaagccttagacaggttctggctcagagaaccggagagaggcacaacgcctggcccccaggacttggccacagcgtccctgaccttgtctgctccatgacctctcactgaggcccattaacccctcagttccctgatgaggcttgatttagcatccttgatgtcagctcctaagagtctgggaagtgcatttaagtcctggaggttggacaaggccccctccccacagcacacctttccatccacttctatcccaggcatggcttttgctctcctggcctccgtgcccccggtgtttggactctacacttctttcttccccgtcctcatctacagcttgctaggtactgggagacacctgtccacaggtgagtgaccagggacttccaatgactcttcttccctatgggatgaaaatggacaggggctgttatttcccttcttcctaatttccctcttcacctctcctaccttcacctccctccttgcccaaccctgccaggaaactgacctaggcaatgcttgctagagtgggtgcaaagaggtgggagtttacctgaacttttttcccctatgaaatttggttaaaatgaacatctcagggacttggaaggggaagaataggtgcatggtcccccaaaggggcacgcagtaggcagagaatctgcaggagggagcagtttttgccggctagcgcagctcttcgcgccccacagtcttgacggggcagcagccttcttggagagccgagtctggcagcaggatctcggacccaaggcatggaccctgagctgctgccctgcccagggctgcacagctggtgatgtctgcatttgtcccccggcggcaggaactttcgccatactcagcctcatgacaggctcggccgtcgagcggctggtgccggaacccctcgtggggaatctgagcggaatcgagaaggagcagctggacgctcaacgggttggggtagccgcggccgtggccttcgggagcggggcgttgatggtgagggaggacccggggaggaacccggggggatccctgctgaggggccagggaaattgggccggggaagagggagggaccagctttcggcttgggttcgggagggcggaggtgcgcggggttggtttgctcctcctctagatggtgacagcgcgtcttctcccccacagctggggatgttcgtgctgcagctcggcgtcttgtccacctttttgtccgagcctgtggtcaaggcgctgaccagcggggccgcgctgcacgtgctcttgtcccagctgccgagcctcttggggttgtccctcccgcgccagatcggctgcttctctctcttcaaggtgggggtggaagaagaaaggagaaggggcttctagaggtcccgtgaatagggaaactcgaaaagggaggaaggacggagggtggaggggtagtatgtgacaagggagcaggaaaggaggttggagccacgtggctgaacgagggcgctgaggaggtgtaagccctggtggcactgggtagagagggcctcgctctgggggtcccgcgccggggcgcatgagccctggcacggggccctctgctcatcgcccctgccctcagacgctggcctccttgctgactgcgctgcctcggagcagtccggccgaactgaccatctccgcgctcagcctggcgctgctcgtgccggtcaaggaattgaacgtgagattccgagaccggctacccacgccgatcccgggggaagtcgtcttggtgaggatggccgtgcgcgccggccccctgcccgcgcagaccctgcggtcctgtgggaactggccgctgccgccccctggtggagtgcagagaggccacggaacagagggccggctcacactttccttggcctcctgcagaaggacgctttgaccttccacagcccccctcgacactgtcccacgtctctcacggagcaccccctagacctcttggagtttcctctgccatcctacagcgctcccttgaggtcttgctggtcacagcaccttctctgacatctgtcctcaccagggtccttccctgtaattcacagtgcatctccctctccaccctccaccgacatttctctctctccccaactaaataaacgttccgcgtctccacagatgccagtatatcactagatatcgtccagcttccctctttggaaggctcagtggcatctcttcatatccaccatccttcacagaagcgtcctcttacttccacggctccaggctctgtggcctcaggcatatgtcatccctctttcccagctctacactacaaatcagttgtcaggccctcatcccaaacacatccccgctcccccaggtgctgggctcctgcagccagctaggcctgcattatggtcctctctcatggtcagccccttctagcttctgccagggaccccatctcttcccatgccttcattttgctctctttttcaggtgcttctggcctccgtgctctgcttcacctcttctgtggacacaagataccaagtccagatagtggggctgttgcctggagggtaagagaatgaaaagatgccagctttctcttctcccacctctcccacccaacactccctcttatctccaccccccattttctctgccttccttatctcactgaagcacctaacccctcctcaccatggatccctccctctccagatttccccaacccctcctccccaacctggctgagctgcccaggattctggctgactcgctgcccattgcactggttagttttgcggtgtctgcctccctggcctccatccatgcagacaagtatagctacactattgactccaaccaggtgggactctgactgtggaccccaaccctctcatttgacttcccaccatgcctttgtctctcccacttcatctcactgtatccctccaggagttcctggcacatggtgcctccaacctcatctcctccctcttctcttgctttcccaactcggctacgctggccaccaccaatctactggtggatgctggtgggaaaacacaggtaagagggcatccttggatgaggagaaaggatgggccatccaggcaaggtggcggtggtggagaaacaggtggaagatggctagaatcccaggtggcacctatatagagaagactggggatctgtgagaaagggtgactgaggggatggaattatagataggagagatggaagataacaatgttccagtaagacctttgtaggctctaagcgctgaaaaagtttatggtgccccaggtgtggttcaaaataaaaacacaaaactataaaataaacttaagagataaaattcttatttttttcacacaatgacattgtcttttaaaaggaatatcacatatcaaagtctccccctaatatttttggtttcccttactttgctggtgccctaaacacatataccctgcttatagggtaacccaacagtggcttttaaggtggaggtgggctacaaaactggggaacttgaacaatggacatctacaaggagactggtgaataatgggcatttaattaattggggggagcgggagggttagatgtgaatggcagaatattaagaagggggttgtgtggaaggagatttgggagaagggagacttccgaggaagattaggcagagtgggcaggaagaccagctctcatgtgggggtgggaggctctcttccttttttgctcctgttcctccttttctctagctggcaggcctcttctcctgcacagtggtcctgtcggtgctgctgtggctggggcccttcttttactat

SEQ ID NO: 1884917 - DNA, 4001 bp, Homo sapiens
tacacaccctagaccccaatcaagtccattcctagcctgcaacctgtgttctgttgtctcgcacagttgggaaaggcatcttcagtctctgagcttcccacgcacatttgctggaattgtctttcaaggcacagaagcctaaaactctgcgatgattggccaggcgcagtggctcatgcctgtaatcccaacactttgggaggccgaggagggcggatcagttgaacttaggagttcgagaccagcctggccaacatggcgaaactccttctctactaaaaacacaaaaattagccgggtgtggtggcaggtgcctaaagttccagctactcaggaggctgaggcaggagaattgcttgaacctgggaggtggagggtgcagtgagccaagattgcaccactgcactccagcctgggcaacagagcaagactccatctcaaataaataaataaataaataaagcaaaacaacccgttatgctctagtagggtctccttaatcctctggagcctgacgtggagttcttcttaatgtcttagatctcgtttggacttataaaatattttagttttgtttttatctttttgttttttggaaacaagatctcactctgtctcccaggctggagtgcagtggcaagatctcggctcactgcaacctctgcctccagcattcagaggattctcctgcctcagcctccttagtagctgaggctacaggcatgcgctgccaccccgcctggctaattttcgtatttttggtagagatggggtttcaccatgttggccaggctggtgtggaactcctgacctcaagtgatctgcctgcccctcagcttcccaaagtgctaggattacaggcatgagccaccatgcccagtcctgccccgcctttttttaaatttagcttttaagttcacaggtacatgtgcaggtttgttctataagtaaatttgtgtcatgggggtttgttttatatgttagtttttttgatttcactaatttttgtccatcttacttccagttgtgttcagtaggagttttggttttctgagaattacaattaaaaaaaaattcatagttattcatatgcttattagctatttcatctatttcctgataatgaaatttttggatatgccttcaagttgaaattaataaatccagtagcatattccaactacctcttacctctttatcatctctgagttagtacaaatacatatctgggccatgagagtaatgggtgaatgtaaaatataaattgaagctcattttcacaatgatacaaataataataaggccagcccatcctctgtctcaaacattttccccaggtcctgaggatgccacctatttccaaagtagacttgccatttcagaacagaacagatatttttcagtcattgcagttgttggggcactgatgtagggaaggttaataaaatccatagattaaaaagccactgcctttttttttttgccatgaacccagaaagagttactaacaatcaccaatatttcatgtttcgggttttgtttcctccctaaaagttgacagattttaaagttcagaaaagtgacagagcagacaaaaggagttagaatcttaaaaaaaaaaaaaaaaaaaagtcttctgatgagaaagcagagtttcagtccacttttaaaaaaggaaattcagattaccttgaataagcagcttcagcagtatttacacatcagcagccgatctccgcacagttttcctaagtgctctcgcctacttttttgactgtgataattaccactaccctagaaaacaccttcctctatttcagggacaacttgagtcctaaagccaatatacagtagaggggactgaagtcctccgcacttgtcctgcagactgtgctcattccgctgagccccgagctgtctgagggagaggagctgcatgcggccatttccattctctcccttccgcttctctagtggataattcctgctggccatttaacactcaagccggagtgctgggaaaggaagagcacggtccctttaaatgatacggaagccgggaaggaaagcgcggggtagaaagggcagagtccgtgactaggcctctagccccagggacctaggcgaggacaggcactcctgcttttccaagagcaccctggcccgccacgcccccagcctgggcctataaacacccacgaccctagcaaggcagagacagaagctgctggagggcgagaggaacgcatcagtggaagaagacagaagcggctggtcacggagagcatgtcagcagaagaacacacctacagacgccggctcgcccgcgggctccccggcaggccatcgaccggtgggacgaggtggagtttgtcctgggcagtaggaggacagcccgggcacccagcggcccaactccaggggaaagccatctcccttctggagctgcccaactccgggggaaaaccatctcctttctgactctcctgtcggtggagagttacttccactcaatacgattttgcagtcattctccaagcccacgtgtgatccgattcttccggtacaccaaggcaagaacccgggatacagaaagccctctggccttatgacaaggtagagggtctaactgagctatagaccgtgaactaagagcgcaccctggaacacacgccctctggggcttcagctgtaaacatccacccttagacactgccatggggttggagccccacaacctgcccatctctatgccccactagaggtatgaccaacggggcactgaagaggcgagcacaccccatcgcacgccctgcaagggggacgggggaacctttcccatttcaacaccaccgctgtggctgcatgtggctgccataagaaaaagaacccattctttggcacagctgaagcaggactcttctcgttgttctccaggtaggttcctccccgtggaactttgttatcctcatctgtgttttgcctggggcacctccttcaggtagccagttccttgttggacttgccccaggggttagatggcaattcaggtggttcctgcaacccagaagcaggacagaatcttgtgcgacagtattttgcctaactgcttgaaggcccttcattcctagggacaagttgacatcaacattcaaatataatgaaaattgttgagcatctttcctaggccactaggaagggaaaaatgcatggtgctacaaatcattgggttttactagccaatgggtaagtggggaaaaggagtctttttatttatacttgtttgttctcctctagatatttcagaagatgtgtaagatgacactgaaccaatggtattacgtccctctcttagtttttactattgaaagtattcctccttcatatcatctcagaaaatacatagtgataggcttacggtgacagttctctttggtcatgagagcaaaacgcagagcagtggaattaaaggacacctggaacttaaggcctctaatcaggccatgtagatacaggatggtacatttggggacattcttcactcaggtttttaaggaaaacacattattttcgaggacatacacacaggcgttgtaaacagataaacagtttccaataaatgactcttttgggacccagttttaatggtaaaatcagtatgatgtttatttaaccgatgttgtgggtaaaccagatgccctgcctctggtatccctcagattctctttctcttctgtgtccaaacacagggctccagccctccccctccttacacagtggggatgtcagcaccacagcctccctttgcttctgtgcctgggaggaaggaagatgcctgctcttgttcttacccctgcctctccctccatctctgggttcctgtacctcccatcatagtactgttttgttttgtttgtgtcataatagacaccaccctgatctcatttaatcacctaaaggaaatccttaagcaatgcaggtgtcacagatttactttaagg

SEQ ID NO: 1884918 - DNA, 4001 bp, Homo sapiens
ggggttctgggaaccatcattcattgacaaaaatacaattactaatccaataaaaacaggagcccacatattagaaagatagatccccaaagattacaagagaatcttactctaaaaaccacattttctgtccttcctgtgaagatgtacaaagaaacttgagaaagctaggaaaacatgtcttcctgctatttttttaacaaagtattttacaaatactttggaacaagtccactaccaactgattcctctgatggggaccatagggatggcattttgatactagctcataagaacctcccctaagtatgtcctgcacaactacaaggaataacagctcaataattctccatggttaagattacaggctctggagccagtcttttcagattgaatatatgattgctacactcactagctgagtggccttagatgactttaattaaaccatctacacctccatctacatctccttatctatggactgtgaaaggtggtattttctacctcaaaggactgttatgagaattaaatggatcaacacttgtagcagctggcacataataagtgttagctatcaatattcactgttcaatcagtgttagctatcaatattcattagagtgtaagctcccaacggcagaaaccatatccattccatctttgtgactcgcacaacattttatacactttcctatacattatatatgttcaatcagtatatctagattaaaatcactcagtaagatcaagggaagacttggttcacaggatcttagaactcaggtccaagtctccacccattgccaaatctgtttgacacataagcccttctgcctctttttgaagattttcagtgatgttaagtccgctcgggattgtccaacaaagattggacagccactcttagggtttatttcacctctggattcattcattcctatgttcaaagtactgattgagcaccatatatatatcaggcactgtgcaagcacagaggacacgtgattagtaaagggacatagcccagactccgtgggtcctacagtcaagtagaggttagaagatagaggtgaagatacgaatatggatgtaacatagatgtatatgtagtatttactgatgtagtggaggtcaagcactgtgtgacccttttacaaacatcatttcattctctcccaaatttcactggtattgcatcatacgacatttaaactagttaattataatttatttatcagtgctcagcctctctgtagatttccacctgacaacagtttattatcagaagacatgaaagagagaagaataaaatagagagggaaaaatttaacttaacttcattgtcttcctccaaatctttcttatctatgactccattcaatactgcctgtaaaaccagtgtatggtgaggaccatatactgccccataaaatttgcacatgggtcaaatacaagaagaaattaaagcaaagacaaaaaccaattggcctgggaacctctaaaagcctagatgttctccaaaacactttcaaagatttcttggatgagtgtcagttctgcttcatggactgtcattagaacagatctctagaaagggtagctccgcgcctcagcattgtcattcccattttacaaatgaggaaactgggcttggggaaatttaagtaatttttcccaagatcaaatacatagaagatagaaccaggattcggaccaacattatctgtctgaaagcttaaccaaagaattcagtggctctgcattctttttccttaaagtaagctaaaagtggttcctttttaacttcccctgttgaaatataaaaagcacaaacctactccatcttccacatgatggcccttgaaagacttaaaaagagctgtcagttctcactctgtatgttacccccaggctttttcttctcggcatcaggctatacactctcacttccttcaggcaattctactgtgatttgatttcaaaagccttcagcccatggacactcttcagcagaacacaatctgacttcccattgttctgtttatgacctagaaagaattctctgttggagtgacagagtgagggctatcatctgttgctcatttttgatggagaccagtgtaaaagaaatatctcacatcactctgaaatctactgtcagaaagccagtagcacaaatgtgacaagaaatgacaagagcccctcaccctcagtgtggaaggcgagagggagtggtggagattacagtgagttggagtggtggggagtggagagcctctgtagacaactggtccactccagatgatgatgaccggcaggagtatgggcgcaggacaacctgaccacatggtgtttcaagaggagctcggaatccagatgtgaaattaacaatgtttgcatgctggaaatggattcaaattttaaaaagtcaaacacacacacacaacccttctggaccagatttggcatgaagtacagcagcgttgcctgtgctgggaccatgctctgactaatgctgacgaagatcacatcagcctcatggcgacctcttcatttgattcattggctcttactatttataaagatgccaagattttttcacacagatgttgctgttatgctgcatattttgaaattaatgaaaactttcttaaactaagagtagaactttttatccttcttccacctgccagactaggttgaggttccagtctctgaaaattattttattctcccagattctggactctttaacaattgtgtcctctgtcttctccaaagtcataccaatcctgagatcaaaactgcaagccaaggcccagcgcggtggctcacacctataatcccagcactttgggagtccgaggtgggcagatcactagttcaagagatggagatgttaatgctgaagacctgaaatcaacagaaaggaatgtctgggttactatgataaggagtagagagtccaaagatttatcatacagatgaagcctgcaggtagcaagcttcagaaagaatatggccaacatggtgaaaccccgtctctattaaaaatacacgtggtggcatgtggccgtggtcccagctactcaggaggctgaggcaggagaaacacttgaacccaggaggcagaggttgcagtgagcccagatcgcaccactgcactccagcttggcaacagagcaagactctgtctcaaaaaaaaaaaaaaaaaaaaaagtgcaagccaaaaataaaatcctaaggccctgaaatcatctgaatggacccctctcctcagccaagggcatcccaaagttggttcaggccatagggaagcaggtcagacatgccttgtgataccctcctcccttttggaattcaggaaaagctgaccagcattaacatcaacacaaaccttaagtctgataagaaacatttataatctattattttcgaagcttgatacctgcaggcttcatcttcatgacaaatctttgactcctctattccttatcatagtaaccagacattcctttctgttgatttcaggttgccattgcttttggtgttttagatatgaagtctttgcccatgcctatgtcctgaatggtattgcctaggttttctttttttatggttttaggtctttaggatggccagggcaggcgagggagggcagggtgggaccagacggatgaacatggctgggcgcggtggttcacgcctgtaatcccagcactttgggaggccgaggcgggcagatcatgagatcaggagttcgagaccagcctggccaacagaccagcctgggcaatatggtgaaaccccgtctctactctttcaaacaattgccaattagaacattttaaatctacctataacttggcccccctcccttgacttcgagttgccattgccctgcctttccagatctaaccaatgtacatcttctaggtattgattgatgtattatgcctccctaaaaagcataaaagcaagccgtacctcgccaacct

SEQ ID NO: 1884919 - DNA, 4001 bp, Homo sapiens
cctcttagcacaggcttagaaggatggaggtgtccctcttagcacaggtttggagggatggaagtgctccctcttagcataggtttgggattctgtggggtctgtgttggttgctcctgtgcccacacccttttaatagttagctttcatgcagagccttattttcaacttgatcactgtaaactacacttcaattcaaaaaacaaattgaaggaccagcattcctgatgatgatgttctaggcaagcctcacatatctttgaagatttaggcaaactcctagacatgggaaaggcaagcactggaagtgaaaaattaaataacaaaaatgatcaaaaccaggaacaaagaaatggttataaaaccctatgaaagatacacactttcactttccctaattatacctgggctcttggggggaaatggcttttatgctgtatcagtgggaaattaatgttgacagcattgcttatctataatatgtatctaaatatcaggccgtcctctcacaaattagtttgcacaccagtcattagtcctcagctacagtctattgtctcagagcaatgaattagttctgggcttctagaataggtttgagagagaattggagtgaagttcccaggagactgataaggcgtctgcatgaacgcagcaatgcatggaaggagaatgaggtagagatttctatgggttagcaaatgaggagctagtgacctgctggaccagtgatgtgttcacgtaggtcatggaaacagcaagagatgagcttaacccaacagggatcttctgacaagaccaaagaagcagcgtgaacatgtgctggattggagagcatatgttcttttactaaattaacagctcaagtacaaccttccctaatcccttacctgctctctttcacaccagaggctcccagaaagaggccggccaagctagagaaggagagaaagtctgcagttaaatcaaggacatagtttggatctgtatctgggacagtgagactgtgttcattaaccaagctggccatgggtggatgtgaagaggtaggcaagctgcacaggttgagggactgatcccacaagacacttctgacaccaactcccagcatagaggtttctgtaaactaccttgtgttttaacactttactgggatgatgctcagatcccagaaaagtgctatccttatgagtacagttttgtttagtgaaatgattcaaatttagaaccaagcaaaggatgagacccataaggaggggtccaaggcgaagctccagagtcctttcctcatgaaggccttgacagtgttgccttcttcaggctatgatgtatgacagtacacacagagtggtgcccaccaggaagctcgcctgagctgcaatgtgcagagtttgtattggggctgaactgcgtggatatgatttattgaaccatggatcgcatggttaaactcagttttcggtcccccttccttacctggaggatgacatcacctggctcagaaactcaaacctcaggatacagttttggtctttctggcctggccatcccctgctgagtcatctcatcagcataaggcatcaggcgtgaaaaataaaggtcctccaatcactcaagacatttcaagactttagtggttatttcccaggagctagggtaaaagacacaacttttgatagagttgtttgccacacaatggcctattatttaaacataagcagaaaagcccatttacataggagaaggtgaagttccccctactgagtaaatttgagaggggcatcaggaaagagaagaaagtttgtgttatgatcctgtgtgacacataaggcattcttatcagtcatctcaaagatgggaggaaattggagtagatattgtacaattgacaacatcacagctgtaaaataattctccatgttttcttctcttacccactgtgttcccgggcaggtcaaagtgtgatgctgggtttggcctctgtcttcctggtctgacctcacaattgattgggggtagatgttgacttaaagttgcaggtgctacttatcttgggaaataacttcccacagtcctattattttaccctttcaagaaacttggaggcagctaggtcagaatattagtgtttcattttgcagataagaaccctggccattagaactggcccataaaccctcagtgaattgagggaagagctatgattaggatccaagccttcctcctattccatggttcattccaataatcccacatggaagtccaccactgcccttgggtcatgagaatgaggctgctgctacagctacaaaatgtagtgccagagaccattcagtcccttttcttgtgtcatccacaaagtgcagtggctggcttaagtattagagtcgttccatatgtgtaaagtagaggaaaccctaacatcagccccttgagctaagaaaccccttggtgttcgttgtagcaccagaagcttatgccagcaccatgtattttaccccacaaaaatggatgagaaaggagctgccgagctggggaggggagaagggaaatgagctatgtcatcaggccctgaaaccccagatcaaacaacattccagcacataaatattcatccaagcagcatgtccagttgcagtccatttagcatgacattaacagtgagctgtaagacaaaagcccaggagctcattatcatgagccaggcttgggaacatttggagcaagttctgaaataattaatgtttcatttgaataatgtgatgaacatgcacatttgttttattgtggggctcttttggagatccctgcaaccctccctcttgtggaatgcctggtggcaagggacctgcccatcaggaggaagaatcaggagtgttatttttaactcctcatcattagaggaaacacacacatctcgaagtctggaaggagtgattattagccgttcagctgagaaatagcctggtgtctacaatgcatcattttccaattatttagatatttttcaatgccttaaatactggaggcatataaaacccagctcatttactctccctaaattatactttctccatctgccatggtcttacagtttaataaaacctctactttttacaagcccaataaaatcatggaaaatacggaggaagctcagtttcagcttgatttggtttttgtttttcttttagggggaagaattgatatatctgaactggaaaataattttcatatgctcagtttgctaatatagtttggagatttttttaaggccacttaccaaaaaaaaggtaattttatgtttttcttatgagatattccaaaatactgtggcattagaaagttgtgattttcactggaaacagaaagaaataagccagatttccccacctccataaatcaattccagatcccaatggttttgactgcatttatcagtctttctttattgaaactctctgtctcacatgtctagcccagagctcaaaatgctgaatagaaggaagggagaggtctgtgcactttgctgagtttgtgccatggaagaaatctatactcacacatgcatggaaaagcgtcaatatttgcagtggcaaagaactagtagttatgctaaggtcaatttcatgccaaaacaataagaaatattctatattttattaatttttttaaaaacttgtagggcctctgggaatcctacatgggaacccagaatatattctgtctatgtatttcaggttctggaacttcagctttagaaaatcagtttcattggaaaccctcttccagtgtgaccttgtgttattgccaactaaaaaatactcaagtagaggatttccaagactaagttatattttttcctacaacaagatacctaaagccacacatccatgtgtttggttcagaaactctccagtgtcttccaacacccaggctttttccatccccctgttccagtttcttctgactactggcttggtccttatattgccacctcatgc

SEQ ID NO: 1884920 - DNA, 4001 bp, Homo sapiens
gtggtttgctgcacccatcaacccatcacctacattaggaatttctcctaatgctatccctcccctagcccccaagcttcccacaggcccagtgtgtgatgttcccctccctgtgtccatgtgttctcattgttcaactcccacttgtgagtgagaacatatggtgtttggttttctgttattgtgttagtttgctgagaatgatggtttccagcttcatctatgtccctgcaaaggacatgaacttatccttttttgtggctgcatagtattccatggtgtatgtgtgccacattttctttatcctgtctatcaatgcttttacactgttggtgggagtgtaaattagttcaaccattgtggaagacagtgtggcaattcctcaaggatctagaattagaaataccatttgacccagcaaccccattacagggtatatatccaaaggaatataaataattctactataaagacacatgcacatgtatgtttattgcagcactattcacaatagcaaagacttggaactaacctaaaggtagttcttaaggctaaaatgaaattattctaaacagtaactcatatccatatgcagagataaagagaaccaaacagattgcataagtagatataaaagacagtatagatgaattttttgtttctaatatttttcctgtttgatttaaaagacaatggtataaaaaaagcaataattataaatccgtgctgatgggcatactgtgtataaagatacaatttgcacagcaacaatagataaataaaagaagaggaaatgggactgtataagagcaaagtttttacaaaatattgagattaagtagacattaaactaggttattataaatttagtattaataatcctacaaaaatagatagcaaaagaaactacacaggaattaaaatagtacattagaaaaatcctatttaacacaaaagaaagcagtaatagagtaatgaacagaaattacataagacatatataaaaaaattaaaacatagcagccatatatcctactttatcagttattacattaagtttaaatagattaaacctctacttaaaagcagagaccattagaatgaatagaaaacataattcaactacatgctgactacaacagacgtattttaaaattcaaagacagaattagattgaaagtaaaaggatagaaaaagatatatcatacaagcagtaactaaaagagaactggaataacatactactatcagataaaatagacttaaaactattattttaaaaaggattaattaaataattataatttaactttaataattaaaaattatttacaaaaaggatattttatgaaaaaagggtcaatccataaagaagatatgattattataaatatgtatgcaatcataatgatcaagagcctcaaaatacatgaagcaaaactgatagaactgaaggagaaatatacaattcaacaataataggtgaagactccaatacctcactttcaataatgaatagaacaactagacacaatattaacgaaacagaagacttgaacaacactataaatcagatggacctaaattatatttatagaacactccacagaacaacagcagaatatacattcttcacaagtcctttggaccaggttcaccatgagccatttactaattccagaggagaactcctactacatggagaataacaaagatcatcgcaatgccaaccaccagaactaaaagttgaaacacttctgtacactacatcttgggctgtaatttttatcacttgcagaagtccagtgagacagaacactcatacaaattaagaaaagcaattcagttactcacaggtatgtagcaagggacagcagaagctatgaattacggcaagccagtccctacgtctcggaaaagctgcccagggtggtgaaagctgcccagggtggtggactgagtctctgcaagtgcctcacatctcactgcaactgaggaaccccaaaaacactctgctctgttttttatactacagagacaacttagattactgtgctaaaacattgtaggacatcctgttctaggaggaacagaaatagagcccagattgttccaaacagtttctccttatctcaggatgctgtgttctcggcacattctatagctattccgaaaattacaagtgagatggcggaaagagctgggccagccaaggttagccagagccctgtcctgcaaatcaacatgaggcattctccaggacagactacatattagtccacaaaaccaatctcaataactttaaaataactgaaattaaacaaagtatgttttatgaccacaatggaatgaaattagaaattaatagtagaaggaaagtgagcaaattcattaataagcaaaagtgaaacaacgtaatcctaaacaaccaattgatcagagaagacaccacaagggaaattagaatgtacattgagattaaaaactagtacagacacaaaacactaaagtgtatggaatgcaaacaaagcagtgtttagaaggaaatttatagttctagatccttgaggaattgccacactgtcttccacaatggttgaactagtttacagtcccaccaacagtgtaaaagtgttcctatttctccacatcctctccagcacctgttgtttcctgactttttaatgatcgccattctaactggtgtgagatggtatctcattgtggttttgatttgcatttatccgatgaccagtgatgtaagaacttaaagtataataaaaaaagaaggaaatttatagctataaacatatatttttaaaatataaacccccaaattaacaatctattaacatatgcaagtcaataaacgtgatacactacataaacagaattaaaaacaaaaaatcacatgatcatctcaatagacacagaaaaagcatttgacaaaatccaggatccctttatgattaaaaccctcagcaaaattggcatagaaggtgtgatggttaatactgaatgtcaacttgatgggattgaaggatgcaaagtattgttcctgggtgtgtctgtgagagtgttgccaaaggagattaacatttgagtcagtggactgggagagacaggtctacccacaacctgggtgggcaccatctaatcagctgccagcgcagctagaataaggcaggcagaaggatgtggaaggactagacttgctgagtcttccagtcttcatctttctcccttgctggatgctccctgccctcaaacataagactccaagttctttggcttttggactcatggacttacaccagtggctggccagggactctcgggcctgtggccacagactgaaggctgaactgtcaacttctctacttttgacgttttgggactcggactgatccaccactagcttccttgctcctcatcttgcagatggcctatcgtgggacttcaccttgtgattgtgtgagtcaattctccttaataaactccctttcatatatacatatatcctattagttctgtccttccagagaaacctgattaatacagaagggacataccttaatgaaataaaagccatctatgacaaaccaacagccaacataataccgaaaggaaaagaattgaaagcattccccttgagaactggaacaagacaaggcttcccactcttaccactcgtcttcaacacggtactggaaattctagccatagcaatttgacaagagaaagaaataaaggacattcaaatcggtaaagaagaagtcaaaccatcattgtttgctgatgatataattgtacaactagaaaaccctaaaaactcctccaaaaagctcctagaactgataaatgaattcagcaaagtttcaggatacaaaattaatgtacacaaatcagtagctctgctatacaccaacagcgaccaagcagagaatcaaatcaagaactcaaatccttttacaatagctgcaaaaaaaataaaatactta

SEQ ID NO: 1884921 - DNA, 4001 bp, Homo sapiens
acagacacatgcactatacatacactcacatacacatgcattcatcacacatgtacacatgactcacatgacatacacacccacatgaagacacacacctctcacccataaacatatgtgtacacacagatgtacatatgcacagatatgtgcaccacacactcacatacacatgcattcatcacacatgtacacacgactcacacaatgtacacacgactcacacaatgtacacacccacatacagagacacacgtctcacccataaatatatgcatacacacagattcacacatgcacagatacatgcactatacatacactcacatacatatgtattcatcacacatgtacacacgactcacatgacatacacacccacatgaagacacacacctctcacccataaatatatgtgtacacacagatgtacatatgcacagatatgtgcaccacacactcacatacgcatgcattcatcacacatgtacacacgactcacacaatgtacacacccacatacagagacacacatcttacccataaatatatgcatacacacagattcacacatgtacagatgcatgcaccacacatgcacaaacatacacatgcattcatcacacatgtacacacgactcacacaatgtacacacgactcacacaatgtacacacacacacacacctcttacccataaagtacgagtagacacagatgcatgcatgcacatacacatgcattcatcacacatatacacacaactcacacaacatacacacccacagacagacacacacatcacacccataaatgtatgcacacacacaaatgtatgcatgcacacgtgcacacacatgtatagatacaagcacaacacactcataaagatacacacatacattgcacccatattcataactcacatgatatacatgcccacatacagacacattgcactcacccataaaccctcacatacacagatacacacattctggtacatgcagcacacacactcgcaaacacagagtcatcacacacatgcacacgactcacacaatgtacacacctgtgtatagatactacgtaccactcacacataaacacaaacatacttgcaggtacacacacggatacacactacaaacacatctccacatacacatatgccacacagactcacacatacatatgcagtacacatacatacttctgttcatgcacacacacttttacatgctcatgtgctcactccaccacacataaaccacacatttacacatactaacacatgcacacactcacacacataaacagaagctcgcacacacaggaatcacacgcgtacatgcacacacgggtattgccagcctgcacgctcccaaggaggttcatactcctgtctagatatgtgaagagactgcaccctattttgcacccttgctcgtggtcaggttttggggatggctcccctatttagactcttcctctcacgaagctgaaaggaaacgttcactcagggctttctctcatcactgtaggctctgaactccctcgcccttcaggtcaaataacgtgtaccctgctggttccgggaagcgctgctatcacagaaaaacacacccgctgctccagccctgtgggaatacggcaccgcatctgcctgtggtctctgtccaaatttccaaagacaatgaaaagtaatggtgacgatgatgtcgatgatgacgaaaacaataataagtgagaagaatcgctcactaggtcccaggcacattgccaagtggcttacatattgtcttctcctatgataagtatttttagtccttctttcatagatgagtaaattaaggtacagagatgacaaataattggcccaaatccaatagccaagaagtcacaaaatcaagattcacaacagttccctttgggtctgatcctagagttgtacccttccccattccatggcattagggaggcggaagggaactccctttctgcttcctggaatccaggctggcttggtgacttgccgaccacagaacgctgtggaagggacattctggggcttcccatctccaacataagaaggtaagaaggctgcagcttccaccgggcctcttgggctgtgtactcttgacactcttgctctgagaactaagcaggcatatttcatatcaaaatagtaaagaacttcctttccaaaggcaggacttgcttctgtgaggtactgagccacccgtccctggaggaaagcaagaacagagcagatcagagcccaggcagacatcttggatgatgggtgagtgcgatcggctatgtggcccgagtctcatattcgcaagagacttcacatgcaacttttgaagttcagaaccaggacgcagacagtgaaatgattgaaggaagacatttatcaaaatttcctcccacagggctcatggccagacttcatcacgtgcaggggtcatgtaatcttaccacattaagttactacactcacgtcactgtgcactctgtgggagtgtgtccccatgtcaacttgtaaatatataagtgtattctacattacttcaaagcccgttttgtaattccttcattaaaaaaaagaagttttcggccgggcgcagtggctcacgcctgtaatcccagcactttgggaggccgaggtgggcggatcacgaggtcaggggatcgagaccatcgtggctaatgtggtgaaaccccgtctctattaaaaatacaaaaaaaagtagccaggcatggtggcgggctcctgtagtcccagttactcgagaagctgaggcaggagaatggcgtgaacccgggaggcagagcttgcagtgagccgagttctcactactgcactccagcctgggtgacagagcaagactccatctcaaaaataaataaataaattaattaattaattttaaaaaagacattttcttagagccttaaaaagttattgggggctgagtgcagtgcctcacgcctgcaatcccagcactttgggaggctgaggcaggtggatcatctgaggtcaggagtttgagaccagactggccaacatggtaaaaccctgtctctactaaaaaaaaatacaaaacattagccaggtgtggtggtgggcacctgtaatcccagctactcgggaggctgaggcaggagataatttgaagccaggatgcgaagtttgcagagctgaaatcatgtcattgcactccagcctgggcaacaagaataaaactctgtctcaaataataataataataaataaaaataagtaaataaaagttattgggccctccctttgtgcatcctctgagaggtcatgggctggatgaccaggcggtgtggttgtgctggaggggacttcagcgtggaatgaggggtgacctgctggtgatctttctgctctcagccgctgtggtcttcggagatgagacgaggcagatgcagtgagattgtgcagataatgtctccatcaggggatgagttgctatagcacccagagtgatttcaggaacaaaaagggtcatgccctagcctgtcttcaatggctcatagcaacccctattgcctcatcaccctattctccaatattcctctaatatcttccattgtggagacatccaacataaagtagagtagaattgattcaaaaacactgcttgaactgcctaaattagaatcattcttagcttctcaacatacaaatataagataaaggaaaagaatgttgttcccctccctgtgtccatgtgttctcattgttcaactcccacttctgagtgagaacatgtggtgtttggttttctgctcccgcggtagtttgctgagaatgatggcttccagcttcttccatgtccctgcaaaggacatgaactcattcttttttacgggtgcatagtattccgtggtgtatatatgtcacattttctttattcagtctaccattgatgggcatttgggttggttcacaccaggccttgtcag

SEQ ID NO: 1884922 - DNA, 4001 bp, Homo sapiens
tgctaccaaggggaaaggttcaggacattcttaattctgaaagcaaatacttggggcaagccgggacatccctaaagacacctgtcttgagctgctcgatgaaagaagggtttacagcaaaacgcatgtttgggtgagtgtggatgtgtgtggtgcatcgtgggtcgcatcagtggggatgtgggagtgctgttggagccacagcaacattccagacacgtctggaggccaggacccaataaaagcctagaaaattgaaacagagtgaaagcaagccagagcaagagagcacagagagcgagggctctctccctgcctttgtctccctcacatacctcgcactggtggtgcggtgctgctcatcaagcttctttcacaacaccaggcccctctggccatccttcggcggcttaagctaccgtcgtcatgtccacgtttagacctatttgagttagctgatgcatggactcgggagctggacttcccaggttcaaatcctgccttcattaatttctagctgggtgaccctgggcaagtgacaaaagctctctgtgccatctgtaaactgggaagaagaagaatgtttgtcttatcaggatgctatgaggattgacgagccgatatttgtaaagcacttacaagggtgcctgacacataagtgtttgccaaacacaatattagtaataaatttcctccgccaccttttctgtcctccaccccttccccatcatagttgccctgtggaaatctgggtgaggacagaacattatctcatggctgccacggtcagccagctggtgcggactgccaggatttctgagcctgcagaagaggccagtgctgtttgcagggaggctgaggaaaggcaggcggcatactcccagggactgggccgtctcaggaggggatgtgatggaagggtgtgtttggtcttccaggaggcagaaatcctgaacacagccatcctcacggggaagacggtggccgtcccggtgaaagtggtctccgtggaggacgacggcacagtgacagagctgctggagtctgtggagtgtagatcgtctgatgaagacgtgattaaggcaagttgacacctccccgcccctgcagaaacctgctgtcatgtcagcttctgtgctcctggaccagcttgggacctctgggacctctgggacctctgggtcccacaggatccctcccatcccattctggttatcctgccacttaaatcaggacattctccgtggcacaaatattggacagaatgaaaaagtgctctggctggtgactccgagtctgggaggctgtcccttgacactctgtgttcgccgaatgcccttggcctcttcccagatccccagggagattgtcgtgggaggcagggacccgcttaccctccacccaccccaggcaggggagaagaagggaaggagccctagaacctagatggatgggtatgcggccacactccgggatgattctatagcacacagcattcgtgtaaaatcaatggtggtataaggtgtacaactactcccagctttgatttacagtactggccaagggaggaagaggaaatcattctccattcctctgcccagcccacaaaattccacatgagctagggatgtggatgaacagcgctcacccctccttccttcgtctcagcctcttctttctcttcttaaattgaaatcaaaaatgattcaaaacaaaggcaccctgggagacggatggaggaggctggggagatggagtcttgctctgccaggaacctcatagcacacttccagcctgcaggagataaatgggttccccaggctgcctccgcccactccagagacagggctgcagtgacagatgcagcaggcacctcctcaaaggaggaggctgccaacaaaagcccgggacagcgagaagggcttcacgaggctccgggagactccctccatatgagtcctagccatggctggagcacaggacaattcccggacaggaattggtgtaaccactctgctctgaagcaaaccttcagggagcatttttgctcacttaaaacgcagtcaacaaatgcgaatcaaatccccactaagtgctaggtactgttcaagactctaggaccacataaatgagatggacgtccatccttatgggtttcagagagaaggcagagatgtcagaaagcaacagggcagcggaacacatgacatcatacagcactcctacctactcattccagaatcttcttcacatcagcacaggacaacttccttcactgactccagccaatatctaggctcatcttacatttctcccctctctgcacacccaagccttcatcaaatcctgttggcagtgccttccaaggatagccaggatccagccctcctcgggtcctgccaccaccccaatcccagacacaatcacctcaaagcattgaccaccttgctggtgacctagggcctgtccttacctcctctcccataacccctctttagtgctacagccagggcggtcacgggcgatatgaccatgtcactcctctgctcggcccctcaggctgatgagtggacacagatgtgcagtttgaaagaagaaataagacctcatgttagatagatcagttgggtgatgacagtttacaataatctattacatatttcaaaatagctagagaataatactaacattcctagcataaagaaacaacaaatatcttaggtggaggctatctcagttacactgatttgatctccacaaattttatgaatgtattaaatggccacgtggaccccaaaatatgtacattaattatggatcaatactttttttatataaaaaaaattcactggcttcccctcctcacagtaaaagccaaagtatttacagagacagaatcaaacctttgcagccatacctgctgtaacgctggcctcacgctaggcacagcccctctggctgcctccactctggccacactggagactcggccactcctgtaacaggacaggcatcccctctcctccctctgcctttaactctctttccctggatgcctgtacggctccctcgcctcatcttctccccaaggccttttctgagcagcgtcagcaaaatcttcacagacacccacagcactgccttccccatccctgctgaacttctattcatatatgcgtatatgtcatacatagcatacgtttatgtattcacagatacactatatatttttgtttgttgtattcatcttctgactgtcctcgttggaacctaagctctgtgagggcggtgctgtattcatcgtctgactgtcctcattggaatctaaactccatgagggcggtgctgtattcatcttctgactgtcctccttggaacttaagctccgtgagggcggtgctgtttgggtccactttgtttgctgctctattcttatcacaacagtagtggggggttttttgtttgtttttttctttttgtgtgtttttaacttttatttcaggtttgggggtacacgtacaggtttgttatatattaataggtcacctgcgtgtcacagggctttgattacagatagtttcatcacccaggtaataagcacagtactcaagaggtatttttctctgatcctctccccttcccaccctccagccttccatagaccccagtgtgtgttattctcctcctagtatccatgtgttctccttgttgatctcccacttgtaagcaagaacatggagtatttggttttctattcctgtattagttaggataatggcctctagctccatccatgtccctgcaaaggacatgatctcattctcttttatggctgcatagtattccatggtgtatatgtaccacattttctttatccagtctagcactgatggccatttaggttaatttcatgtctttgctattgtgaatagtgtagcaatgaacattcgcgtgcatgtatctttatggtagaatgatttatattcctttgggtatgtacc

SEQ ID NO: 1884923 - DNA, 4001 bp, Homo sapiens
aaccttcagcacctttctcctccccaaaggttggggagtgggctgaaagtcctaaccctctcattgtgttttggtcttttcagtgagcaggcccatcctgaagctacccaggggctggcagctactggccatctcattagcatacagtgacactattgtcactctggagaccccagaggttctaggagttgtgtgtcaggaagccgggaggaagaccaaagatatatatcttattagaaaccacaatatctcaagaggtttaagatttaaatggttatctttcactttatctattcagaaatttggtctgcaagagtttaatgttataaagattagcagacaactagagagaactagattttggattaagcaggaacaactctcctccctgacgatttattattctctgccttgaataagcactggcattagaaagctaaaccacagaacacatacagaatattagtattcagtaaataatcatgattgcagtcaccaagtgcagacagtctgcagtgggagtgttcccggtctcccttaaaatactgcagctgttacattaatgggtgaggatccagggtaatatcaaggaacaaagattgttgagtttgattagttctagtggatgtcatcttcaaaatgcaactaatttgataataccagagcatttctgagggaagaaggaaaacaaggataatgttatgtaaatagacattattattttcatctctttggatgaaaccgttgacataaaccattctagaagcaaaatgaagcaaggaagtgagaaatgagtgaagcagccctttctgtctgtaaataattgcagggtgggctgacagctctgggccagaggctgtagagtgggcccaaagcaggctggcttccccctagtaattgtcatagtagctagcatttatggatgtttaatatattccaggccctttcctagctgtttcacatggattatgtaatttaatcttcactgccatcctgcaaagtaagtactattatcactgtcattttacagatatgaaaattgaagcttgggaacgttaggcaacctctcaaggtcacacagcaaggagcggagctggcatttggactcaggcctacggcctcctgaacacactacattctattgtttctaaaagcttgctaggtaagaagggccttattatttataatccaccaggggcttcatcctctagtttcaaattgagccgctttttttctaatttgatggcttagaaatagtcactgtcaagccaagaccatttttatgctgttgtgtttgaaatactctccttccacctgtctcctttcccacctcccctagttcttaaagctggtctacagaagaattaaatatctacctaatttgaaaacaagagggaaggatggccctggaaatgcttagaactaaaatttgggttttgaacctactggcagtattcttgccttactcagtctagtgacttgaagatggccagtggacattaaatgttcctggagacttgaatcactattaaagcccaactcatccttggttcaaattcttttataaaataagaacaaagtttacgcaggtagtaaataagtggtaatgcatattcagcactcaagtcaggcttgattatctccactaacctagagaaaggttaatatgagagtgtgcatccaattttcctgctcccattgagggaaataaggtggtttcatctagacgtttgagcctcaactctttctactttttagtaaataatttgtttgttctcattctttggaagatgaattctttttgaaaacattgacctcttttatcgcttttggttgtctattgtctttgtccattgtctgttgctgtaacagaatacatgagactaggtaattgttttaaaaaagaaattcatgtcttacagttctggatgctgggaagtccaaggtcgagggtctgcctctggttgcttctggtgagggcattgtgttgtgtcataactggcagaaagcatcacagagagccaaactggcttttataacagacccgccctctgataactaaaccaagcctatgataacacattaatccattaacccattaatccagtaatccatgaatggattagtccgttcatgagagcagaaccctcatgacccaatcacttcttaaaggccccatttattaatatggttacaccggggattgtgtttcagcttgaattttggaggggaaaaacattcaaaccatagtaaatgtctaaatcaggacattacatttttcattaatggtaactattaccatcagaattactgaaatttatttgtagagaaaatttcagatgtcctcaagatatcctcaaggtggtcacaattctgttaataaattattaatcaaagtgctagatcactgagattttagttaagaaatcattctaaaagttctcctactaaatctgataaaatcatttttcagagagaatacaaatttaaaagtatagtgttgagcaatggaactcataacattcatgtctgagtgctaggttagacctagaagatgctgaaaaatctatagtttgagtggataggcacaatggtgcttcttattattaaaatagaaaaagtgactaaaacatctttttccaattggagaggtcttgtttcctttaccgtattcagcttccataatgaaatttgtattcctgctttagtttttgtatcttgtccagatttttactcaaaatattagtcaagtcatgtattttcactgtttctcactatttaattaggtccaaaatctaaccattttattaagtacagatgaattaccaatatgtcttcatgaacgactcctgggagataatgagcaaggggagatttctattaggaagaagaaagaactgaactagtgagctggatctacatgtctcctgctaaatttaaaggctgcctggttctttttgcttgttaaaagtcaattaagcaacaggtttttattgagcataaaatattctgggcaaggtaatgtgctagatatattgcaacatagtgggaagggtaacaccccacgtttaagaatttaagtcaggagatgagaaatatgtacataaaagtattattaagaatataaggtaattcaaagcagatggagaataagaagaaaagaatataaggtaaatgtgaaatattagtatgagcagtaagtgctgaaagaattcagagactaagagtttgcttctgggtaatctggagagacttcatggaggaggcaggatccaatatgtactgggaaggatggtgtggtggctgaattagttgcctaaccagcatctattcactcttcttttcatactttagaaaccatcccacatacagcacacttgtttcagggaaagcaaactccctcttaagctccaagggagaatcctaattagtctaatgccaagccagtgatagtaacatctcttccctcatgattcattcagagaactaggcttatgccaatcagtaaattgtagttccttagcaattggcattgatctaggaatgggcacaggagtgcagcacacttatctcaggaaaagcaaactccatccaagtttgggtccaagcagtctaagaggaaagatgtttatttcatgattgggcatcagattggtactctctcccactggacatgaaaaagacatcatcagttgccccagtttcttctggtgaccatgttaagagatggcatgaagacaaagctgatacctgcaggaaggctgaggctggagaacaggggagatgcagatctggagcccgttcctgtggtgcctgaagtttgatctgcctccagatcacctattgtgtgaaacaatatattctctcaatgctctagccagtgagagaaaggctttctgtaactttcagccaaaatcatcctgtcttcaatagtagagtggacataagccggttgccctcttggcatttctttcccttttttcttggcaacagaaccctgg

SEQ ID NO: 1884924 - DNA, 4001 bp, Homo sapiens
cctagactacacctaaccctcccctctcaacacctcttgttgaaggccctcccgtccaggtttccctacgaagtggaattatttttttttagagacaagatctctgttgcccaggctgtcctcgaactcctgggctcaagcagtcctcccatgtcagcctctagagcagctggaactattcgacacacaccaccacgcccaacgaagtgaatattttatataccagctggccggtattacaccattccatcccaaatctcccctccaaacttggtgaaaatcatctggccatttttacagattagtacgaaagcaaacaagctctcactctgtatgcccccagcacgaggctgtccacacggagcctttggacgagctgtacgaggggctggcagagactctgatggtcaaggagtccacccagggccaccggagctatttgctggtatgagaagggcaccctcctccccctcacagcccagatacccttcctgcacagaaaaagtgaaaacgtgggtgtgggttcaaatcctgactcacccattctgcagtcttagacatgaggtccattaaccttctttagcctcagtttccctgtctgtaaatcaagcacttcaacaacaacagcatgtctcgtggggttgttgggcatttgtccaataggtgacacacactacctgcttcacaaggacctggtgctcagtcctcaaagaatacttgacagggctggacatggtggctcatgcctgtaatcccagcactatgggaggccaaggtgggtggatctgaggtcaggagttcgagaccagcctggccaatatggtgaaaccctgtctctactaaaaatacaaaaattaggccaggcgtggtggctcatgcctgtaatcccagcactttgggaggctgaggcaaggggatcacctgaggtcaggagtttgagaccagcttggccaacatggtgaaactccatctttaccaaaaatacaaaaattagcggggtgtggtagtgggggcctgtaatcccagctactcgggaggctgaggcaggagaatctcttgaaccccggaggtggaggttgtagtgagccgagatcgcgctattgcactccggcctcggcaacgagagcgaatctatgtctaaaaaaaaagtataaaaattagccagacatggtggcacacgcctgtagtcacagctacttgggcaggtgaggcaggagaattgcttgaacccaggaggcagaggttgcagtgagccaagatcgtgccactgactccagcctaggtgacagagctcaaaaaaaaaaaaaaaagataaaacatagatacagaaaaccacaaaggaaaaacatagcatactgaatcatcacaaggcagccaccccttcatagccacacccggcctctggccaccactgacctgtgctccatcgccagaattccgttgtctcaggaatgttcgatgaatggaatcctgtgtggcctgagatgagtgtctttcatgccacgtgacaatcttgaggcccgtgaaagctgttggtatgtcaacagttagctgcttctcattgctgagtggcgattggtcctgtcatggtttattcagccatgtggtggatggctacttgtcttctaagccacttgccttctgatcgctggactgactctctcgccctctcttggtgcagccctcgggaggctcggtcacaatctccgagagcacagccatcatctctcacggtaccacaggcctggtcacatgggacgccaccctctgccttgcagaatgggccatcgagaacccagcagccttcactaacaggtgacctcggggcacagggcagggcaccaaggcaggcttaccctggtgcagtcgaagacacggtcccctttcctcccgccaggactgtcctagaacttggcagtggtgccggcctcacaggccttgccatctgcaagatgtgccgcccccgggcatacatcttcagcgaccctcacagccgggtcctcgagcagctccaagggaatgtctttctcaatggcctctcattagaggcagacatcactgccaacttagacagccccagggtgacagtggcccagctggactgggacgtagcgacggtccatcagctctctgccttccagccagatgttgtcattgcagcaggtaatgcccagccccgggcaccctgtgcaggcggtgtccttgcagctctacccagctcttggctctgggaaaagggaacaatggacgctgtcaggcatggacatgatggggcttccagaagagttactctgggcctccagggtgacatcaaaggacaggggtgcctcttaaggtgaccttcaagccacagccctcttggtggagacaggcatactcccgttacagtcgtcggcacatggctctgtcccagagccatgccctgtgtccttcagagaccacaggaggaaaacaaccacttctgggacgaggacaaggcccatgagagaaggtggtatttggctgggccaccgaaaacccctcacccctgcaagcacactcagtcccctctctggtgaagcagagctctgcctgtggtcctgggtcccagccctgaaacccacaggtccagcggtggccagggacacaggcccacccctgcaagccagcagaccaatcggcagacacctgaaacacgaatttcatggcagggtcaggctttctgtcattcaaagccctctagataggccaagaaccagagctggttttttaaggaacaccagtgagtctggagatttttttcttttgcttcggtcttttgcagctttctctactaagggttctcctttttcacccaagtaattgcctttccatctaatggcccaaatggtcaaatggcatctaatagtctcataggaccgctgcctctctggcctcgccctgctgctgaggtcagcatgaactggaactttccacttgtccctttcagtaacctgaagctttcaccgtagacgtgctgtattgcccagaagccatcgtgtcgctggtcggggtcctgcggaggctggctgcctgccaggagcacaagcgggctcctgaggtctacgtggcctttaccgtccgcaacccagagacgtgccagctgttcaccaccgagctaggtgagcccacacacccacccgggcctgcatggtccctgagctgtccctgcaggactccagtggaagtgaaagaactgggcaccggggaaaagctaggatgtcccacactcctacaccatgcagggaactcgggcacaggccggtgagcagggtgggcttggggcatggggtcttgcggcaggaggagggcagctcagcacagggagggagggtctgagcccagcagccctactatgtgcttcagagcacggttccctaagcccttgggcctcggtttcctcatctataaaatggaggtggtgggaggggcagtcggggtcagggctggacacagctgtggcctgcaggatgctggagcacaggctgtacaggcggatcctccacgccactgtcctgagcacccagttgatggaagacgagcagggtgactatagagaagggaaactggccccgtagtgggccagccactgtcctcagacctgacatttgtcagcccccagcacctgtgagggtgtgctgtcattgtcccatcacaccgacaaagacactgggacacacagaggccaagcgacccccgagctcccgcagactgcagcccggccacctggctctagtgcctccacactacacccaagccccccattgccaccagcctctgccccagctccccctgagcacagcccctcctggcagccatctgcacagatgcactcgcagcagcctctgcctgcacacagagacacagacgacccagtacctgcccacgtggggcagcccgttaactacagagtcaacaaacaagccagcacatgaaggcatactgggttccatgacagagtcccgcacaacctcgcacaggag

SEQ ID NO: 1884925 - DNA, 4001 bp, Homo sapiens
ggtagagatggggattcaccacgttggccaggctggtctcgaactccttacctcaaggatctgcccaccttggcttcccaaagtgctgggattacaggcatgagccaccgtgcccatccaaatctttcacatttttaaattttgtgaaatagctgtcctttttatatatgggtaagctatcaaacttaagatgctcacagccctttacatactttgtaggctgagattctgagtgtctaatattctgtaatgtatcttggtctctgtgctgcaagaacactgaagtattattataggtaacaatctatatcactcttctcaaacagcgctaacaggttaagtattcaagaggaacatctttcagtatatttcaaaaagcctcatggatggtaggtgatttgtaaatggaccaacgcaggactcaggcatatatggttactgcttactatttcctatagatcatgatgtcttaggtcttatgtagaatatatcataggacttgtcctctaaacattcacataccaagactgcactctgcatgcatgccattcactcattctgcatttactgagtcagtcctactgcatgtcagaccttgtgcctgttctcaagaagctcgcagtccaggaaaatggagaaatacagatacaattataactctatgtgataagtgttacaaagagatacggtgttatggaagccctggtaggggcacttagcccatactggagtggctgggatagggctgagtggccaacaatagggaagggttcacagtggaattgatgtctaggctaaataatgaataacaaataattagcaaggcaaggaaaaggtaggagatcaagacataaaaataaacagcatatggaaatacagggttgtatgtgagtacggcaagactggggagcctaagtggtttgctgtatatttaatttattcatttcacgtagctactattgacatacttgtctccctatatatgtttgagtccgtggatggtggggactttgtaatggtttctctgtccctatgtctaacaggaggcacacagatggagtgcaataaaatgtctgatgaataaatgaccagctatgaggtgtaagggagaataggaatccattaatgagaaaggtcatttctagtggcaatgaatatcagataagatagatttaagaattatttagaaattaggatgaataagacttggtgatatattggcgatggggtataaaataagaaacactggctttctaggtttctggattacagatgcatgataatagttataatggtataataacaatagctaatatttattaggcactctgtgtcatgaagtacgcaaagtgtttacatgaattaagccatttaaactcttaatgactcagtgaggcaggttctgtatactcattcactgatgagaaaattggggctagagagattcatttgcctaaggtcactcagctagcaggtggcaggctcaagcccagtaattctgactccaacaaccatacatatagtctacttttctttactgcctctaatagatgagattaatacccagaatgatggtcctattcaataagtgtatcacacaaatgcacgtttctcttttgctaaacatagagacacatactatgactacctctattattattatttttttttgatttttgggatcttggctctttctgtatttttcctacctggaagacctaaagtggggtagaagtttgataaaacagttggcacaaaagatgagagaagacaggtacagacatgacattctcgaacgctctggcagttgctggaatgatgggatctgggttctacaggattcctcccctcccatctcccgccacacacacacacgtcgtaaggtgtatatggccgcggagtctcaggttggttctaggagtcctcaacccacggcaaaggtgcctcttctccctcctggagagcccaacatgcttgaagttaacctgaggccgcctctcgggcccggcgaaacagagcgcgggcccgacgaaacagagcgcgggcccgacgaaacagagcgcagctccggctcgcgctggttcccagggaaaccgcccgcggaggaacctcgggccagggccgtgacacctgcgacgagccccgcctggcgccagggggcgcggaagcgcgtccgcccccaggccccatgccgggctcgccccgcccctgccggccacacccccctaccccgccctccctccgtgaggaccggccgctcccggctcccggcccccggccccgcttccggcgcaggcgcagtcccgcgttccctcggcggctgccggcgtagtgagcccgccgccgtggagtgtagcggaaagggctcgccgtcctcctccgtttctcgctgcttcgggacgcgctctctgcggctctgtgagcgcccctgagcgccggcagcggccgcggtgggttcttcaggtgagtgcggccgcgggagggagaggcccggagcgtagagcaccgcccccctcggcgcccgcgcgcccgcctctggcgagtcggccaggaggggcggccgcggcaggtgcaggtgctggcgccgtgcagggcgcggcacgcgggggttcggggggatgcccaggcccggtgagctcgctctccgcctgggcacttgggctccgggcccttgggggcggcgtgtgggggggactttggcgacccgggtcagccggccgccccctgggctgctggtgggcgtcgggcggcggctcctcccccgggcacgggcgcgttacacattaactgcgcggtcccgcgcgcccggggcagggagcccgagtccagcgggttacctggcggcgggcgggcgcggccgggagcggagggccgcggtcgcgaagaggatgaagagagagttcccgaacaagtcggaagcagctcacaacaccggacgccgcgcggcagggctgtggacctggggtggtttcgtgtcccagtcttaggaaactacgcgcgaggcaccgtgctgaggcgtagaggtcaccctcgggaggtttcggtgaaacctggtgggaaattccgggcaggcgcccggagtcgcgcccaagtaggcagctccgtgccgccagacttgtgttcgggggagttgagacgaactgcacgggtgggattgcatggctctgccctcccagcgttgacaactcgccccgaccgcccaggaagcgcgagcttactggctccagaagtgatgatgctgggtggaagtcgcagcatgtgaagagttgccggttgttatgggattaaaaaagatgaaagggtaaggtcttgaaagacacgagcgctgagttagttagtactgattactgagaggcaatttagtttcatggaaatgttgcctgttcggaggctacctgttatacactctcctgtttcaccccaactccttccgttcagtgtcgggttaaaagccttgtaatctcttgcagtggaatgattgcataattggaggaggggcccataagaggattacaacaaaactgttccattgtaaatcagttgaaagacccagttcttgttcattatcctttttctcattttgttgttcatgaaggtttttttttcttccagtgctgaatgacaaatcaaggagaaaagaggcagaatagggttgtagaccaatcgtagtaaatatttgatactgttaaatatttcaccagttttatggggccttgttctgttatcatttgttatttatttactagtactgtgcattttgataggacttttcatgtttggacagacagtgtattccagatgcggcttatgtgatctaatcctaaagcccttgtggaatttatagaaataaacagttatacaattaagtagtccattttttaactattaaatgaaaagccattgcatttttttccattacagtaatgttacatattaatgtatacctttgtgaaccaaagtgtttgatacaactcttccttctgtgtttggtaaacaactca

SEQ ID NO: 1884926 - DNA, 4001 bp, Homo sapiens
ggcccagtcagctgggcttgaactaggtggagggagcgagggcagttgtctgaactaaggcaggagcagtgggaagggcagtgaggtgaacatgaggttgaaatgacaggttctggtctttggctagatggggccggatgagggcagaagtctcccaggtttctggcttcagtggctggtgtaagtgttggtggagctgaacacaagggtggaggagcgatctcgggagaaagattatgagtcattgacaaatatggggcgtctccccagaccccactatttcatttcccactgcaccctcttatctagatccttggtatttttcactggttttgagacagtgccttcctgttgggtcttgtaaggtccagtctctcttcttgttggaagagcctgtgtattctttcactgcatgtttatgaatagccttcccgggccaggcactgtgatgagttccttctcccatacagctcatggcctggtacagggggagaaggtgaaggaagagatagatggtgaggctgatggttgtagtccaatatgcagtgtggtctcataagtgaagaacaggctgcaaggagaacattccaggacaggcctgcgatctggacttcagtgttgaggtggtttcctaaagaaattgtctgggctcagctggatgtgcaagggctcctgagtgacaggctgtggagaggggcttctctggggctggaaggagccagtgcagtgcccgaccctgtggcatagaacgtgagaagtgggcagcctctgcttgagaggatgccgagggtggtcagcaaggataactaacggtggcagggcctgacggggtcagcttgcaccaagttgggtggagaacgagtagctccaggcctcccacagtggacagatcctcaggcctggaggggtgtccttctgaaggagcattcccagtctctgacgaatgaggcctgggtctctggctggagttggagtgggtctgtgtctggagggggcacttgggctctggaaagaggctacaaactctagactaggctgggcaaactatggccagctcctgttttatcagaatgcacctttatattctccttcatgtatgtattgtccatggttgctttagtgagttgagtggttgcaacagagatcacatggcctgcaaagcttcaaacatttcctaactggctttttatggaaaaggtttcccaagccctgctctaaactggcaggcaactttctcagagatagttcaggcctagtctccatgtgtggacaagatgagcccataccgtgaagctggatctcccaaaacgcacatctgtctcaggtcttataaagctgtgaatcattaagtgtgtgaacatacatgtggtcatgtgtgaatatgcatgtggtcacctgagcacacatatggtcgtatattaacatgcatgtggtcacatgtgaatgtgcatatggtggcatgtaagatgcacatggtcatgtgaacatgcatatggctgtgtgaatatacatatggtcctgtgaacatacatatagttgtgtgtgaacatgcacgtggttatgtgtgaacatgcatatggttgtgggaacatagatatggtcatgtgagaacatgcatgtggtttgtttgacgcatgtggtcatgtgatgtgagcttgaggtgcaccgtcaggctgggatgggccttcccagggtggactcagccccttgctgcaagagaccacttcctgaatcctggtcctaagcctgtgagcctttgctcggcaccaagaagcaactctgttgataccgactgagattcagatgcctgaacctgaccttctacacacgtggccctagtggatcattccagcctcagtttccatgtctccccaaatgcctgctaaatgtgtcagccaaacctgactacttcccattctgcacacataccttctccaccttggtggccgaatcctttggagcccacctctcacattcagctcccggttcttggttatttgggctcctgtctcgtgtgctctatcaggttctaggctttgcaggagtgagttctgtctccactcgtttctatgtgcctcgtaggactggctcttgggagggtcttcatggtgactgaggccatggatccttagccctgtagcttgaattcacttggcactcaaacactcatcctgaaatgatgctctgaaagtgatgcttccagtcagttaaggatccactgtattatggatctccagcacccaatgcctggcacataagaaatgaatgaaaagtagtgaatgatctcaagtatgtctacaaggcgagaggaaagtgatcctattcaccagacatgctagggaggcatttggcgctgttggctctgctgttgcacaataggcctgggactctgaaggctggcacttcctcatcctaaacctcaaattttaatgaattacctccaagtgggcaaaggtccatgggccagggttcttggtgtaaataacccacctcttttgggtgtggttaatggacagggactatacaaaactaaaaacaatgtttgaatgctgacttcctgtcagccatggtgatgaagcactctgtatacatgaccttattcaatgctcactacaaacccatgaagcagatttttagaaaaactttccatttggagcattttaaacaagaggatagtgtaatgagctttcacctccttatcagcagatttaaatatttgttaactcatggcccatcttgtttcctgtatactcccacccacttatccccctctcttgttgttttaaagcaaatcccggacattatgtaatttcatctgtgaatatcttagtatgtatctgtaaaagaaagggactaattttttgttgtttttgaaacagggtctctgttgcccaggctggagtgctgtggtgtgatcatggttcactacagcctcaacctcctgggctcaagaaatcctcccaccttagcctcctgaatagttgggattgcagatgcacatcaccaggcccagataatttttttatttctatttttgtagagatagggcctttctatgttgcctgggctagtctagaactcttgatctcaagtgatcttcctgccctggcctcccaatgtgctgggattataggcatgagacaccatacccagtgataagaacttattatttatttatttatttttgagacagagtcttgctctgtcatccatgctggaatgcagtggcggaatctcagttcactgcaacgtccgcctcctgggttcaagtgattctcctgcttcagctgcacgagtagctgggattacaggtatgtgccaccacatctggctaatttttttgtattttttttttttttagtagaaatggggttttgccatgttggctaggctggtcatgaactcctggcctcgaatgagcctcccgccttagcatcccaaagtgctgggattacaggcatgagccaccgtgcccagccaagaactcttttaaaaaaaaaacaaaattgcaataccattatcataccaaccatcgcacactactattctttaatactaccaactaccctactgtctccaaatttccagtaatttcatttttttgttagtttgtttgaatcaaaatccaaataaagtctctccttatgattgtttgatttgcctgttagtatttctggatctataggtttctcctttcatcaattgtttctcctttgcaatttatttattgaagaaacaagactgtttccctgtatttcagatcttgctaaatgtatcctcattatggcgtttctcatagtttggattttgctaattgtatccttgtggtgtttaacttggtcttcactttgttctctctatttactataaattagtggtacgatctaaaaacttggtcagaggcaggttggatttgtggggcagggtaaaaatactttgctaggttcttccatcaggaggtgtgtactgtccggcatatatatatatatatatatatatat

SEQ ID NO: 1884927 - DNA, 4001 bp, Homo sapiens
cctcctggtctcagttaatgtacaccttggtagccactttaataagctgagtagcattcacacctacggagcttctaacttctgcaatttatgcctgatatctccttgggcctgccttacaaatgccgtatttactattcactgattttcagcagcctcggggttaaacagagtgtacaagcaaaatgcctataaaactggctggtgcttttatctgcaccatggagcacttctgagatttttttatattggttgccttttccttttaacatcctttagcctttgtaaaagtgcttctcggcacttttgtaggtgctgaagctggactgcatcgtctgggtcctagtgggggtctgcttgtcctcttaagaggcagaagcataacttgggcatgacttgacctgagacggcctgcctacctttttgagcctttcgttttaacttcctggagctccgatttctccttctcaggtgagagtgggagcatgtatctgtttgaacttacctccttaggggcaattagccttggtaaggggggatagattggaatataggtaggaaggatctctattccatcctgtgattcttgcaaaactggttttctctttcctgagactcttttttttttttggtctgcatagcttccagggcagctgactttcactttcacttttggatcggtggtgctagaagcctctgtgactttccctttaactccgtagctgccagcacagttggtttatctcggcgtgagctgcgagcattctacaataaactgctaggcagggctgcgtacatttagccatgagtcaatataaagactaggtctgaatgccctggctgtcctccgaccctagtcaccaccttaaaacacacggccaatttctctacagtgccttcggccagccatctgacactaaaagagggctattgtaattcacagtatgtctttaacttttgaacatccagtttcatcccacaatcacctctaaatcctttctttaaaatttttatcatgcactccaaaggagttggttttgacgctttccctcccatttcctcccttgcggcacactctcactctcactctcactttcactctcaggtccagcagacccggtcctattacaggagtttcggacactgcttagccaggaaggtgtcttcccctgtcacagcctgctacagctgcaaagctcgtcctatcagctgtatgcaatgtcctaggtctgatttccccccacactcgcctcagagcacacagcccgtgctaagggatctgtgcctccccacgtcactccctgcattggcctctcccgagaccatcgctttcacacactttcacacaccttccttgccccaggattcctcattggacgaaatgagcctctctcatgtcccgggtgagtctagttaggctcccactttcacacacatacaccactcctactgcaggagtcctcatcggatggaatgagcctctctcatgacctgggtgagcctagttaggctcccatattcacacacatacacacaccactcccagttcctgtctccagatccagtgaaccactttcactttgttagtggggacataagcttcatccaaattggcaggccactcctgctgcccccagccactctgggttggattagtggtcagtccctgggaggtgatcaagctcccctttgtccctatgggacgggctttcctgccttgggcctatactccttaccacagttcctgaagtgctggtatcgtcctgcagccccatcctcggttccattgcgctgccaggcagggtgctgggacgtggggagagctggtctatatatccgggtgaagctcagctgtggcacaccttggatgccgggtctctcctggccccggggacctagtatcgcaggcaaaggggacagtaaatctgtcatctccaatcctgatgagcccccagaaatgtatcgggatatataaggaatcagagagaccaagggattgaggaggatatttattatttaggtgcactggtccacttggattaacatccaaaggactgagccccaaacaaagagtcaagttaccttttaagcatttcgtgggtgggggaagatttgtgcagggggaagcgtataacagaagcaagaaacaaagacagttattcaattgagacatacatgacatcatttcttttcaaggaaaaacatgttttatgacttgagtttatctgtctagtgaccttgcagctgcacagctagagaaatagggtcttcataatgcctgggaaagggagagataaggctcactagccacagaaaacaggcagttaatttttaaaggactccggctctttctcttcctcaggggggaattgggttttcttatatacaactgagtttttgcttacacattctgtaatttattttaattcctgttccatgccagccacctatgctgctgttttccccctccttcccctttccctagggaagggactggtggcagtggggctattctttcttcccccaagaagaaaggaaaggggggttctgaatatttttcttactactgggagtttgtgtgaggttcaacgcccccctcccatggggattcctcacctctttctgaggttcaacccgcctcatggggatttctcacctctttctgaggttcaacaccccttctatggggatttctcacctatttttaacctccaagacatcccgactaaggaataatctactgaccctgcagtttctctctccttggtacgtcctaactaaggaatgctttaccgtcctgtggctttttttttttttttttttttagtcccgatcaccaaggaaatactttattggctcccacagcttcttctttcttggcctgtgcacaaagttgtcgccacagtatgtgaggatcctttaagctaggttgctggccagtttcttttttttttttttctctctgtgttgctgagagtctgggtttatttgtctcaatttgtcattcctgagggccccttcaatgaggtaggggagtgcactccctcatgagagaggactggagaccacccctggaggagaatgtatccccatacagactgccaccaaattgtttgaaatgcttgttccccagtgccataaaaaaatagcacttgaacatagatttatttagtgtggccattttttttttttacttcctgcagaaagggtatactcatcagcagttttgccacgagtgtacaccaaacaaaggagacagcatcatttataacctgccgcatccaccctactgctgtatccagtttccattgactggaacaggacctcacattctgtatttgtcccgactggctagcaatttagaactttttaaaagaggcaaaggtagaggagaacaaaggaaggaggaagtaacttgtggaatgctgagaaaggtaaaaacacttttaaataaggaagaggaacaggctatgacctaatgcttgcttggaccagtataagcatgccagggcaaatatttaggagcacaggtctttgaataaattttgcttctaagagaagttactatttattcctaattagttagggaggaaagtctttgaagagcaacctctactttactttttacagaataaatgcaggcaaaaagaacataaactttgccatgggcagaatgttatggacagaatgtttctgtttccctgaaattcatatttgaaatcctaactcccaatggtatagtattaggaggtgcctttgggaggtaatttaggtgtgaaagttgattataaaaattgagtaattcttttcataactaaataaaacagagtggagaatccagtgggaaaacattctgggtacaaagcattgctccaagaatgtaattatctgcaagcctggctgctgaaactgcctgttgtaaccagaaaccagttttatctgtagcttctgaagtagcttactgcaactctagaactaatgtttgctcacactgttgtcac

SEQ ID NO: 1884928 - DNA, 4001 bp, Homo sapiens
aattcactccagacgataattcaattttgagagttctcaggagcatataatgaagaatattgatctgattgaaaagctcatgaatagaaggaatggattttctcatgcaaagaaaaagcacctaagaggaggagatgggagcaacataaagtttttgaaaggattgtacgtcttgtaaaagaattacagtcttatgttactaactaattatggtaatttccagcaggaattacaccttttccatgagctaaataaataaaatgccaaatgatcatattcagtcatatgaaattttattcaaaattatatcctttctttttcaatttcatatttggattttggcagtagtctgtatccagttataaagtgtgagaacttagaagaacaatggttttattcttctcttctcatttggaagtctcatgctttggtcaattctacatttacaaatcagcttttccattcctttacatttgaactgaattcaagtccttattaccatttaaatatatagaaagatacaatcattactgttctcaccttcagtttattattcccacttccaatccattttttattgcccacaggttaatctcatagtttaattgtgtgtccttctgcatacagaaagatgaaacaacttttcattactcattcattccccaaatcataatctgtcatttcttctctgtgatagattactaaagggcgacaaggcttcatcctccttatcttcataccttttgtaatgtgatttttttagctctttttctcaagaaaatttttttagctctttttctccacctagggatttgctttgttaggtagaaagctctaaaagtaacagtttgtcaattccaaatccaggcctcaagagagactttgcatgcttttgatctttctgtatcctgacatcatcatatgaataaacttattagatgatgagtcatttccattgacccagttgaaagcagacctcacattaaacatatgagtgaggctatcctagaccagggagtccctaccaacttatcatctgaccacacttgcatatgtgagcccagccaaggtcaggcaagctcagcccagatgagcaaaaccacctagaacagcaggaccatctagattagacaaagactcatatacagtaatagaatcttgtggtttaaaccactaagttttagggtgatttttttatgcatcagtaagtaaatgatacacagcccttcagaatctggacacagtataagaccttaatataccctaacatttggaatgttttttgcatctcagttacacctgttgaaatggattcttcaaggacaactggcaaatctacttagttaccggagctgctatctaactactggaattcctattagattctaattgatactggatgctgtttttcattaagttttgcaagatagttttcatacctcttttataatccagtgtttctttactttgaatcttttttacctgaggtaacctaaatatagctatttcaaagaaactaatataataatagtgtagatttattaagatgattgaatagcaccggtcctaaaggactgaccagtaaccatgtggaatgtgtaaggaatggttataggtaaaagaaaggagccttttactcttttatgcatgtacctaaaaaactgctagactttttaggaaaataaagattgcacccgaatcagatgattcaagaaataggatttagtaaaatcaaaagtatattcaccaagaggtttttcttctaatatgacttatgttcacacatgttgaaaacagaaggactcgccaggcgcaggggatcacgcctgtaatcccagcactttaggaggccgaagcgggtggatcacgaggtcaggaaatcgagaccatcctggcaaacacggtgaaacccagtctctactaaaaaaaatacaaaaaattagcccggcgtggtggcaggcgcctatagtcccagctacttgggaggctgaggcagaagaatggcgtgaacccaggaggcggagcttgcagtcagccgagatggcgccacggcactccagcctgggcgacagagagagactccgactccgtctcaaaaaaaaaaaagaaaaagaaaatagaaggactcaatgctgcacaatgtatcaattatttgtcaatatgtaactgtgtatctaaaattttgattttgccattataaactattgatttaagattggcagattatattaggtctaaaataatttgattctcaaacatatacttataataaagatgcactctacaaaagatttgaggaaaaaacaaaattatattgaacatggaacaacatctggaaatatatctggtattaagaactggaaatatttgaagtataatggcatttttaaataaagtggttatattgcatttttaaagcatttttaatgctatcactaaagttatattttgagaagtggtgtttatttttgatagactagaaataatccttatagagttcaatgtcttcatcataagttgataagaaaaataaagagcaactggtacatgtctgagaatctgaaagagtagttatcatatagacttttggaacccatgcaaaatatgttcttaggtgtaaatgttttgaatgcctttatgtgtttattgcttcataagcattttattatttaccctagaatgatatgagctatatcacaattattattgcttgttaagctctgcttcaccctgcagaatttttgcactaatgttttttggcttgtattgtatactaacatgtcatgtgagatatattgattcatgcattcaacaaataattattgagcaaaaaatctaagcaatatgctccactaggtctaggatttatagccctcagagagcttatattctagcatgaaaaaaaaaataaaccagcaaacaaaacaattgaatgtgcaaaagggtgaggaatgtataaataaatggtgagaaacaagataaggggaatacagaatggtacttgtcaggcaaggaactgttaacacctgatgaaagtgctgaaaagagcctatagagatgttaaggaaggatgttccatgaagaacagactcattatagataagaaatcaaaagaaggttgaaataagaaatcagtagaatatgtcattagagaagtgaggaaatttcactggaccctttagatcactgtatggaatttgacttctattgcaagtgccatgggaagccatttgattgttcggttaaggggaaacatagaaccttacttatggtcagtcatcagtgctgtgaggacaagggtgaaagaatgaaaacattaagaagctattgtcataatacaggtaagagttaatttcagctcagatgtgtgatacagtagcagctgatatggtgggaagtggttgattctggatatcttttgaagatagaagtaagatttgttaatggattagatggagtttgtgaactatagtctagtcaagaaaaatgaagaggagaaaggaacaaaagtagcaaaggaaagaagggcatcgattgttaactgagtatattaattgcagttcattttaagtgcaactttttcttataattgaactaatacaaaggccacaattttgtagtaaactcaattttaaattcaagtataatatcttgagtacttttttcaggaaaccattttaatgatacttaaatttccatgataagatgctgctaatattatttcatgatttcactatttctgtaccattattttatatttaactcttttgctattataaacatccatacttttggtactttatgggtagtttttatccacatttatgattatttcattaagatagattcccatgagtctttttcaaaacttaaaatggaactcttgagttaaagagtataaacatacctgaaactagtaataagcattgccagattgtcttacagaaagtctcacccattcacatcttatcattgttgtacagcttataaattacattgcc

SEQ ID NO: 1884929 - DNA, 4001 bp, Homo sapiens
gatattcaaaggaaaaaacataaacattactgaagggcataaggacataaataagtgaaatgataagttattttcaagaatgagaagcaagagtattgtaaagatattaattcccctggaatcctccaaatttagtgaaattctaatctaaaatcgtaacagaattgttccatgaaatttacaaactgatcctaaaattaatctaaaagtttcaatgagtgatcactgtgtacttcaaggacaacgatctcaactcaaagaatttaagattctagctgtaacatgaaaaaatacggttaaatgcgtggctgatctggtaaaaataaaaggaaatgttcatagatttaacaaaaataaatagaaagcaaaaatccaggagggaagtaaagcctgaaatttggtcctgtcctaagggtatatgtaaatcaaggataatctgagccttcattgatatagcacatgaggacaaaggacagccacaaagtccacattcaagttggactaatgaacaaacattcgtcaaattggagactaattcatagaaactcctccagcacacatgcacctcggatacaataaaactacaccctggttgtgatggagagctacaagcaaacaaacaagccaacaaaaagggaacaacaaatgtattaaaggtttcaacctcggaaatgaggggagagagggaaaatcattgccattaagaattcataaccataagccagccttcaaacatgtttgcaacatttagtccccaaaacttcaacctgaaaatttattttaaagtgataccttcagtttgcatgtaagatgcaaaggaaaacctttcctgtagaggaaagcaacttccacacagatcccaaggaatacttatagataaaatcctcccagcagaaggttataggggaattaaacacacacgtacttaggatgcacacacatgcacagtgaggaaacaggttgccacaagtaaacacctgtagaaacaaaacacaataatctgccactacctaaaataggccatagatttttttttctgcttgtttgggaagatagaaatatgatagaaaggggaagagaaaacagggatgcccacgatggatccagaaataagtattaatcatgtatgtgttgggaattggagtgctcttagtaatccaattaagacattaaaataattcatatatgtcaatgatatgagcctcagaaagaacagcaagagttactatggcctgaaaggctcagaagcaagcaggacttaaattgggcttagaggaagtaagatttgcacagtttctgagaaatgaagggatatttcaggaagtaggagaaatacacaaaggtggacattctcaaggagtctccgcaaatagggacaggcctttggacaatcacgcaatacttccacaaaaaagaatggcagaaaatacttctaaaggaagatgattgacaacctccagaaaatagactagaaaggggcaggatcacatgtaaacacagtgccataaggccagttggtcaattgattaattatgtactacttataaaataagtaaatactgagaaataattagctaattgtaaaaacaaacatctattatccaattgggcaagtgggaactatgtttgattggaagtcaggagaccttaaattctcttcctaaatttaccactgaccagttttgaaattaaagctacctgggaatcagtttttatattgaaaattggggaggaggaaggtctacggagaagggcagattaattaatgatctcacttatgaacgcagctctacaactttacaaaaccaaaagaatgaagaacggtgctcattcctccggtgctcaaaagagggcgcccacaagagcagcagagatttactggaaccgatttactgaaaatccccgttttcatttcccggtctgagtttcattacccaagaaatccacagggtggcgataacactgaacggaatgtgaattcagagtggaaattctcagaaaccgtattcttcaacggccagtgtttacagatttccctttccctgattttatgatgtcaccaatgacacagaagctggcgaaacgcgtgaaggccgtacacaaggcaatgacggtgatggcaatgattcccacgggagaaccaactgtgatccagacctttggcaatcctcacagtaatgcaaaggagactttaccattctcttcctcattttacagaaaaagaactagaaagggagaaatcaagtaaattatccaaggtaactgaggtagtgagtgacctcggcggaattcaaaccttagtctagggtcagtgtcatggttctttcatcacagcccgctgacagctctgaagaaagcctgtttgactaacacaaagtggcctttcttcctaaccatcttcctcactgatatagaaaggagaaattttgccatttttttcataactgaaaagaagccttaaaagattctattcatctttagcacaggataatattagtaactctttaagccactattaaataatgattgtatagctacagcagtttcaattttagtgtttatatcagggtcactgacttttcttccctaatgcttaaatggggcaggaacatttcttcattgaatgtcacgttaaggtgtgttgaattagaaataacagaattctcttcaaattgagttaaagggaggaaaaagatggcttttcagtgtaattacgggtcatttcaaagaaaacaagaagtttctttaagtgatacaggagattagaatcaacaactggaaaactataagaattacacagttgttcaaacttttttctttccacattctctagtccatggttttcttgatatctttggactattgcctctttctattggctgactttctcctctctagacccgacagctcctgaattcccacatcctcagcttaagtgactatcagagactgacttatatctgtgaattttggctcctaacctctgagaaagagaattcaatatggcctggcaacagctgtcaagcagctaaacataaacaagggtgatgattatcaaagcagtatgtactgaaaaacacagacaccccaggagacatatgttatgactggctaaatgtctttttgagaagttaaaaagaaataattcatttcctggatgatcaggatgaaattctaaaccatttggcatgtccacatttccccctgtatctatggtaataacactcataaaaccataatttgggatacagattttaacagtttttccaaatatttaaagataggccaaaattataatattctgaattcatatttccatctatacctcagtctgactatttttagaataaatttttttttaaatgtaccttgctgggtggagcctataatcccaacactttgggaggctgaggcaggtggatcactgtgaatccaggagaccagttggagaccagcctgggcaacatagcgagaccctgtctctacaaaaaaattaaaaactagccaggtgcaatggcacaagcttgtagacataactacatgggaggctgaggtgaaatgatttgtttgagcccaagagttcacggctgcagtgagctatgatcattacgctgcgttccagcctaggagacacagtgcgacccaagatggagtcactgatatatgttaccatttgcgacgagtacttttttcctggaaaacagtcctcacataataaagcagggccaggcaaggtggctcatgcctgtaattccagcatttttggaggctgaggtggaaagactgcttgagcccaggaggctgaggctgcagtgagccatgattgtgccactgcactacagcctgggtgacagagcaagactttatccaaagatagctgaataggaacagctccagtccgcagctcctagcatgatcgacacagaagacaggtgatttctgcatttccaactgaggtacctggttcatctcactgggactggttggacagtgggtgcagc

SEQ ID NO: 1884930 - DNA, 4001 bp, Homo sapiens
ttaacgtggctgctgctcgtattgaccaggtgataggcatagaagaccatgtctggtgaaacctttgcactgcgtgtgtgccagctacctgcatcattattccagcagctgtcctcgtaacgtcgggaaacattttacaacctgcattttataagcagaagaatacggcattttcaggagggacacgggaatggctattgatcaaaaacagaccagggtttatcacactggctgcatagtaatcacctcccggatgattaaaaacagcctcccaggctctgtctcagaacaggtgatacgtatctacggtaaacgccccgcagacagctgcctccgtcccagtgccgggtcctgcctggttctgatcctctggatttcctgggataaacatcctgaggaagaaaagaatggctcaacaaagaaaggagaaatgggtgttcggctcgcccagcctcagccaaggggcagaaaacctccaagctggataggctgtcatgcccgatgccaagaaacggatatttgaagaatagagtactaagctcagagccagaaccccccagatccccctacacacatgtgcatacacagacacacacacacaggcacatgcacacacagatatacatacaaacacacacatagacacatgaacacatgaacaaatgcagatatgaacacacagacatgcacacatttgaacatgcacagaccacacacatgaacagacatacatacacagaaacatgcacacacagagacacatggagagaaacatgcatacatgtgaacatgcacagacatgaacacacatgaacacagagacatatatacatagaaacatgcacatatgaacacacaaacacagacatgcacacacagacacacagacactcgtacacagatacacagacaaatgcacacatggacacacaaacacagacacatagatgcacacagatatagagacacatgcacacatgaacaaacagagatgaacacagagatatgcacacatgtgaacacacacacagacatacatagacacatacacaaatacacacaggcacagacagacacatgcacacgcatgaacacacacagagacaatgcacacagacacaggcacatgcacacacagatacatgcacacacgggcacacagacatgcacacagaaacacgtggacacatgcacatgcatgcgtgctgacaacacagacatgcacatatgcagatacacaggcacacagaggcaaatgcatgcacactcatgcacacacacggacacacacacagccaagagctgtgaagccccttgccttactcatctctgtatggagagccaagcacagccatgctcttaataaatgctccgtcatttattcactcatcccgcaaatgtttactgaacaccagctatgtgtccaatctctgggaacacaggggtgaaccctgcctttgggtgaaactcctgcctcttgggtgcttgcattctgccagtggaagttgggcccctgtgctgcgcggcttggctgacatctcccctggcttccagggtctcctccacaaaacgccagtgtggggccagatcagagcctgggctgggggtgggggcagccggggtttgcggcctcgggtcttacctgcgagcctggctcagggacggggccttctccctcctggtggctccagggccccctgctgttcccggaggtccggctgcatcccaagccccaacccccccatacccgtcccgggactcagcttccccagtcctcagccctggacgggggagagggagggaggccgggagctcggcttggggaggggtgggcaggagactaccagagtggccctgacccgggtcctgccccggccgccccctcccccattcactcccggcgacaccgccctggccaggcattcccggaggccccgctgccctcgggtcaagcttggggtcgattcggaccgtgctggccgttgggggccccgggcgtctggcgggtcctggggagggagggtccgcgcctgccccgcccccgctccccgcgcccgcgcgcccttggcccaggctaccccgcgcgccccgccccccgtcccccgccccccggacctgctgtcctggggtccccgggggggcgcggtggggggggcggggcaggcgcgcggggcggtcccggggggcggccttgaggggtgggggaggcggggcggggcggtcctggggccgcggttgcagatgaggtgaggtgaggccgcgtcactctgcaccggcgcggtggctgcggggcgggcaggacaggagccggcacagacaccgagcgccgcccgcccgcgccttccccgccgccccccggcgcccccggcccccctcaccgctccccggggcggggccgcgccctctgagcgggggatgccggccgcgccccgcgaccccagccccgggcagccctctgcgctctgggggacccccggcggccgtggcccggcgcgctgagctggtgctgaagggacagctccggccgagccccgcagcccccgcagccccgggcggctcatggtccccgaagccgaagctgaagcccaggcccgggcggggatgctggggatgccccgcgggtgaggcccccgctgcagccgtgttcatggcggtggccaggaagatccgaactttgctgacggtgaacatcctggtgttcgtgggcatcgtcctgttctccgtgtactgccgcctgcagggccgctcccaggagctcgtgcgcatcgtgagcggcgaccgccgggtgcgcagccgacacgccaaggtgggcacgctgggggaccgtgaggccatcctgcagcgcctggaccacctggaggaggtggtctacaaccagctcaacggtgagcgggggcgccggggcggagtgggggcagccctgcccgggacagtggccaccccgggcgcgatgggtcaggccggcctcgggtgcgcgcccctctgcgcccctgtgggagggaatatacaggagagaggagagggaagggccgcggaagccccttcagcagcgggcagcaacctgggttccccccgcaccgggcacccacccctccagtggagacttgaggaatccccctgcccccacaatgacgcaaacttgctctccgagggaacttctgcagaggatctttggagctgctctagaagcaggcagtgcctaggtccaggagtgtggggtggggggctggcttggcgctccaggagtgggggccgtcaggtttaggctgcgccgacccctccactcttgaaggtggggaaagaggagggtggggacgccacacttgggaggctgctggtgcagtgtcctttgcccctgaggttcgaaggcaccccaaatgcttcgaccactgggctaggcggccccctgtcctgggggtgcccgaggccgcgttagaaagttgttatgggagaagcttgaagctgagacctgagactcctgggaggatggagttgaggatcatgcagggcttggcaggactcattacccaggggggcccaagttgtggcacctgggagccccagaatccatgaaagcctccagctcccggtgggtctgtttcatcacgagcggacgtaggtcagcccgaggagcagcaccggcatcaccacaggtcagggccagcggccacagctgctgagagcaagcacttttccagctgctccaccttcccggaggagcagccgcccccaaggccactctgcaccggggcgccaggaaggagaaagtttgcatgtgcctacatcactagctggtgtggctttccgttccgtgccgatgattcaggcttctgccttggcagccccagcaaacctcctccagaaagcatccgtaacaggctcgagtgggaggtgacgggagctggggttacgcgggcaggcgggggctccggatgtgcctgctgtgtgtgggggcaaaggcggggggtggtcttgcgtttccttcaggagccacaccctct

SEQ ID NO: 1884931 - DNA, 4001 bp, Homo sapiens
cagaaaggactataactcaaaatataggcaacctggaatatgtatggcaatttttattttctatacctacacatatacatacatttgcatctatgtatatatagagagggagacagacacagatggagagagattgatttaatttacttaggctcaatactacttattgagatgaatgatagaactctatcctacttcagcattgctcagcactgatggcagaggctgcatctgaagatgaggctgggaatgaaaacggcagctaaggagtggctaaaggactggcagaaatgatgagatccaggagatacagaatcagcagggcctttggcatcagccaagccacacaacacattttcaaggtacattgtaagctattggcatcctcaagttaggagaggccttggggaaggggaggaaagtaggaatccaggaataacaatgcaataatgggtgaggactcagaaaattgtaattatcctcatactcatggtactctctgagactgctggcatggtttagggaaacaagggttatacatgcattcacagtgatttgaatctgctatactccagctgtaccaacacagagccagtgaaatggaccacagtatggaaaatatagtgtgtgatttacttctgtcaacttgtaaagctgagacagatttctgcagctgcattggacaagctgcgatccattgagctcattaagatgtcaatgaccaatcacagggactgtgtttttcagcaacccacttgggaagtatcccccttctcgctgtgggcccataaaacgtgggggtttctagatgaggtgcacaactctatccacaatcctgaagtgtagaaccttctgaagtccgttaaaacaaatttttttgaacaaatttggtgattgaacagatgtatgtccactcccaatttttatctcacttattgcgaatagccatacgttttgctgctcaaatttaatggtggggtgctgccccaggaaatgctggaagtattgcatagtgtatgggaaatgctccaaattgcctttctaaaaccctaaaccttttgagttctgaagcccatctggcctttggagctttagataagggattgtgtacctgtgttttatttttctcccatagagacagtcttgttttgcgtttagaagcattttgtagtaattattctttctattaaccctctctaaacagagagttgtgtttccacttttaaactcacttgtaatcgcacatttccatgccaattcaaaataaaaaaaataagttattgtagataataccaagtggttaatatatgctagacccctgtgctaaaacctttagaattgttttctcttagtgacaatgtaacagggcctaggccctggcatcctagtagaactaccatgaatacatccttacattcttcttggttcctcgctgaccacagtcactgaatcttctctggacctctgccttagtattgctgactagctccaacagcttctacagagggtccaacctgactctatggcattcctgagcctctcacagcaccttgtcctttcccttcatagcatttatcacattcacaattgtattttattgctctgtttaatgccattctccccacacccttgccccatattaaatccccacaggtgtgggctgtatctagtttagtcaccatggtgtctggtgtataataactggtttcagttgattattgccacataataacacaccacccccaaatgtagtggcttaaaatatattgttttcaccattctgtgggttgctgggcagctcctcttctgccttcacttgatttcacttattcagccagatggtcgtctgggcggggaaatccaagatggtctcacttacatgtctggcagtcagtgttggatgctgcctaggttggcttcctttcgtgaaggtttcaagagagcaacagaggaagtgtcagggcctcttgtggcccaggattaaaaactcatgccctgtcccttctaccacattctactggtcaaataagtcacaatgccagtcaagattgaaagggatatagacatatatcctgtctttggatgaaaggagaagccaaagggcatgcatattgggatgggtggaatttgtggctatcaaaccacaaatttaccacactccattttctggccacaaattaatcatttttgcacatggaaagtacgcttactcctatcacaataattgcaaaagttttatcccaggtattgcatcaggctggaaatccacaagtttgagcttcccctctggtccagatacaaaggaggtttctctgtggagctccttggctttcatgatccagagttctgtgaaccaaaactacaaggcttttaccctcttttattcaaatatctaagatgaaatggtgagacaaagaaaaaataaccacaatgaataatcctcttttttaaaaagagaaaggactgggagcacatagcaatcaatggtctgaagcaattgtgaaatccaaacaggtacatgtccagggacagggaatgttccctgattagggcctatttcttatctcttggagtggctctctaattaattttgttttttggattttgggtccacactctggatggtttgcttagcctccgagagatccttctttttctgtaagaaagaaatagcccatgactgcatctaagtagttttctcaactcactttttgtctgtaggaaattgatggcatggagtcttcttgaactgtctctgtcccttttaatccaaatcaatatagttcctttaaaattccttatgggatttctatggatcagattaaattctactctgttagatgacagccaggcttactattcttgtcaaggtaggcctctctctaatttggatgatgggcctatttgagtgatgggtctggattcatagacaatcatttgtttagatgagaggtctactaaatactctataagaaatcattctgggttattttgttagggcctaacagccacatccttctatttgatcttaccattgaggccacattttattgactgtcttctggaattaaatttttacctatattaaaattttctttgataatctttttcaatccagctcatcctgggttttctatattttctctaaattctgcttgcaaattgaaaagttgcttttttaattaatctctcttcccacataatatggttttggtatgtccccgcccaaatctcatcttcaattgtagtttccataatccccacgtgttatgggggagggaccaggtggagataattgaatgatgggggcagcttcccccatcctgttctcatgatactgacttcgttctcacaagatctgatggttttataagggattttccccttcactggtcattcattctccttcctgctgccatgtgaagaaggatgtgtttgcttccccttccaccacgattgtaagtttcctgaggcctcatgtgtcaattaaacctctttcctttataaattattcagtctcaggtatgtctttattagcagcatcagaatggacaaatacagcacactttattatacacagctatacaaagttgattcacatttgttgcatgcatcctggaaatctcccagccagatccgtgagtttaagaaaagtttctactttccaggttgcagcaggcaacattttgctgattctttggccactatataacaagggtggccctttctccaccctccaatagaaatttccttattaacttcccagtatctactaatcattgtttcactgcctctttagctaccaatcactcccatcaccaaagccaacagtatatgttttagatttttattatgacagcacctgacctctatgcaccaatttctgttttagttaacaatttcaatgtaacaaaccacccaccaacccagtggcttaaaaaacaatgatttcttatttcctgtacagttcttcaggcaggctgggatattcatctgctggt

SEQ ID NO: 1884932 - DNA, 4001 bp, Homo sapiens
taaggctactaaaaaataattaaaaaaaccttgagagatttaaaaattacatctttacaaattcctcattcaaagatgctgatttaactgttattgggtaagatactagtattttttaagagtatataagacaattatagtacacatttaggaatgagaactactggttaatgacaatactaagtatgttattgtaacaaaattttatgaagaaatgtctaggtattggggtttggctggttatctgaattagtcagaaatggtccagggctatgaaactatgatatattttattaattatttgattttttatggcatgaatttttttttttttttatgagatggagtctcactctgtcacccaggctggagtgcagtggcataatctcagctcactgcaacctctgcctcccaggttcaaatgattttcttgcctcagtcttctgactagctgggattacaggcgcacgcccccatgcgcagctaattttctaatttttagtagagacaagatttccccatgttggccaggctagtcttgaactcctaatctcaggtgatccatctgcctcagcctcccaaagcgctgggattacaggcatgagcctctgtaccccgccagaaatctttgatttctttttttaatgagatacatgagagactgtggctaaattcaactttattagtgctatggcattcatagcttttataacaggtgaaacatactatagcttcaagtatcaagacttcttgcagagatgaaatggaataagaaattgagaagaactttaaattctttaggcttcaaattattttacttaaataaaatatttatatcttaaatgtaaaatttctttgaacatttttaaatctttccatgaaattcataatggaaggggattaatatcaaatatggagtatatttttgctgttattttatcattggtatatcataaagttatttaatcttattgcagaaaacttgatgagatataatgaaatacaggttgacataattttagctgggaaatagtaaagggtatataatttggactgagaaaaccttagagttagttgtttttttttttttttttttttgatgggctgtgaagctttttgtgggatattccttatgagttagaggatcacagataatccagggagaagtcattggtattttgattggagcctcttgggtttggaagcaaactagtcctgacaaaaatgctaacatcttacctgagagggacaatcataacccaagatgaccttacataagttgttcaaatccaataggtaagagtgcaaaaggcttgaaagattggtgatggctacttctttctctagtaagtcttcccgagagaggatattctcatgacagcctgcacaatggaaacacttgggaagttttccaaagtcctgatgtccaggtgacaagtagagtagttacataagaatatcttggaggagacctagtgtcaaaaagagaggcaacacttattatttgatgatttggaagaacacactgcatatgtatagatcacctatttctttcttctctcactttgaaattggcctgactgcagagagatgcattatctttgcctttatactgtgatttttactgggcttgtgatggggtaggtaaatctgacaaatctggggtgaattattagcagtatgcccttctccaacttagcttttatctccaattaaagctgacagcttgatctctgtcatacttccaaatatatctctcaatttgttccaaaataaggacctaatttactagcccattatgtctgtgaagcacttatgaaccagagaaatttcaaggaacccagttgctggaaatacatctggtgtctaataaggttctattctcctgttctctctcagtctttctctggggctggaggctgcatgttcagctttattctctttttctccagatacgtctgtctttaagtcccttgatgactcatggtgaatctaggtttctatgacactagttctaacagcagttgaacaataccttataattccaagaaccaatgccagcaagtcgtgtccctgaatctcaaaatataaatttccaagagagaaaataagattatcttatcttgaaatatatgctcatttctcttctcatcaactgtgctagctggaaagtcacaagttgcacagaaggctgcccactccttcatcagtctgggtctgaggatgcttcccagaaaggtgttggctggaagggtatcccacaatatagctactgaatcaccagctctgttctgtttttatatttattccaagtctcctatgtaactttcaaaaagttcttgaaaacttttatcccttaattgtaaaaactaccaaaactgccattgtgagaatgagacaattagatgcacaatttagagaactttagaaaaagttgaatttatgatatttttaggtagttcaaatgtatttctcaaactgcaggttaaataagagttattgtttaaacttcagaagttgttactattagttaaggataaaatgattattggagattatcttacctggggaaagagaatgatcacaatcactttacttctaatgtttcttttttaggctttaattatacctctacaacatttttaaaaagaacttcttcaaagtgtttaaaccctattattgaatgtttaattttacttaaaaatagtctcaactgaattttacctcactagtgaactatctaaaaattgatttttgcttttcaagaaaagtgttgaaatgtagcttgttaaggaaatactgtttcatttttaaaaatatgttctcttgtactttcgttgtttagattcctttcatttagttttactttaatgttgtaggatttgaaatttcctagggagatgaaagcgtccattttgattttccctgctattaaccaattattcattggaggcagcactatttttaaattgcagtagcattagtcagagtttttagaagacctgtatttgattccatctttctaactaatgaattgtatgaccttgggctggtgacaatatttctgaacttcagttttctcatctttaaaagaacagagttagaatatattttctttaattcctcttctagctctgatgtattattccatgaatggctccaaagagcagaattcttggctcatggttattatggtaaactattacaagtccatagaattacattcatagatttctatgaaacatcatcagaggttcactgcttgtgccccaagaacttaacagaggatcctaaaaggtgccgatatttcttgatttgttcatgtacattagcattttctcctgatccaaatgggcaatcagttttcctgaggaattaaggtgtcatgatggcaaggtagggagtgatgtggaccaagaaacagagaatatgtgatttaaaacttatgtaatagtaaggtcttttctggggaacctgaaaagttttacaaaatttaggaaatctttatgcatgaggttcattccatgttttatttattggtcttattatcacttatacttgctctgtgtaatggggatacaacagaagaagggcccacgagacagggctggactaagctggtagaatgtcattcccattgtgtcctattgatcaaagtaagccacaagaccaagccttgtgaggaaataggctctgtcttttgatgggagattgtgcaaagtgttaaaatcatttttgaaatctatcacatcctcagtctctgataaaattgacaaataatttttgcagagtttccacaagcattcagtaaaacagagtgcttgtttcagtacctggtatagaatgtccactcagtaggtgaaatctctttatcagctacatagttattattagaatatcatatctgggttttggtcatcagaattactaaatcttgttacttctactcctatcttaaaaaaaatgcatcctttcttttctacttctgctactactgcctc

SEQ ID NO: 1884933 - DNA, 4001 bp, Homo sapiens
attactggtaggcaagctgattttggtgatgggttaggtataactagagattcatgttctcaaattttggtcctgacattcctttccacctgagcgaaggaaagaaagcggagggtatgttcgtgtcacaatgaggtttatacttttgatctgggtagaatttgtgttcgatataaccaaaatgtatggatacctactgtgtgtctagcacttaagtaatttcttttatccaatggccatataattaaataagcaaaatttcacccaggggcggcagtctgagaattcaacacactaaatagaaaactagaagatgggagaatgctgtgtaaagagagagtgagcaccctgtgtgtttctaaagagaatggaaggaatttattcagcctatgtagcctctgtgtgggtaaggttttagttatgagataaatcaatgatcacaatattaaataagtcataccattgcacttatcagtgctcatgcagtgacatagtgaaaaaaataatgaagtagaaacatcagttccctgtatcaaaagctatgagatataaatactcccagccaaagaaggcaagatctgaaattttttaaaaatgtggatatatagaataaatatgcaaccctcctgataatgttggctgatgaagtgaaattcaccaactgtaattctggcacagagagacacacatagtgcctgcatacacacacacacccacacacacacacatacatcctcagaatattcttaatcatttgctatcttatttacatttcatttgctagagtaaattctatcatttgaacttttaaaaaatatatttcaatattaagcaaaaataaggaataatgtgattggctttcaaatagcttattaccattcaaatactctctagataatttatatttaaaaaggcgaaaaaaaaaagaaagaaaaaaagaaaaaaactgtgtcagcttccgaaacattctaaatggagacttagctctaagtaatcaaaattgctttagttgtgcagagcagcattaaaagcctcgtccactaattgagtgaagcggcacaactgaagcagccttgtccctcattagatgatcttgcaggcactgtttgtcatcctgggttgccgggctcaatctaatagtactgctggctcaaattaatggtaattcgttatgacacactatgtccttccagcgaaacaacaatgcgaagccagtggggcatctgtctaccactgctgcttcttgatctctttcctttccactttagttcatgcgaccacctttgcataacgcttctaaattctttagctaactggtgattggagatgccacctgcctgaagaattgcgtccagttctcttccactagtgtcacagaaaaagcatctctaacaataggtcgagtcagtctgaaacgtgatgacattttctaacggaagcaaaactcattcgtgtgtgtatgtttttttgtttgtttgtttgtttgttgttttttgtttttgtttttgtttttgtttgagatagggtctcactctattgcctgagctagagtgcagtggtgtgatcatagctcactgcagcctcaaccttctgggctcaagcgatcctcccacttcagcctccagagtagctgggactacaggcacatgccaacatgcctggctaatttaaaaatttttcagtataaagatggccttgctacattgctcaggctggtctcaaaatgctggcctcaagcaatcctcctgccttggactcacaaagtactgggattacaggtgtgagccactgtgccaggcctgggacttcttttggaatgtaaatacctcacttgtatctaatcatggggaatattaataagaaatcttgagatacagtgttcatgaatgtgatgtaaatccaaagacaatgaatattttctgactctttgactttggttattcaataccttttggaggaaacttcatgtttatgtgatgagcattgctgttcagaatgctgcttttctattcttaagtgcagatagaatgctggaaaatgttctaacagtgatgcaatcagccacttcctcctagcaactctaaattgtgtgtttgtatcaatcagtttattgtgttcattcaaataatttcatctgtctggaaggatgactcaactctacacatgaagaaacatctaaataatatctggacatggcttttcatttgaaatcctcgaattacccatgaatagagaaaaggtcacatgtattgaccagttgactctgcagttttgaaagtggtgatgcttagtcagtatggggtgccggacagttgtatcacccactgttttcccaaggttcagccttagtctcactgtagggtgtctattccaagcaatatgggcacagtgtgattttaacaatgttaaaagcttgcctaccaccataccatgtattgtttgaaatcccacaattagattcagtcctttgggctatatattttttaaatgtttcttagcataatctaattgcttggaagagctaatatattacaactagttatcagtaatcatttattcatttacttatttctattaatcctatcccctcccaaaacatgctctaacaaaatccttcagttcagaactagttcccattccctcattttgcgaaattcttgcataaaacctagatatatcgcttttacatggtagtttgtaacgtgccttgatgaacgcctgctttttccattaaatctgctccacccacattcagtcttcacaatttcagcgaatagtaattccatccttctatttgctcgttttaagcatgtaggagtcatccttgactcctagctttcactcatacccctgtccagtccactggcaaaacctccgtgcagaaaaaaaaattccacattcaccactgctactctggcccaagacaaaataaaccattgcctggaatattaaaatagactctaccctgacctactttaagcttattcttaacatagccctggaaataaatagggacatttttggtggtcaaaagaccagggcagttctactggcatttcatgggcccagtttagagacactaaatggcctgccatgtgcttggtggtgggggggaaaagaggagctgtccactcagaatgccaataacaacctcactgagaaatattgaaccaattaaaacctaagtcacctgattttccacttatgctcaaacctccacattggcttttaatttttctaagaacagaagccagtatcctaactatggcctacaaggccttacacaacccttgccttcccctggcttatctgacctcacttcctattactcttgcattcactcactccattgcagccactctgaaaatacagtatgccatcgtgctatttactctgtatgaaaagttctttccccaatttacacatccctcacctccttactcatatatcttcttttctagtcaccctgcttaaaattgcagatcctgctctcagattcttgtctacaaactgtttttgtctccaaagcacttgttgctatttaatacattgtgttgtattcttgtctttctttactcaccagactgtaagctgcatgagagatttttgtccattttgttccctgctgtgatcacattgcttagaatagtatctggcaggtagtaggtgctcagtgggcagtttttgagtgaataaatttaaacttataacaaccttaggtagtattgcattaagaaatggagatttaaaagctgaaagaggccagtagatttgtcaagagacacttaactagtaaaaagaagaatttacacatgttctcatgaatacatttattcatctactaagtatttattaaactcttatttgaagtcgggctctgttttaagtgctggaggtaaaccaatgaacaaaatagacatggttataaaacaaattaattttagagatggcaagtgctatataggaaagaaaggaaaggaagaaggaggagtgatggatag

SEQ ID NO: 1884934 - DNA, 4001 bp, Homo sapiens
gccgttttataagatttaagtaggtaaacgaaaattacagtcaaaggggggttgttctctggtgggcaggggtgggggtcacaaggtgctcaatgagggagctttttgagccaggatgagccaggagaaggaatttcacaaggtaatgtcatcagttaaggcaaggaccggccattttcacttcttttgtagtggaatgtcatcagctaaggcaggaacaggccattttcacttcttttgtgattcttcagttacttcaggccatctaggcatatatatacatgcaggtcacaggggatgcgatggcttagcttaggttcagaggcctgacatgatccacctgcctcagcctcccaaactgctgggattacagacgtgagccactgcgcccagccggttttacaccttttagggagaaagttcatagatggattcaaagattttctgattggcacttggttgaaagagttgttattatctaaagacctggaatcaatagaaaggattgtctgggttaagctaagggagacaaagtttctattttgttattttttttttgacagggtctctgttgcccaggctggattgcagtggcacagactgtggtttaccgcagccttgtcctcccgggctcaaggaatctgcccacctcagcctcctgaatagctgggactataggcatgtgctgtcatcatgtccagctaagacggggtctccccatgttgcccaggatggtctgaattcctgggctcaagcgatccacccacctcggcctcccaaagtgctaggattacaggcttgagcaccaccactctggccattctaatgcagatgccgctccaggcagcaggcttcagagagaatagatggtaaacttttcttatcagagttaaaaaggtgccagagtcttacattctctcctggatcaggaaaagatgtggaaaaggaaggagattctctacaaagtagatttcccccaggagacagttttgcagggctacgtaaaactatgttaaataaatacatgtcagggtaaaatacttcgttttcttccagggcctgctatttgtcatgtgatgtatcttaatgctacagaccgtttggtcagccttaagttgtctgttttaacgtcgacgctggtcagttatacctgaattccaaagggaggacagtataatgggacatatccaaaccctgcttcccatcagggactgaactggtttttcagattaactttggcgttgagagactcagttcattcagttggttggggaggcttacaattttatttttggtttacaaggtatagataactatgcctatacctatatatacaaatgtttatatatgtatatatgtgtgtatatatggtttgttttacacaaatggatgcctactttatttattttggtagcgatgaggtctcaggctaatctcgaactcctgggctcgagatcctcctgcctaggccttccaaagcacttagattacaggcgtaagtcactgcgcccggtcctgcttcaccctcttaaaaccgcccttgggggctcctcatgagtgcagacattggcgcgttcctccaaaccgcacagactccccctgcgtggacgcgtctcgccgtctttactcctctttcgccgacctttcactttcagggaataccctctggcgcccttctctggagcacacacgtgaacgccgccggattccaagaagtgagatactgaggcaaaagttacgcgcgttcagaacaggaagaccccgcaaaacgccggccaagacgtggccccgcgtccaccctgcccacaagcagccgctcccactcgcggaccgcgccctgtgcctcagacttcggatctgtgtgatccactgtgtgcaactgtacccgaaagggtccccacgtgcactacctcgtgacaactaagatggaccgtcttctactcctaggagtcatccccagattagcggggctctcagaatccttggggcttccaatccggaagttccccgtcccttctgccccaacataacatggcgccgaccgcagccacttccgtgatccgcaggcgacgaagtcgcctggtcaggatcaaagatggccgagcgccctccacgcgcctactctcgcgggccactcccggctccgctttagctgccgctcttggtgagcgccgccgccagccaatcgcggggcgcagaggcctctggccccgccccgcggatcagctgagggagccgcaatgtctcttgacagcggcggcggcgcagccggttccgggttcggcgcggggcgggggtaagcgcggctggcgagggggctgcggcgggcggcgaagggggacctggttgcggccgtgggagggggcgcccgccggcgtccaggccgggctgcggggctgcgtgggcgcgggcggccgggccggggcccgcggggtggggcgggcgccgagtctcggcctctggggtcgggagtctccatgggcgtttccggggtctccgcagatgtgaatcccgatggagcggcccgaggaaggcaagcagtcgccgccgccgcagccctggggacggctcctgcgtctgggcgcggaggagggcgagccgcacgtcctcctgaggaagcgggagtggaccatcgggcggagacgaggtgcggggctgaggccggggccgggggccggggccgggcagagccaccgggttgcgggcaggccacacgggcggcggtgcagtgtgcgctccagatttttccgtggagtgaaatgtcatgtaagaactggtatttattcggtgttctgcccaccgattcttgcgcatgattcacgcacatcatttagccttcgttacaactgtataagttagttgtgttcatatactctccagaatgcaatattgtcacgttcgttgccgtacagagtatcttttctgactgtaatggaacgaaattaaaaataatagaaggaaaagtggaaaattcacagatatgtggacatgaaacaccacactcttaaagcaaccggtgggtcaaataagtctttacaacggggaccttgttttgagacaaatgaaacaaaaatagaatacaccaaaaggtatttaggatgcagccaaggcagtactcagagggaaatttatagctgtagtgcttatattaaaaaagatctcaagtcccagcccctagaatatttatttatttaataaacctggaaagctaaaaacttgaacaaagtcatacaacgggtgagagaaagttccctcagcctccacattcactgcctccagtctcccaagtgaccatctggttgtttgatttcctctgaagcctttgtatggggagagaaatgcgctggtcctgtcaacaaaaatgtttagtttgtctgaaaattaatgaattagctccgacattatactctaaaaaggagcgaggatgggaaatatttgctgtttggaagcaattttttttttttttttggttaatttcaccccttataatgtgcttgcacctggttttttttgtttttttgtttgtttttttgagataagagtcttgctctgtggcccagactggggtgcagtggtgtgatctcagctcactgcaccctctgcctcccggttcaagtgattctcccgcctcagcctcggagtagctgggactacaggcgtgcgccaccatgcctggctaatttttgtatttttagtagagatgagctttcgccatattgcccaggctggtcttgaacaactgaactaaagtgattcacctgcttcggcctccgaaagtgctgggattacaggtgtgaaccactgtgtctgacctggttttgttttttggggtgttttggtagtcttacattccagtatcaagtcaaagtttattttacaactttgaaagtatttagatatcatcataacatatcaaaattatccctttaagacaagaggaagtatttgaagatttttccctttgtctttacttgatagactaggaggtttggtgaagagca

SEQ ID NO: 1884935 - DNA, 4001 bp, Homo sapiens
cagaaaattggtactgaggagtggggctgttgctaataataaatcctgaaaatgtggaagtggctttggaactgggtaatgggcagagtttggaagagtctggaggagcaggttagaaaaggcctagattctggtgagggattgtctcaaaaaaaaaaaaaaagaagaagaagaagttgtgaaaccatgcccccaaatagttaaagaaaccagtgactaacgaattttttttttttgagatggagtctcgctcttgtcgcccaggctggagtgcagtggcgcgatgtcggctcgctgcaatctccacctcccaggttcaagcgattctcctgcctcagcctcccgaggagctgggattacaggtgtgcaccaccacgcccagctaatttttgtatttttagtagagacagggtttcaccatgttggccaggctggtctcgaactcctgacctcaggtgatctgcccgcctcggcctcccaaagtgctaggattataggcgtgagccaccgcgtccggctaacagaaattcttgagcttacaggatggcagataagaaacagtttgctgaaactccgtttgtaatataatacaactggctgaaatcagttgaaaccaatataaccaaacggagtccatgcagaatgagcttgctgatgtcgcagcctgaatttccactgcacttttcacactaactctaccttaatttgcacatgggacccaagaagaggcttgaagagacaactgcacatggtcggggactttccagacttcctttttccttcaccattcacctgtgaatcccagaatccaccctctaaaccttttttcacaatagtgctgccttaagggcagcacagagagatagatttgaactaaactcctgtcactttgttggtcaactcgcaattaagcttttcttttctcaaacgcctggtgccatagtattggcttctgtgcacatcgggcaatgaggtcttttgcgtagcagtatttggatatccggtttcctcacgctatttattgaagcgactgtcctttccccatcgtgtattcttgacacaagattagttgacttgcctaagattagttgactgtatatgcatggggttatttctggtttttctacgctgttccacattggtccatgcgtctgtttttatgctagtacttcactggtgagttctacctctgggaataaatataagaattctctaatcactggatgtttgaagcaattcactaagcaactcattatgatgctttctggcaaaggatctctgaatttgtcttcaaattgtggataaaattgggtcaaatttggcccatgttgtcctggagaatcatttgtgtcacaaattatcaaatttattagtatagagcggattttcattcaatttcctatgtgtctatggttatttctcttttttcatctctctcctccatctccccggccccatcttgctgtcataagcatcgtgacttacctataattctccctacgactccagttatggatcaactttacttttttctgttaattcttaccttctttccataaatatatttaaattttttctggtttcctcaactgaagtcaaaccaattgagtattggtgggccgggcgcggtggctcacgcctgtaatcctagcactttgggaggccaaggcgggcggattgcctgagctcaggagttcgcgaccagcctgggcaacacggtgactccccgtctctactaaaatacaaaaaaattagccgggcgtggcggcgggcgcctgtagtcccagctactcgggaggctgaggcagaagaatggcgtcaacccgggaggcggagtttgcagtgagccgagatcacgccactgcactccagcctgggtgacagagcgagacgccgtctcaagaaaatatatatatatattggtggattcggtttccctttatgtttctcagaaaaccgtgtgagcccgtttggagtcactccgtctccaagcgacaggcacttccggacgcggggcactgtgggaagttgagttcgcggggctccttccttcgcgcatgcgcacatgcactcttggtaatgcttgcaggtggcccgttcttcctctttgtccttcgctgccacgtgagaggggagtgtacgcgtgtgcgcgcgtgcgagtgtgcgcgtgtgcagtccccgactcgtcccggcccgttcggagccgcccgggagcgcacaaaggccgacggtttgggcgcgtgcgcgggacacgggggacgggcggtgtcacgtgatcgcgaggccgcgggcgcgcgggcgcgactcggcggcggcgtcttttgtgagttcagtgagtttattgcgggcccggcgctgggggctccgggaatggcgggggaggcgcgcgggagtggccgcggggagcttcggcttcaaggccctgggcgtccgcgcgcggatgcgggtctggggcgggttggggctgggccgggtcgtgaagatgccgtgggccgcggagctgcgcggattctgggctgtggggcgggcacggcctttccggaggcgccgctcctgggcgtcctttcaggcgggcgtggaggcgccagcctcgggcgcgtttagcctcgggcgcgtttagcctcgacctcgggccagcccgcttgccgcgccgtggccctaaggagcggctgccctgctggaccgcatccaccagcagcctggctctgccgctatcgaaggaggcttttaaagcgctggggttacaggtgtgagccaccattcctggccgtgtattttttaatggttatatttattgactgttttaaattttttaagtgacttttgcttttggtatggtgtagcgaaatctcccctcaaattatacatatattcattcacctgtggtttttttttgtagacattcttagggtttccattattttaaaatttaacccactgaaagtagttgtatgaaatagctacgtttattttctttcaaatattcttgtattcattaaataatttaattttactgatggctttgaaatgctacatttattgcatgctgactcttgcatatttagacagtttgctttttttcatctgtataacttctctggagccagtgtcaaatgttataatgattataatttgtatgtattacagtgggcctgttcacactcattattttgtatttccaaaagcatccaggcccggtgtggtagggcatgcctgtagccccagctactctgtaggttgaggtaggaggatcacttgagcccaggagttcagggctgcagtgagctatggttatgccattgcacttcagcctggacaacacagtaagaccctgtcaaaaaaaaaaaaaaagtgtccgaattgttcttgaaccttttttcttacacataaactttagaattttgagattctgattggagtcgatgagttatataaatcatttgaggtcaaattatcttcacaatctgaagtcttcctatcccagaataaaatcgaattataaatttctttaattctatttttatagttctcattggtgtttttagtatgcttcatatgggtcttgatattcctacatattttatgtattttgtcaattatgagtcggattttatttttttgttattttatgtgagttgtttatatcttacagaaataaggttattgacctggaaagatgttcttcacataatgggaaaaaaacaaaaacagcttttaaatatgaccatatgcttccattgtatgaaaaatatcacaatagtttccatcatcctaagaatggttacctgtggtgagatcatagataatagttcttatttagcttgtgtatgttttttatattttgccatcatatattacttttataataataattatagctagtatatgtttcgtatgactgtgtgccagcttttgttctaagatttatgtattatcacaatttaaggtataaaggagtcatttcttgtataactgggagaaactgctgtgtgtttctgagt

SEQ ID NO: 1884936 - DNA, 4001 bp, Homo sapiens
gatttaaaatgagaataattattcctaccaagtggagttgttgggagggtggtatacatatagatggtgtatataaagtgcatagcaagctggttgtggtggctcaggcctgtatttccatctagtaggaggccgaggtgggatgatcccttgaaccctggaggcggaggttgcagtgagctgagatcacgccactgcactccagcctgggcaatagagggagactctgtctcaaaaagaagtgcatagcaagcaccaggcacatctaacagctcctcagaacatttaagctcccctttttttgcttctttccctttggtataattttagaaagacttttggggagcatgacatataaatcattaaaaaagagagagcctcaaagcagaatcatggcaattgagctagatttgtatttatcaaagcaagcatgatgctgggatgcttaaataacagtacagtacattgcaaaggaactagggaataatgttcctattatttttgtccatggtcagcctattactagaaaagagtgaccacattgatttctaaagtccttatattcaaaactttctgtgctgaccaccatcatttatgtttttcccatctctacttaaaaacgtcaactagccccaacttttcctctagttatttcttttattagatttattctgttctccacaataaaatctatcttctgttcccatccatgacaattcaagtagttataatgggtggatatagggtatgataaatgttggtaaatccactgagttccttgagttccacattgatgtcttttaggatgtgactaggggtaggctaaatattttctagtttctcagatcctacccctggtctaattatgatatagaggccagattagtgtcaccagtttttctttctcttctgaatgtagagcaagagcaaatgattgcagataacagcatgagaaacttaggatcaaccaccagcatctaagtgagtcttgtactaggctcattccagttaaaagctgtaaatcatttcatagccacatcagtttagttctcttttatagaactcattatgtgatacaaaatatgcaaggcactggagatacaaatacaattatttcctcaaggaactttgagttgagcaaacatggtactgtctggtgagaccagacatatgagcaaacatagtacttctctggtgagaccacatagagaaatgtacaaggggtagaggaggcagtgatgactactggtctgggatagttgagggaaggtggcataggctgcctattgaagaataaattagagtttgctatgtgaacaaggttgcagagggaatagtatatggaaaaacagggagatgtggacccatatattttgtgcagagatgtccaagtacttagatattactatattgcaagtatgaagaaagctttttttgagatctgacaatgccaaggtaggttatggactctctttggagtccccaaaataaaaataaaacattcacatctgctaaagatagcttgaatggtatttttgctaaaggcagagtcatatactgtatgtgccagataaaagtcaatgtctattatgtaaacattgagattacattaattaatttaaaagaaaggattcaaacttagtactaatctgcatctggagaactaatctggtatgtgttattttcaagtcacccaactaaagcagtctgttgtatggaactctgctccctcttagtcaaacaaatgcaaccataaaaagcagtgcaaattcagtgtcaccttttctccatgggattgggtggtttcttttggagcagagagagtttccagagaatcaatatagtagccagaagaaaagtggagggtggccttaccttgtccactccgtgctgcctgagggtgaaatggaacctcggatgttgtacacctttaaattgtccatgttgcctgtttcatagccttcccgggccagggagctgtgtagtcagtttatagttctaagaaccagagcaggactgctgtgcttgtaattgcatgctttttatggaacaggcaatgttgtttagggaatttgggcagctggaacctgccacattagcaatttggactgaggaagaatttcagggtgataaaataaagctcattatataaattcacttgggtatttaggaggctgagaagggagaggatgagagtattccaaaggcaagcaggagagtttcataaacaggtccctttctattcgtttttactgtaagtgttgaattgagctaggaggatcacatggcccattttgcaaagggcagtcatgttctgctgtttcttagctgttttgtcagttggaacaaaacaacagcgctgctcattttttgcagggttagaggaaaaaggaaggactggccgaagaatggggtggggagctggagaagagaagggccaaaagtgtcagactgtggggatgaggacctgaaggaggcccatgagacctcaggcatgggccctggaactctgcctttttgaagcctgttgacaatctcaccctaatttaaccctttgtggaattcttccatgagatgcagttgccatcatcaggcttcctagagaattgagcctgcccactctgttatgaagtctacccagaagagctggcagagtaggccccttcactgggactgcagcaacactgaccaaagcaaatccttctcttggaagaaacaaactcattcctcacacctgcctcaccccgctcccaccgccaccccctgcaccacacgccagcccttaataaaaactaaaactgatgtcattgtaacctttggttattcttttttgtgcgtaaagtgtcaacctcctgttttattctcataaataatggaaatcttaacttcatttcagaaaatcacaaaagataacagggaccctattcaaacagaataaaaataattagtaagtcacaaactctgactagaaagaaaaagagaagagagagagggaaggagaaagaaagaaggaaagagagggagagagagaaacgaggaaaggaaggaaggaagaaagtgaaagaagaaagtcctcttgttggtgttaaaatgtgtctttaaggggaaacttatcatttaggttactaatggtttctttcttcatcattttaatttccattaataaaatgtgactttgaaaggatgcagggagtttgggaatagagagttttatttttatttgtttattttttttccccttctcccagcaaaatacacaggtatctgactatgtagagacacgaagccacctatcctgaccaaacttggcagtggtcaggggataggaggaagtgtagtgccatgggatgggcaccagccctgatgaactcgactttctttccatttctctcctgcatccaaatgttgaggagactttgagtagtagtgtagcctcttttccttttaaaaatctgcaccctgcttatttccaatacagatatgaggttggtacccactaatcttaacaggatatatatatatatatctaaagtatataacatattatttaaaaactaatgtattatttaggttttattaaattatcctgtttttaggctatgctgatgggctaaatttgcctaaactcctgagatttagattctcatttattggcattagaggagttcctaaaaaaaaaaagctattaagattaaatatcataaaaatctttctaggaaaatataatcaaaagcatcaaggctgtctcctacagttagtggtttctattattttggttctcagagctatgacaatgtcactggatttcaagaattcagaaagacaaaaagaaaactcataattttgaaatggggaaagggaaagatcttggacatagtcttctgtttttaaaatagtcattctcattttaaaataggaaaaaaattatttttcatttaacaaagcaaaaaacccagtctgtacttttaaattaatgcaaacatcaatattttatagggaga

SEQ ID NO: 1884937 - DNA, 4001 bp, Homo sapiens
ccagaagttccccaatgacaacttctgtcacatgttcaaccattgctttaaagggaagctgagaactttagcttatccagcctctgcagtgggaggtagtgagagggaaaggactcagcctcccagcaatgtctgccacgaccaagaaacagaattgctgggtccatggagtctgaacattttcattttcgtaggtactgctaaatctttattcatagttgtatccacatagaacctttatcaaagactattctgatttcatccttgtcatatggcttttctctttgattcaaataaaagatgcatttggcttggagacttgaccccccccccagtgagacccattcccatagtctcccaaaaggtcatatttcatcacatttcctttagattatttatgtttctaggctgttatttcaattttgattgtcgagctcaacttccatacctcccaatttctccatccattctccacaccgaatccagagtatatttgaagatgcaaattagtatatttccttcaatgtttcccattgcacttggaatacaatcaaagtccttatcagagtctgcaagtctctgtattgtcttatttcctgcgtttctttcccaggtcttcgtccccctcagtcactaaattttattcttagtaggcttctgtttgttcctaaaacatgcctcacctttttcctcacctcagtgcctttgcacctgctgttatttctgcctggaatgtccttgtaacagctcttctcacagttaggctgctccttctaatcccctcaggtcttaattacatgtcactttctcagagagactttcctcaccagtctttctaacatagatctccgttgttatttatttgtttattttttattttagaactccattgattccctttatgtcagttttactacctgtgtgaccttagactaattatcagcttttctgtgccttcaattcttagtctattatctgtaaataaggataataattgtatatactaacatcagaatttatcatgaacaacaaacaagacaaagtgcttaatagtccctactaatacagtaaatacttggtatatagtaaaactttgctaaataattatttatctatttttttattccactgtttccctttttctccactagactgtaaattctaaaggtagagggaccttgtctgtcctgatctcattgtatctcacaaccacagcccagtgcctggcacataataaatgctcaaaaaatatttattgaacaaacaaatgctgactacatgaatgaatgacaatgcctgcctcagtggtagctctggactggactctgccagctcatttccagatttcagtgacctcctgtctaaggcagccagattaagtgaataaaaatacatgatgccacttaaatttgaatttctgtattttatcaggaaattctactcccttcaccactaccttcacccttaagaataaacacttcctctcatttcctccctccctttctcttcctctttgctcctttcctcttgtttggctatttctgaatgtagttctcagtgtcaagagaccccatcatccttaaatctggggatgtctgttctttgaagacaaccatatctttgaagaattaacgaatctcctttttgacaggtctacacttctcagagggctaaattatccaccttcaccatcacaggctccttagcctggatagccttctcaggagactgcaactcactctcttttctctggattcagaatacatgcagtgtgggacacaaatgtccttagcttgtccccagacatcctctgctttcgttcatttgtagacaccctccttcttaaatctggctttgatacagacctaaaagaaaaacacccaaatacgatgttggccctgagaacttcattttcccagttgaccagtcaggtcgtttgacaaggcactgcagaagagctgaatctctcacaacaacctaatgccatgctgatacttcctgcctcacagcaggaaacatggcaagttagttagtgctttagccacaaacaccttgggtcactttgattaacatgtttggttctggaatacactaaggtagtttagaaggagaactaaccagttgacctttcagaagataaataatttatgtgaaattcaatgtgttggagaaactctggcagtcactccctatggtctgtaaatatagatgtaagcttgtgtgtgtgaaaatagggtcatgggagtaacttcttggtaacgttacatatctatggaccggaatctccatccagaaaatgtcccctactaaacatttggttctttttatgtagtgaaggaagcatcagcatcagagtctgaccaaataaaacacagatcccagatccatcctatacttatcttgtgaacttgactccatagtgtcacatctctgagactcagtttcctcctctataagatgaaaataataccacctatgttacaagagtgctgtaaggtttataaataaggtgggtgaagtacctgctacacagtgaatgtaatggctggtaatctttttaggtacttctttctgcgtcattatatgtggctgtgttgggaatacccaggagcaaattctttttgcttctcctgcagaggagcccttccttttggagctctgcatcagcatctacagtgacagggcatttgcaagagcttgatgaacgtacaagggcgccatgttccctgcctgttcggagcaaggtgtccaaactcacctaaccctgtctcacttttctcttgtgaggcactgggaaacgttcagcatattagacagaagaacaacactcagatatctgccaagattatgtacagcctacccaaggaagttttttttttttttttttttcagcttcacagcttgtgattacaaaaggacacaggacagctgctaactgttttcctttcatctccgcttctggcacgttcttcttcagatagctctcctgcaacacttggtctgtaccacagtgggagctaaaagagtaggacagaggtgccaccccaaccccagccgcaccccctgctcagactcagctgctgggaaagaccatttaaagcatttaatatcctccctacctctctggggatggtgtcaacccagtgagacaccacacttcaaaagagaagttgaagctttgtgggtagttagggaacgtttagactagaaactagaaaccccccaggtccctgccaagcctgattccaggattcagtgaacagaaaggactggagcaaagcagggaagattaggccagacagctctccaagttctcttccatagagagggttcattgttgcttcggtactgtgaaatcaaacataaatgcattggaacactcgctttcaaatgtgaatttcagatgactctgaagtaaaaatataaatggtgtggatctaaccatgtttttttaactcaaccttttatctcctgcatgattcctgctagaggtagtatagggtaagtcttgagaaagtctcctatcagctatgggaacaagctacctacctcataggagttattgtgagaattaaataaagtaatatatggaaggtatttagaacagtgcctgacacagtaagtgtgctatttactttacactaatgaacaccaactgctatcagtgtgaaagttgaaggaagacagtaggtattcatcagctttatatttatacagatatatgcatctggagagaagtaagagcatacaaaaaagttttgttcacatcaacttttcttcttacttgaaggagctctgggttagcatccttaaaaatgaagaataggctccttctctcatagctataaaatttttgaccaaaggcagtacaaattactgtataaattattttgcactcttttacaaatacacataattctaaaacctacatgaacacatctcaagtgaattacatttataatttatgatatcaccaaatcctgctcgatactttaacaaat

SEQ ID NO: 1884938 - DNA, 4001 bp, Homo sapiens
ctggtgagtatatgtatgaatttctgttaggcacacagttagtagagaaactgatgagtgagaggatatgcagatatttagatattatagatactcccaaacagtttgcgagatggttgcaccaatttaccatcctgccattagtgtattagagtttcagttgttccacatccttttagatactggtctgtcttttttattttggtcatcctagtgggtatacgctagttttaacttggatatccctgattataaatgaatttgagcaccttttaataaatttgttagccatggaagatcctcttttataaagtatttgttcacattttcagtttctttttctattgggaatgcctatttttaaaattgatttgtgaggttctttataagtttagaatatgagttatttgttgaatatatttattaaaatatcttctcccactctgtaggttgccttttaactgttgtatttgtgtcttttgaagaacacaccattttaattataatatagtttgatttaacaatgtgtatcttttagagatgtgccttgtgtgtcatgtcttaaaaaatatttgctactcccaagtgagaaagatgttctgctgtattttttcctccaaatgctttgtagttttttccttcataattaaatctgcagtatatctggaatttaatttggtacacaatgtaaagtaagagttaggacacatttgtttttctgtaatgctatttaatagacacagaaccatttattgaaaagaccattctttccctacctagctgatgtgtgacaatacctttttttgctctttttggactttttgcattcccatatgagttttagaactagttaattttatcagaaaaagtaaaaactgctggagtttatattgggaaagcattaagtacataggttagtttgtgggggatttgatggatttccaatattgagccaattcatgaacatggtatgactttctatttgtttagatcccctttatttaaatattttatagcttttagtataaaagtcttacacatttttcatacttctcacatgtgtctgctttttcatgcaagcataaataatattttaaaattttattttctactttttgttgcttattagccacaaaatatgattactatattgcattataagaaaaaaaattattgtcgtttattgacattggactcagcaaccttgctatatttattgtcaattcttaaagtttgtagatttttttggatagtctagtattctaggtacagaatcatgtagtctgtaaacaatgacagttttattcattttttcctatatttgtgatttttatttatttattttgtttatttgttttgttgcatttgctaggatggccagtaccgtaatgagtggaaatagtgaaaatgcattcctgatctcaggaaggtctgcaatatttgccattgagtatgatgttctctatagatttttaggtacttgtttaccttagctctctactgctgcataacaaattaccataaattcagcaactcaaaacaatacaaagtcattatctcacttttctatgccatacatctgggcagggttcaactggatactctgctcagggtctcacaaggctaaaattaaggtgtcaacctgtggctaggtacttctctggagctcttgattctcttccaaggtcattcattagcagaattcagttcctttcagttgtaccattgaggtctctgttgttgttgttttcctggctattggctggggttttctctaaactttcagcagccactttcaaatcctagccatttggcttcttccatttttgaagccagcaaaggagaatctcccctgcatcaaatttcttggacttcagggaggtcccactccctttaatgactcatctggttaagtcaggcctacctgggtaatctgcctttcaattaagacaacatcaagtgattagtaacttaatcctgggactgagtgtgagcttttgcccacactcaataagagagaattgtacagagcttacatacaattgtgtgggaatcttggagatcatagaattctgcttaacataatattctttattaactaatgtatctataactaggttacccaagagttgttaccatggttgagtgttaaatctgatcagatattttttctgcatctatcaaaatgttcatttatttttctttttttgtgtgatttacattgatctttttcaaagctcattaggttcttaaagataactagatccagtttgctatgttgatttgaaccatgtgagattgctgacattttaccatacttgaactataaatggcagtttatatatttgaacttaattttaaaataattttatacctatttgtataaaatatattgatctgtaatttttctttcttgaaatgttcttgttgagttttataattgaagctatttaggcctcctaaggtgctggaaagtattctttctatatgtatatatatactctgaaagagtttgtgcagaattgatattatctcattcttaaatgtgtgaattaattcattggtgaagccatctgggtgtcttccagtgttaatcactttgaaagatacactcctggttgggtgtggtggctcacgcctgtaatgccagcactttgggaggccgaggcaggcagatcacgaggtcaggagttcgagaccagcctgaccaacatggtgaaacccccatctctactaaaaatacaaaaattagtcagtcgtggtggcgtgcacctctaatcccagctactcagggtgctgaggcaggagaatcgcttgaacctgggaggtgaaggttgcagtgagccaagcactccagcctgggtgacagagtgagactccatctcaaaaaaacagatacactcccttccgatgttttaattgatgctgaggaaatcttcatatacaggttaaggctgtaatctatgagaattttcttgagcaaaatggtgatgatgaaaaatatatgtatatgagtcagtccaaaagagaagaactcagatatagtcgggaattgctccaacaatattctgatcattccagtatttttttatattagaaatagaggctctgatccataagtgaattttctcagtagaaacaaaaactacaggtcactttgactcaatcctatatcctggtttcttctattcatagcaggaatctcttgggccaccctttagtagatgcatgtactggaataagtgattctgcttcactctgcctcagtttcctcatctgaaaaaggaataataacattgtctatgtcacagaattataaggattcattatattatggattaacctaaattagcacagtggctagcctatggtgtgcagtcaataaaagctaattttaaaaatgctttacctaatcactttcagaagtgcttcagttttctagaatatgtattcttaacacaagtatcaaatttgtgtggatgtttctgaagttttatagcatcgttgacactttcttacacatagctgtttctgcttttgcctatttaattgtgagattcctgatggaggggatgttactttatatttgtatccctagtgcctaacataaaccaggtactcaatactctctactaaattttcaaattaaaaaataaatcaatccccaaatatcagcagtgacagagatttattaacttatggcataatcttaaattttaggagcatatatatacctgaaatttttggtttaacaattcatcctgcaaaatatacttatataaatttcctagatttgagctaactggaaaattttaatatgggtgggaaaataagctatcatataggggaaggatgttataaaaaataatgagcaatatttcattgatacatctgtgagttataacattcccagacttactaatttaaaccttaaagatgcttcttcaatcaaggaacatagagtgaataaaaaaatgaaatcttaattttatgactaggtg

SEQ ID NO: 1884939 - DNA, 4001 bp, Homo sapiens
gtcatttgtatagatgtctggaagattggtatatcaagtgatctattgggtagtaatttaaaaaaatgactgccattgtgagtgaaaagctgggttttaacattgatctaccatgttcagaaaatccacttaagcattacctttttaaaacaccacttttaatttatcaattgtttgataaattcttcttcccttacctccctttatcctctcttcctttcttcctctctgcctgtcttcagcaacatataaagaaagtcatctatctgtcaggcaccgtactagaaaccagggactctagaatgacagagacatgaaaacgatctgcacacacacaaacaagtgcatgtaaagctggtgaagtctgaacaaactctgtgggttgcattcatttcagtttcctggttttgatcatgtactgtagtgatgtaagatgctaccattgcggaagtctgagacacgcatgggacctccctgcacatttttaaataaaacttctaatgtatctacaattgtttaaaaataaaaagttgagaaaaaaataacaaaccaaaccaacccaacctaataagtactgtaaaagatgtatacacaatgtgatagaaatagagaaggaaggactaactctgtgagaccttatagatcttcatagaataaaaaatgaaaacacataaagggtttagaagctcataaagtctgaacagtgacacttagtaacatagatattttagaattggaagtgtttttgaagttcagcaagagttggaaaatcaagtttatggatgaattgacaggtccatagaggtgaggttacctgaagtgagactagctcgggtcatgacattttccaggtgttgtagcaggaagtgactttgtcgtgagaactcagatttttttcttgggcttttggatcctcagaagtccaaactggttctccccactgttccaagatgcatgttcacagaatgcccaccacgaggtggcagtagaacataagccatccccatcaaaattactcagaggatgtgtggtcggagatggagtcatttccacatatctttaattgtatacgttaatcacgactgttatgctcatatgttatgttcattataaaatatgccccaaatctaaatattaaaagttgatgcaaagatgaagtaagcaattcacatgtgatgtcttcattctatcaatagctactatcttaaagcaaaatatatacttattctgttcatagttcataattaaagagagtggatgtatgtccttatttcaaatggccttttcataattttacctttttgagctctatttatgtcgagtttcattagatggtcattgtttttatctaaatcgtggctgattagtacttggaggagtggcatttaatataattagtttgaattatattcaattgctatcttttaaatataaaaactgagcaaatattgacagtttcatgtagtttaacctgtagctgccttatctgcgttatcttcagtccgcattttctttggcagaattcttttttaaacacttgtccattttggaagaactgattaattttatgttaattaggtagcaaagggctatctaagcaaagggctgcggcacctccacgttggggagctcttgctcctcactcaggattcctcacttacctggtgtgaccacagacccctgacgcaggccccaggccagagcccagtgtcaattcagattagtaaaaccttatttttttcatcatattttcaagtaaaaatacatataaactgtttgaacaagattttcttgcaatgcagtggattatcttactgtctaacttgctcattttacaaatgaagaaataggccacgagaagcctattaccttagtttcacacaacactgagccatgttgcaccatgtgacaccacactagcactctccattgtacactcaaggtggggaagggaagagagctttaaaaaaatcccagtcttggattcgctgttagagacctgtgttgtcacagtgtgcaaatcttatttcattgtctccagaattctggaaaccttcagttccacactgaaattggagagtttggaatgtggtaccttttacaatacctgccttggaagaacttcgtgcttaaggaaaagcctcctgcgttctttcagcccctgaagcagatcacatatctttccccctgtctagcttataaactacttgaaggcagtaaccatgtctaatttgtttttctattccctcaggggttggttcaatgcctggcacacagaaggttgtttaataaaatgtttactgagttggatggaatttccatgtaagacatttaaatttagacaatcacgacctgattgaagattgtatttgtacaggtatagtaggacactattcagggcttttctgagttatagctctcagctcggtccaatagaactttctacaataatggaaatgttctgtatctgagctgttcaatgcattagctactagccacaaatgtctgcggagcccttgaaatatggctagcgagactgagaaatttaatctttatttagtttaaatgtaaatagccattatgtagccagtgactacctcattagacatgggaaggaaacatactgtttgctttgaccctactgagtttttggctggggaccctgtaacaaaagacagattaacaaaagaaaagcatacatacatttatttaatggaagttttatatgacactggagccttcataaggaaatgaagacccaaagaagtggttaagtctgagtgtttttatgccaggtttgatgaagactggagagtcatggaagaatgtggttggataaaggtacaagctaagggtaatagagtggaggaaacttagcaaggcctgttcatcatctccgtgtccctgtgtctttggagacaaagatgttccttttctctgggcataaggagggtacttctcatgtgagggttttatagcctgcattaggggagggtcagaaaatctttccttcacctgctgtttctcaaattccttcagcttaaaacattttatatgccaaagtgccatattttgggacagcatgtcctaacccctgtcattcagttggaaaatatagatgataaagtattaagttttagtatcttcaagcttcaacgtctttcattttttttctacaatgacttccatcaaaacacctgaccctttttgtaacttctcaccatcaggcgactgaggttctatttttccccattttcttgtatcttttaagattcccaggaaatattctttctgctaagtgtttattttgttcaacctgtcatctaagcaaccaaattacacacaacataaaagcaaccacaaaaggagtgataattaaaaaacagaattgatcctatcatccccttagggaagatgtgccctggatcctttcagagggaacactgacaggaccatttgtccagacactcgagctcaatgagacaatattggtttttccataaggacaaatctgtaacctcattttcaaaaaatctatataatttactttgccacttaaagaagttagtattgaatcattacatgctgagtttccgagattcaattccttggctatgtggtcaccagtttaactcctacctattcttcagtgattggcgtcatccccatctcctcaaggcgacttccctcactaatcagatctccctaggatactttctctcagtgtttaaacttctctcagggttatcatgaaggcaaaataatgcataaaaaccacccacttaatatctgaaatatagaaagtgctcaactaatattagttgtctctattcataaactagaggcattctgtccagatggagagtctgagccatagtgaagttcattaaattgagctttgggattaagactgaaggccaagtcatacagagaggaaataattccaaggttgtgagcagtccaaggtgggtactgtgagtggtctgaatgtggaatataga

SEQ ID NO: 1884940 - DNA, 4001 bp, Homo sapiens
caagtgtcagaagaggaagaaaatgttttcagcttatgttatggaaattctctttagaaatcttaccttcactgaaaacgttatattcttaatgtagaatttggataaacacttggctttgataccagttcttctgtctgcttccttatcacaatgcagcctgagatgctaaacagccaaggagcctggatctacattcctaactctcagaaggatattctaaaacaaagacttctttagttccattgctagcatgaaattttacaaaattagacagaaattatcaaatattacatcaaattgtgcaatattggagccaaaagagatccccggatcatctagtcttaacatcctgtctaggcagctcaggttgtgataataaaataccacagattttgtggctcaaacaacgggagagacacagtgagagaaggcagtcatgagcaagcctggaagagggcccccaccagaacccagccaggctggcaccctgatctctgactccagcctccaggactgtgagaaaatacgtttctgttgagagaatgaaagagaaagaatatgagagttccaatctcttctcataaggacactaatcctacatcatggaagccccatcctcatgacctcatctaaccctaattgccttccaaaggctccacctcacactgggtgttagggcctcaacatgtgaatttggggtgaggggggacaaatatttgtccagaagactgcccattataattgcctggaaaatgtgaaaaacaacaattggtgctaggaccccatccatgggaattctaatttaattggtcagagttagagctctggccttggtattttaaaaagctccccaagtgattctcgtggccagccagggttaaggactactgacttcatccacatgcaagattgatttccacaatgtctctggcaagtggatatattgtttcttaaagatcacacaattatagtttgaggaaaagttttgcttgaatcaagtcgatatcagcctctatcctttcattttacttttgcttaacaaatgtggatctggactccttttcagggtgagaagatatggtaagcctctttgccaaactttcatgggatagaaagaaggttttggactgtcaaaacttaaagctggtataagtcattcttataagaagcactgttccctcaaaatggttttgaatgaggctttaggcttcctatggagatcgttggtaaaattttcagatgcttgtatttttactttggggcatttcaaagtggatatagtagtattagcagtctttttatttatctacttaaaaaaaacagctacagccctaatgccaaatgcaagaggagttccccccctagtgtcccccgagagtggaagggtggtgacagaacctggctttgcccttcctgtaagaaagaggaagtgagcagaagaacagtgatgtttactccccaggtcatcttgtctcatggctttagataccgtcatatgatttatgtctccaccctcatacacctcaccatcactcagcggctctgatgctggatgttcgctaggcaacttaaatcttatgtgtccaaaactcaacccagtattaccccatgaatttgatttcctccagtgctgagcagctcattaaatggcaccaccattattcacctcaatggtcaagccaaacaccttgaagtaattctcaactcagtttttccttccttccttcattcaactaacaccttgtccagaccaccagcttttcttctatggatggcttcagtagcctcccagttgatctccctgccactacttgctgtttctcctcatctactccgcaacacagatgaacacacatacacacagttttctgtccgcagtgccagagcaatccatttcaaatataagtcagattgtgcctgtctccactcatacatctctggtggctttccatcgtatttgtgttaaaagctttttacagcagtcagaaggccctttatgatgtaatagtacttggctacctctcccttcaccttttcttacttttcatattctgctttggccactctgaccctccccttgctactccttgagcatactaagcacatccagtctcagggcctctgccttagaaacttctccctccagatgcctgcatgtcttcttccctccattcaggtttctgctcaaatgttatctcctcaggagggccttccttgactatcttatctaaaataggaccccttcacttttacctggcttcgtgtgttttcgtagtctttattgctatatgataccacgttacacatttgtttatgctataatctgtccacttagaatgtaagcttcatgaaagcagggacttagtttacccacatcctatagccctagcatctagaacagtgcctggcataattagacacagtaaatatgtgttgaataaacatctaaaaaccatcagagtagaagatgaaaagtcagacttttggtaggggttttgttgtggccttgggcaagttccttagtagtttttatgcacatgatgtttcccatctgcagaattaagaggttggattagattggtggttttaaaactgctccagggaattctaagggttcttcagtgccatctgttgctagaagaggatgagagaaatgctaaggaagccaggcttcagaacgcccgactgcaccctctcactccttccaggattttattaataacctgctttaactgtttcatattgggctttcataaagacatggggttcagctactcaaaaaaaaaaaaaaagctaaaaaattcctggtctgtgtgatctctaaggttcttttcagctctgaaatgtctaggccagggttactcaaaccttgacattattgacattttgaccgggttaattttttgttgtggggctgccctgtgcattgtagaatggttagcagcatccttggccttttcctactagatactaattataccacccctccccagtataacaatcagaaaggactccagacattgccaaatgtccccatagaggcagtcgcccctacttgagaaccactagtctaagaaaaggacagaaaaatggtaattccataaaagtggcatccagggaatacaaataacggtgtaatgagataccattatgtactggctaattggcagacattttcaaatttgagtcttccagttgagaatatgggacaaccagaaccgtcaatgatggatgtgtatattgaaacaactacattggaaaaccgtttgtcattatcttgtaaagttgaagatgtgcatatcctttgatttagctatatagttcttgggtatgtgccctagagaaacatgtattgcagagcaccatacaagtataaaaatgttcaaatgccaggtacagtggcatgcacctgtagtcccaggtacttgggaggctgaggcggacagatcacttgagcccaggagttcaaggctgtagtgcatgatgatcacacctgtgaatagccattgcactccagtctgggcaacatggtgggaccctgtctctaaaaaataataataaaaatttaaaaaaatttaaaaacgttctagcacttttgcttgtgataataaaaaactggaaaccaccaaaacattcattagctagagacaaatccagtaccatagataagttgtggtgtatttgtatatttgtaaatagtatacagcagtggaagggaacaaacaactgatacagcagcttgaatgaattttatgagcatcatactgagagaatgcagcaagacaaaagaaatacatatagaatttacatagaatttgagaatttacatagtattctaaaacaggaaaaatgagcctacactgttttaaactatacatgttttatgagtcttctgtatatcacctatgcaaaagcctgattcagaaggatagagctgctctgacaaaggcctgcggctatgaagaataagtgttgcctcagttgttatttgtaacccc

SEQ ID NO: 1884941 - DNA, 4001 bp, Homo sapiens
tatggatatgaagtatcagaggtatatagtgtagtgattatgagctcagcctcaggactagactgcctgggcttgtgcctcagtttcctcattcatgcttcggtttttccgtctttaaagcgacctcagttttattatctgcaaaatggggataacagtagagcctgccccatgggaggttgttttgcaaggactgtgatgttgatgaagtacgtacaagagtgcctgacatgaagtaggcaccaaataagcactcagcgttctcatggtgtaacacgcaataatccattcaccctgagatgaacttctcactcgagctttatgccttagtgactcctactgaagtgggtctcctgggtgtggtcttcagattccattcctgtgtaacctgctggatgtctgttaggcctggcctccctctggcacctgcaggttggcacctaatcacgtgatggccttctctgctgggagcccagttcagatcagaactgggtggaggcaacaaacaccctgaaaattattagtgggaaaataatgcttctgaggtgtttgtgtttgtttttctctaaaatgtaccaagagtttaataagcatatcaagttatacagaagccatgtgtttattccaaaaataatctattgactagatttgtaaagcacactaagaaaataaatagtgcatatattagaatttccacctaagttttcactaatttcccttccaaggcctttctcattctgtgtagggttcagatcagaacattcccacctgtgcctgcctaacactcaggactgcacgcaggcaggagtgggcccttggaaagtgtcaggagggagattaagaacaggatggtggagggcgggtttgttgggggaggagggtctgaaaggatggaggctgaggaagagcccgggtgtggctcagccctgcctctctctcttctgcaggagccttcttcatcccctacttcatcttcttctttgtctgcggcatcccggtgttcttcctggaggtggcgttgggccaatacaccagccaagggagtgtcacagcctggaggaagatctgccccctcttccagggtatgtatcctcccccaccttccccttcatggggccgccatcttgcctgcatccccccatggtctctccctgcctacccatccgctgcttcacccatccgctcactcccatatcctgcgccaagtgcagaatcaggcttcatgggtgggccggagagagcctggtggggaaacactggctcccgagcaagctgggacccttagcactgatggtggggaggtgggggaggccagtttggtgctgatgcctcttggggcaaccatgggacccctgcaggggcagaagcgaggggctggagccgagtgaagcttggcttacctatggctctactcacaggctctgggtgctcccggggtgctgtgcctccgccagaacacagtttccccctgttctgccctcgaccccagcagtcgtgtaaatgtcccgctcagctgggtcctatgcgtaggtccaagcacgctcacggacagcacatgcagggctggcctctctggaacacacagacggcttatgcgggtgccacggtcagggtgagcaaacggagcactggaatgcgagaggagagaggtcgtggctctttccttcttttccaagtcaaagaggcggcagggcctggcatctcagcgggaagcgcgtgcaccgcgctgtgctggtgggaggtccgggctgccctccccgccctctgccggcctctccgcccgccgcactcccctctcccggagctgccgtactggctcgaggcgcgcccccgcgcgcccccgcgctcccccgcgagccccttctccacccagcgccgccccggcccctctcccagacagccccaccagaacgccggcccccggctcggccatcccgggtccgcttagttcaccgggctgacccggggctgccggacgggccggacggccgcgagcacagcgcgttccgccgcggcacaggggccgcttgtttgtgtgttttttgggtgtctgtgtgcgcgctctcaacgccccgcccgctccccgcggaccctctgccgtctgcgggtccctcccgcgcagcgccacgcccacccccgcggcggacgcccgggccgccccaacgccgctgcgcggtggagaccgcggtggaacccgtccttgccagggtgggctcgccgggccccaaaggagaggttttgttcatagtcagcattgatttttcagccaggctgttctgaaaggtccacagtccttcgttaagtagtgagcacttcgggaggctgaggcaggaggatcgcctgagcccgggagttcgagaccagcctgggcagcatagcgagaccctccccttctcccgtctctacaaaaaaaaagttaaaattagccgggtctgtctgtggtcccagctactccggaggctgaggtgggaggatcgcttgaacccgggaagtggaggttccagtgagccgagactgtgccactgcactccagcctggacaacagaacaagactccatctcaaaaaaaaaaaaaaaaaaaaaaaaagaaaagaaaaaagaaagaaaaatatgctatgaatggcttctcatgccactggataaaccccaatggtgctctttgtgtagcacccaatacccttgtaacctcaactggcagcttctatgtgacttttttgctaacattgatctctcttgtccctccccatctctcccccactctggaaggcattggtctggcatctgtggtcatcgagtcatatttgaatgtctactacatcatcatccttgcctgggctctcttctacctgttcagctccttcacttctgagctgccctggacgacctgcaacaacttttggaacacaggtatccatcatttcagcccctgggatgttgcctgttaggggctgggctgcggtggctggtgaatccaagcaacgacggggagtataagtgtagcagaacctgcctggcagccaagccacgtgggctcctgggcagctctgctccttggctcctctgaggccctcaggccagccactcggacgagtcagtgtggttgggagaacccagagggactgtattaaatgactgcaagggttattgccacttactcatttgtgcgcttaacaagcacttactggacacctactgtgtgttaaacacggtgccaagggctggagattggtacgaggctgagcaaaagcagcagggacccagccttcactgtgtttacagtctggtggtaagaacagacaaataaacacaaccactacaaattgtgataggtgaacgaaactgcagaaaccatagaacaaggggagggagaagtgtcatctgaggcctgaagtgagagagagcccagcatgggggcagcattccaagcagggggaagagcaggtgcagggccgcagtcccttggcctgccaagtggagagacaggaagtcagaacgggcaagcggggagagtgcattccgtaccagccgcccatgaggggactgagtagatctgaagtctggatactgtctgaggttggcagggcagccaggtgagcaggcagattcacagggaacaagagcagggggaggaagagctggccctatgagcctcctgatgccctggagagtgggggctccaaaagaagctcttggggctaggagtggtgaggaccactaggctgcaaggccagagggccagggggactagggtataagagcatctctctccatcttgtccctaaccttgtccccaacagagcattgcacggactttctgaaccactcaggagccggcacagtgaccccatttgagaattttacctcacctgtcatggaattctgggagtaggtgctgggcccatttgccacatatgaagaggaaatttggatgtctgagctgtgcaagtctgaatgtctggggtgcaagtttaagattctgtgtgtgctttccagcacttcctc

SEQ ID NO: 1884942 - DNA, 4001 bp, Homo sapiens
catgtggggacaatgacaaaaatgccagctccccaagagaccttcactgacacaccctggaggggaaggtgggggatgcaggggcaaaccctcacagctggggtgaggttggaagtctaggctccccacgaggcctctgtggatgtggtgggcatggcactgcaaggttttcagtggcatttggctggagtagggcagttgttgtctaaacatcttctgtcttgctaggcttcccatttcctgtttctttggttagagaaagcagctttttcttggggcttctattgtctctgcccattgcatttccaagttgttgactgctccagcatccagcaacttggaatctatttcctacaatagctaggatatctggagatctctagtcagcctgccctgttctctctacctttcagagtcttcttaggtttgttttacatatcatgtgtactttttacttgccttgatgggaaggaatagagaagataaatgtaggtatttcttcttgtcccagaagcagaagggttatgcttttttgtttgtttgttttttgtagttgttgttgttgttgtttgagatggagttttgttcttgttgcccaggctggagtgcagtggcgcgatctcgactcactgcaacctccgcctcctgggttcaagcgattttcctgcctctgcctcccaagtcgctcggattacaggtgcctgccaccatgcccagctaattttgttatttttagtagagatggcgtttcaccatgttggccaggctggtcttgaactcctgacctcaggtgatccacctgcctcggcctcccaaagtgctgggattacaggcgtgagccactgcgcctggctggatcatgcgtttcttatgttttgagtctaatttgcaagtgggaggctgggagacattttctatccctgcgaaacagaagaagtgattccttttcattttgttcattttcatcctgtttttcctaaagccacattactttcctttaatccacatgtccgcctcagcacatgtcaccatgtgctgtgtttgggacgtagtaaatagtccaaagagccaggccggggtggaagctgtgattttgacgggattgacagtagactgagaactttgaacttttagccttggggaacaattttatgtgtttattctacaatgatgatcactggtgatttgtccaaaacatattataagtgtgaggtgtggaggcaaaggagttactggaagctggggcagggcagaagcccagtgtatgaagttgtgcagaggacaagcaaaggacagagaccagtgaatcggagtcatcccctgaggctcaaccccgggcaccgcctccagctcttctccacctgcttctaggcagtgaagtcctaggaactagcaagaaagtctgtccttaagtttgtgggacaagcatttgttgcacacctactatgtccaaaaccctgtagagttaggtaaaaagacatcttagatcccagctctccaaaaaagcaaggatctaagtgtacagagacttcttgcttcgtgatttcttcttcatcctatttatccccttcttatacccacaggaccagacctcacatgccctatcagagtctcccaggtggtttttccagggagagagaacattaaacatcaaacaaacatatatagagaaaagcctctcacccaggcagcctgagctagctgcaggagcaagcattcttctgacttctgagacagtacaaggtgtgtccaggtgacttacctgtcactgggcagctgccatgcgcactcctcacacctgacgctgctcagggagaagccaggcagctataatagtgttcttggccggagaacatctggcctagcaggcagggtgtcatctatgaagctgggtggagagaaagctgttggggaaaccagccccacaccacccagcggataccccgagtccggcggagacaaaggagttagaaagagacagaacaagcgtttaaaaggcaggtccaggggaccagagcgttggaggcttgctcacggcccagagctctgggctccacccaatttattggtttacaagctctttgttcttagggcagatgggaaggggaggaagggatgaggaaaaggattaatcagtgagtcattcgataagatgtgtaacagtggcggtttctgtgaatttccttgagcaaaggcgtgtgtctaaactacttaagatctttaatgactgaaatgggtgggagtgggtttcaggaggagccaagatgtttgattatactcctctgcttcaagggagtgttatctccctgagcaacctgtggaaagccgctgagcaacctgtggaaagccgctgagcggttatcctctcggggcataaagacaaagaaggcaataaggagactttgctcctcagaggccacccgtggcttcccatgggtgtctcacacaggggagaccaactcaactggcacctagaactctctttcccacaaaagctaggctggttctgattcttaacctgctccagcagtgacacactcagtcccacagggagtggacgacccccaggaagaagatgatgttttggaggaaactccccaaagccctcttcattgggctgactctggccattgctgtcaatctccttctggtattttctagcaaggggactttacaaaacctgtttacgggtggtctccacagggagcttcctttacatctgaataaacgctacggggcagtgataaagagactctcccacttggaggtggaattgcaggatctgagtaagtttacaatgctaacctggaaggtgtgtgtgtgggtgtgtgtgtttggggcacttaggaaaaagggatatggaaggaaaaatgggtgagaggtcacattttcatctcagtcgctcattgaagcatctgacactgaattctgtgccttcaaatgggagatgggtattgagaatgaagtgagtagaagtggaaattagagcaagcagtatgggggaggtgagcatgtgtgtgtgtatgcgtgtgtgggcttgtgcacatgcattatcattatatctacatatgtgcaggcaacgagaagaataagaatcccaagggccatagacctgtccttaggcctattgaaggggtgggttgcacctccacacctgtgggtgtttctcgttaggtggaacgagagactttggaagagaaaaagacacagaaacaaagtatgtagagagaaataagggggcccaggggaccagcgttcagcatacggaggatcccgccagcctctgagttcccttagtatttattgatcattcttgggtgtttctcggagagggggatgtgtcagggtcataggataatagtggagagaaggtcagcagataaacacgtgaacaaaggtctctgcatcatagacaaggtaaagaattaagtgctgtgctttagatatgcatacacataaacatctcaatgccttaaacagcagtattgctgcccgcatgtcccacctccagccctaaggcggttttctcctatctcagtagatggaatatacaatcgggttttacaccgagacattccattgcccagggacgggcaggagacagatgccttcctcttgtctcaactgcagaaaggcgttccttcctcttttactaatcctcctcagcacagaccctttacgggtgtcgggctgggggacagtcaggtctttcccttcccacgaggccatatttcagatggtcacatggggagaaaccttggacaatacctggctttcctaggcagaggtccctgtggccttccgcagtgttttgtgtccctgggtacttgagattagggagtggtgatgactcttaacgagcatgctgccttcaagcatctgtttaacaaagcacatcttgcatagcccttaatccatttaaccctgagtcgacacagcacatgtttcagggagcacggggttgggggtacggttacagattaacagcatctcaaggcaga

SEQ ID NO: 1884943 - DNA, 4001 bp, Homo sapiens
ctgacagcagcaaatagggtaaactggaggagaagaaatagaagaagactactgcaatgtcctggaagaggaggtgtgagtgcctgcctcagcaaggtggcaattaggaaggagatggtgccaagggagacatggcagagaaacctcctccacacatcctctccagtgcaatccctgggttaaatgactcctgacacaatgctttgaacagccaaatagaatggactctggagctgtcttgtttctaattttgtgccttaatgaccagttgataaaaaccatctaatgcctgacttaaggaaggtcccaagtgttgggacccgctctgatcacagtcctctggctacttacgcaggatattttgcctgtctacatttatgggagtcttgttttctacactatttaatgtgcccttttctgaaagattataagaaaagaagccagatatttgaggtcagaggttagagcttgacgtagagatagaaggaaaggagggaaattatagaaaaacacaaaagaatttattaaagaaaagaaattttcattggttcaaaaagacagctagggccaggtgcggtggctgacacctgtaatcccagcattttgggaggccaaggcgggtggatcacctgaggtcaggagttcgagaccaacttggccaacatggtgaaacccagtctctactaaaaatacaaaaaaattagctgggcgtggtggcacatgcctgtaatctgaggcaggggaattgcttgaaccaaggaatcagaggttgcagtgagccgagattgcgccactgcactccagtctggcgacagagtgagactcggtctcaaaatacaaacaaacaaaaaaagactgctaggggtcctggaccatccagaaatataaacacaatgtccaagataatgggtataccaactgattttctctattagagaattttccaatgatggacatacattgcaagatgattccacagggaaaaagggtgtgtgtgtgtgtgtgtgtgtgtgtgtgtacataagcatttgcaaaaaaccgttaccaaagtttgttgctatttagctcaccatttctgattacacagcaacccccatgaggttcccttcccccactacccttgagagaattaaattgttctagctccaagacggtaacataagcatctgcccatctatctccagtgacttatttactatgacttctccttcaacctgcaggtcaaggattctctgaaacataaatatttaggtcaagaaaaatagaggaatttatttaatatagtggacttttttcactgtgctcaatgaatatctccatgcctagtgcctgtgctatcagaggtttatacgatttagaaaaagcaatgttcactgtcacctcagacaaaccttgacacatcagtggcttaatgttaccgcaaacatttgtttcttgctgacatcgaagtccaataacaggtgggtcaagcgggctctgtctcagagctctaccatctggtatatgtgccatctaaggccactgtggtggaggaagaaagagctgaaggatcttgcaggctgtctgtaaggggcatgcttcacgcagcttatctcactgtgcttatttcgttagccagaagtcagcaagtcgaggctccaacctcatacaagggaggctgggcatccagaagagcacaggaatctttggtgctgcggagcttttgctcaagggcttcctagtggccatgtgacacccagagggtccgtaggccacattgactagctccgtcccaacgctgcccttgggcttccagcattcattgcacccccgcccccaaccgtgtggttaggagaaagactgcgaatgtcctgttaaaacccttgataaaagatattgccaagtcctggctgtgggatgaagatgagaatccttaccatggggtctgcgctcttgactttggttgtggggtgaggggaagcagaggagaaagagagagacagagacaatgggaggtgaagaatgcacaagcagctgaaacattgcctcattgtgttcccagattctgatactgcatcactggcttccagagcgcctgtgtgacgtcactggattccagtctctatatttgttcaccatcagtgcctcttactgtaaataattgaaaggaatataatagggtgagaattattgttgcctcccccctttcgcctttcataaaatctttttatatcagaggggtctggccccagccactcctagctctataattagttctgggagctgtgaggactgagttttagctaatgacatttcacagttcaatcttgaagtacctcaggctttgtgatcttttttgaagcaaagagctagggctacagatgaacctgggtaatttgcactaataatacgtcagtctgtcagcagattcccaaattttacaaataagcaagggaaccctgcaggctgatgtgccagtcagagggtccttcccagccttcatgctcccaaagcagatgagagtgggcttggtttcattagtcacagctggtgggttttcattatcttcattctctcatgtctgccttggccatcattgagccacacacatcttcaagcaaagcattctctgccttgagacacactagttcttaaagtgctctagacttcaggagaacctgaagcccctcacagagcctttggagtgcatggctatgaggcctgggcacacagcgagacatgtagttgtcactatcacccagtgcaaaaacactcagaggggctcatgagaatcctgtcttcagaaactgaggccccaagacattcaatgacttgcaagtctgttctttcctgtccatcttctctcttctctaccacacttcccctctctctctctctggaaattacctggattccctctcttggcctccagacgggtcaatatttccctgcttttgcacatacccttacctctgatatcgtgcccttcccaccttgttctgctgaacttcctctctaaggcccagtgcaatcatttctcatctttgaagtctccttgactttgtcccttcgaaactgagttttcactccttcttttgtgctgtcatagcctcttatgcttagctttatttcagcaataatcacactgtgatataacagtgtatgaactgtctttctccatcacgctacaagcttgagggaatgcactctatcatccttgtcttagtatcaccagagcccaggtgctttagacacatagtagataatcaatacaagttttgtgagtgaataagtataaaagtgttgaccctttccctatgcacaaagataactttaagactgagaaagacaacaaatgtagaatgcttgggatgctttagaaaaagcgggggttggggggtcactaatcaaatattattttgagacttcaagtctccatttgtccttatctcccaggacacaccgtgaggacaggcaattgcagtttcatgcaaggccctccccctttcttctgctgtttacactggatcagaaggtggggcaagagtctgattgctgcagtatttgcagggctgctgtaaaataaaacagtctccatggctgagaagccctgtggccagggtgagccacacttcacctcgtcctgaagctattgtgcttggatattaatagccctaggcagtgttgtctgtgtgggcaagtgctgctttttccgagctgtgtaagccccccatctcccagagacaaagtgctccacaaataactgcagcatgttctgaattcctctgggcggggagctttggggataattagcaaggcaaggaggagcaggggtttagacagagcacccatcaccaacagctcctggcagcccacagcttggggtggggagtgggtcagggctagagtgcaaggagcccgggtaggtagagagggtcagctcttctggatttcaagccggcctctaaaagaagccagctggagatctcaagcaaatcactgaaattggttcagtcctcctt

SEQ ID NO: 1884944 - DNA, 4001 bp, Homo sapiens
gtatttaacatcttctttggattccagcaaagtgatcctaaaatttttctcagtttcaatgaagagcagttgaacttgtgccagaattcaatttatgtaatagatgaaagattgtagattatccatgttaaaaatgatgggataatcagaacagcttggacaaatccaggatcctaaacaggcttcactagaaaactctacacaaagccagaacttgcaatggcattaatatctcatttatttatctgcacagtagtatgctaaaaaaaactacaacacattgtttgggagagcaaaactgtttctcaagcatggcctttgaaaaagacttgctaaccaaatgcttacatggaactgatggttccttagcactacgtcaggttataatccatgatcctgatttcttgaaacttctttaatatattctgggtagacttacattaaaaagtaaattagtatcagtaataataatatcctgccaggctgccaggcagctagactggaactatgcttgctacaaagttatttccagacagactgtgagcacactgtgcctagaagttcacatcaattttataatactgtgtctcaaattgtatgatactgtgtctgtgcattgcttctttagtacttcctgggatttagcttggaatggctagagaaaatgagcaaattagattattttagtaaacaaactcagagatgaattaggcttttaagagaggaaaaacacttacaggtgaaggtattttaacaaatcgctttagcatccatggaaagctttcaaatcacaaacaaagggagaatacttatcctatcccatagagatttaagctacatgtctcatgggcatatattagcctgccaataatactagggtgcgagtttgattgtatacatgagaaacattaaaaagaaataataagaaatgtttaggcataacatttgtggctgaatcttagtctggcttctatatgatcatcagacgtgacagatgatttcagtgatatgagttgagacagaatctcaaatgtgttatgaaatttttaatagaaagagaaaaagatgagtgggaaggaaaaagcacagactgtggagtgaggcagatctgagtctgaattttagtttcatcaattacaatgtggaaaagtgagttgcttgaccttgaacattttacagattgagaaattgaggtttagagattaatttgcccaaagtctcatagctagcgagtaagaagctagaggtttcaaactggggactttctgatgtcagagctcaagcttgtcaccaccgtgctcctggggaaacggtcaggagaaagccaagtttccaggaaactggaatggccgcagtgaagaatgaccctcttatatcctgctgattagatgaccagacttggtcatcacagactttgagcatcacagtggaagaggggccagaagaggagggcagtttcctgtgttgctccggagttgcctcatgttgcccacatttttctggggctgacatatatttttccagtaggtgtgacctgagggtgttggggctttacttttgtgctggtgcaggcagttttcaggctcatataaacactcactcggctgtttatttattcattcaacaagcatttcttagacacctcctcttctaattcttgggccagtaaataagtatggtccctgacccaacaaatctagctcaggttcagagatgcacaacctcattccagcaaagctttctgtagattatcgggggcagctcttactacccttgatctttcccacttctcagctattcctgtaccaacagaaagctctcccatggaggaatggcaaagagatggaaaaatgcggctgtgaattgggctgaagttttggggaaggatgtggaagccagagactaacaagaagttttgatagtgggtgtgatgtccctccccctccctgctgttccatttccttgggcacttaggctggtctcatgatctaagggccaactgctcatgtgaaaatccatcccagcatcctcagctcaaataactgctgcttgccacacgcctgccccaacggaattaacggaagctgctgatagccctgctgacctcattggatggaaccgtgtcctcagcagacaggagctccttcctcttctgagtgagactccctcctatcttggagcaggaagtcctctcaggagaagtccaagcttcagacagagaaggagcaggtgccattcatttactcccctcagtgttgacccaaaaggcagaggctgagacgcaaagcataatttaaagagtttacttgagccaaagtgaggacagctgcctggaagactcagacccaagtactcttggctgtgagcttcctagagcctttgttccaagcaggtttttaaaaacaaaagactgggaccgagagagtgggctggtacaaagttgttgatcaggaactctctttggattacagaaacaaaattgatgagcaattggttattgttaagttataggatgtggtttatgcttctggtgagacactataataatcctaaattaaaattaattcatagctacttgtggcaatagcaagcagttttaagagatgaatacatagctcaaagcggggagtagggtgtgattgctctcattttaacgtctctccaggcctcatagtttaaaaaggattcaccttcctcagatgaaagctctttaggttttgcatcaggaacctccttttctgctttcttggagggtcaggatgggtcccatgaagagctgctggtggggacagacagaagccaaggagaggccgggcaaggaagctgaagtgcttggcagggggcaacagtcccctgcctgcaaccaacgttaaaaaacactgtcacttcaggccgaaagtggtagaaaccagtttgttaaatcacacgaatgtatatattaggcatgcctggctagtcctttgccaagagatcttgtagcataactgcaggcaaatagaaaagacatgaaaatcgttaatcactgcacaagcttagggatcagttctttttggagggtggtgagtggtggaggtactggaaaatgtgtacagaaagagtgaaataagtggaagaaaggccctaggactcagggtttgcttacagtgggatcagagacacctggaaggatgaagacaaaaatccagattataattggccctgggagtgagacttcatgacaattgtgttaccttgagaatttctttttagttcctggcttcagatttaaggttatggttgatggatgaatatacttttggaatctacttttggaagaccttctctgggctgaagttgatagctaggttaaaatatcaaggacttcggtaaatctctagcagagcttcactacagcagagagggaaaaacaccagatttaacatttcattcttggtgctgctgagctgtgtgctctaggacaagacatttaactttttcagctgcgtcctagaaggattcacacctatctcccaagactttggcaatgattaggagggagaataactaggaaaaagataagtgaactgtgaagagctgtgaccttacaatggtgacggtgacggtgatgatctttatactcttgggagggttggtgcagattcttgcctgcagcaatcataagcagaggctaatgcttccatctttaagattctcatagtaaggttaaaagatactgatattacctaatgtttaacataactggacccactacctactgcttcatgcacagaagttacagggctgagggaccctccattagccacactgaggatctgggttataaatgagtggaatgtgtaaggggagaagagatctttagcgatctttgagagcaatattagcagtgaaatgaatgcaaaccacatcttgcctctttgaagtaataaaggaagggaaaaaagttatgcaagcaaagaagtgcttttgtttccccagccatgaatcctggttaaaaattgcac

SEQ ID NO: 1884945 - DNA, 4001 bp, Homo sapiens
ttaaggatgactccaagatttttgccttataaccagtcagcttctgccttcactcccctatactcagttctcaacataccagctagagagattattttaaaatgtaagatgactgtccgggcgcagtggctcatgcctgtaatcccagcactttgggaggccaaggtgggcagatcacctgaagtcaggagttcgagaccagcctggccaacacggcaaaacctcgtctcaactaaaaatacagaaattggccgcgcgtgttggcgcgcgcctgtagtcccagctactggggaggctgaggcgggagaatcacttgaacccagtaggtagaggttgcagtgagctgagattacgccactgcactccagcctgggtgacagagcgagactccatcttggagggggcggaaataatgtgagattactgctgcccaaaaccctgccctgcatctgaatgtcactagagcaaaagctgaagtctgagagtggccaacctgacatacctgatctgcccctctccctgtccccagcccatttacttccctgaccttaccttctattcacttgcccagctccaggcttgagtcctcctcaaacaagccagccagactcttgcttcgtttcaacctttgtttcctctgcctagaggaaagcactttcacccaaccccataatatccacatggccagttctctcactcctggcaaggctttgctcacatgctctcaatgaccacccttttaaaaattgccaccacccacacccacactcctgatcccctttacccagctctccttgttctttttctatagcactcattaattctggaatgctacctaatttactcatttatcccatttattgtgtagtgtctgtctccctcctctagaatgtatgccctatgaggacagggaattggtccgttttgattatagatgtatcccaaccacctagaacagttcctggcttttgctacgtgctcagtaagtatttgctggtgaatgacacaggctcagggcttggctgagtatgcgccgaggcaatggaaagagactggaaattataaagccagtaggatgaagcaggtgcctgggggtggatcagctgcaggtcctggacagcagggagattatttacccaggagatggtggaggcgggcatccctctcactcacctccctaaaagcgtccctgttgcttccgatttcagatgggcttctttgaatcactttctcagcttccctgccttttgactacagttttcagctgtttgccttgtgttctatcatagccttgcctcagctctggaactcatttcaaattagatctaccacatgttgacgctggaagaaaccaaagaagatgtcacttacatttttagtttggaactaaaattgtgctctgaggacttcttcatccctgagcttctcactaaacaaatactactacgaatccaattccttgattgccctcccctccccgccaagcacaagagtggctacttggagctgtgaatttaaagaaagggcccaggagcaggccagtcgggtacgttactaaaggatggcacagcctggagtatcccagcgtccttgctcagaacactcttcccatgcccaggagccaaggccccagtctgagaatggtgagttcaaataaaagcattaaaccaggaggaaaggggtccaaccaatctacagggtctccattctccccagcctccttcccacatcagcagcaaagggtcctttcaggaagaggcagcagtctcttctttggcaaagagacaggagaatgacaagatgaagtttaagggcccattctctgtaggagtttgctttgcgtgggaggtgagaggagttaactgatgacagaaagtttaaactgctgagaacaccaaaaaaaaaaaacagaaaaataggcaggtccaggttcctctactgaccacacacatccttgatcagcccgcttaccttggcaaaggagccatttcactaacccagccagtggtcctgggtgactcgtgccctccagagcaaacctgggcccctgcctgcagctccccagtccctcagaacattcccctccagctgctgtcatccatcagcgaatgggggcgaggagtgctcaggccctgtgcttgataagggaagaagttacgggtaggtagtgtaagggttaaacaaagagaacttgactggatggcaggactcccaaacatgtcaggactctccaccagaatcagagtgctggaaggcaggctctacccagggagaaggagaccacagccgccgccctgctgcctccacctccccacacaggacccacgtgaatgaccaagggctgtgggtactctgcgttcccacacaagacacagtcaacacgttccagacccacacagactcaccacgcagccctgggacccaaacattgccagacaaaggaccggggagagtccctcatcccccacgttccagtcactgctcccctccactttcccctgtcagcccagtgctttgcattagacctggaaggcaatctctcccacctcttcgtgccattcctgctaattcccaggccaacctttacccaattccagagaggcttggggaaagctgctcacctcctaatctctctgccatgtgaggagctaagctggttaccaggttccagacccagagtcccaatgccagattagtcccccagcctccagctttcaccctgggccagctccgtctctcctgattctccaaagggagggtactcaggcctaaattcctaaacaagcacgtggagcgttcggcactaggtaaaaagtgggtagaccttccctcttccctcacagtgcaaactgagcaaagtcctatgatttcaggccactggccagaaagaaattcctaggaggaagggacacgacagcccattttcatccctctggaaacattcaagttaacctccaacccagggacaatccccagttgccacagacctgggaaccagactccatgggcccagggcatctctcgtgttctcccccagttcccacacctcccctctgtattgaatgctttctctctctaaaatcattgtgagactcaagctggatgcgttcggcagctcttactcacctgcaaaaggataggtgttgctttaaaggacctcaaatcctgtagcccatgaacttatcactcctctcatcattttccctggtgacctacctctgtattccacattcctccagtcccggctgcagtctcactacaaaatcagacctgggagccccaatcctacaagctttacccataagcaaggagatattcctaacccactggtcacccagaaccctccagtagttgggaaatccctctagctagggcttcccacagagatacaaaattccctgactgtgggttagtggttgcaaaatttctgtcactgctgtggggatagcagagttaccccagggggctgaaagagaggggaatgagaagccaatgatgacacagtaaagagctggaggtcatgctccccctacaacatgcacacatttgtgctgcgaaatttttaaaaagagagcctatactagaaggggctgggtaatggatggcttagggagcctcaccgtgccagcaaagtaggaaaaagacacaagaccaaggctggggaaccttaagaccacagaacagtttggttatcaacgtcatcatcagcagagctactatttattacttaagaccacagaacagtttggttatcaacgtcatcatcagcagagctactatttattacttaagaccacagaacagtttggttatcaacgtcatcatcagcagagctactatttattacttaagaccacagaacagtttggttatcaacatcatcatcagcagagctactatttattacttaagaccacagaacagtttggttatcaacgtcatcatcagcagagctactacttattacttaagaccacagaacagtttggttatcaacgtca

SEQ ID NO: 1884946 - DNA, 4001 bp, Homo sapiens
cctctgtctctttttgttatcctattcaatatgcaaaaccaggctgtgtgatctaaatcaagtttcttatcctctaaagcctaggtttcatatctaaaaattaggaatgatattaccagacttgtaaggctgttgtttgcacacaaaggaagaattaaatgtgatcatttatagactcgcctgagagcatagtattttattattaggtactcaataatttttttaacttacccttaccttctcacctcacctctgtaaattttaacaaaagacaggagacctgcatatttaccaattccttattctctatattgagtaaggtagaaattttagagatcctctaaaaatttttatccttgctgtcttgccatgttatggattcctgaattattttatattactggtcttttgctccattgccacctttcaggacagggcttacatccattatctgaaaagccagacgtatatattaattatcttgatttctttatattaaatatggaccatttaatgcaatgtttgagttagtcttacaaatatctcatttcctcccatgttcacaatagccaaaatatgaaaacaagctaaatgttcatttcattgatgaacaagtggataaagaaaacatagtgtgtgtgtgtgtgtgtgtgtatatatatatatatatatatatatatatatatatatatatatatacaagaaaaaactttccacaagaacctccatgtcctcatttagaatttaatttaattttttacctcacacacctctttttttttttttttacttccacttgacacctttctggggtaataggtatgttgtacctgaattccactctccctcaaaatatctgtctcaaatttgtatatacattagtaggtatcaatcaggaaggtctccctcaacccattcaataggccctgccacaaaatttgaaaagtttaaaaaattcagagccctgcttatgtacatgggtgtacatttttgcagacaaaaatcccctgtgccctacctactcagcaatcttcccccttcctatcaatcttcctcttcccctgaatcattggtcacaactgatctctttgttttctttgtcttggtttttctcgaatgtcatatagctaggataatatgatagcttttcaaaccggcttctttcacgtagtaatatgcatttaagattcctccatgtttttcatagtttgacaacatttcattttgttgtcgaatgatactccattgcatgaatgtaccacagtttgtttatccactcatcttttgaaagacatcataattacttctaatgtctggcaattatgaataaagctcctgtgaaaatgtgtgtgccagtttttgtgtgtgttgggagcaagccccccaaaatccggccataaactggccccaaaactggccataaacaaaatctctgcagcactgtgacatgttcatgatggccctaacacccatgctggaaggtggtgggtttacgggaatgagggcaaggagcagctggcccgcccagggtggaaaaccacttaaagacattcttaagccacaaacaatagcatgagcaatttatgccttaagggcatgttcccgctgcagttaactagcccaacctatttctttaattcggcccatccctttgtttcccataagggatactttcagttaacctaatatctacagaaaccatgctaatgactggcttgctgctaataaatacgtgggtaaatctctgttcggggctctcggctgtgaaggctgtgagacccctcatttcccacttcacacctctatatttctgtgtgtgtctttaattcctctagcgcctctgggttagggtctcccagaccgagctggtctcagcagtgtgtacaggttttccactttctatggttcctagattgtctgttaatactatacttacctctataagaaactgtcaagtttaccgggccgcgagggtgcaggctgcgcagatggtgtggtcctgcgccccgagggccgcagcagctcatccggcagctcccaccccaacaacctggaagggggcgggacttccgtttgtacccggctgtggcaatctgtggtgaagttgaaatgcttttctgctagactggcaacatgttttgattcttctcaaataactcgcaagctcttgtgaagcacaacggcctaccttgtcctgaagaaaacatactctaaggcccacagatgattaaacccagccatttatgtgacaatagcatttttatttttcttatcaagatctgggtatttgatccacacaatggtaaagattcccatgttagccaagatctaaatgattcaaactgatgatactctctgcagaagaggtaagaaccactggcagtagggtggaaggtatgtcattacagatgatgctgacagagaaggtcatctgaacctactttataagaaaggcatgattaaaggagaaaggggaaagggcattctaggttaggaaagattctgaagaaatgtaaaataatatgaaggtgtgagctgatatatttaagaaataatgaatgatatgtgggagtatgtatcatctgcagagatggatgagggaagatgcaagtggaggggaaggctggagccgctggtggaaagacgttaagtgtatttcaatggcctgatactgcaggcagtagacagcctctgtaaatcaggtagcttccttactcttgctcctactgatccctcagtctaaaatgccctctgcactttctctttagagatagagagggaaagggagtcaaacacgaaatctccaggaggccatccctggttatttcttactcctctgttgatttcctttaatctgtgaagtgtcttctaactcgtggcctgaggctttagtgactctgctgactcattgtctggtgctactgattgtgctaatggtcttcgatattgtgtccagtgccccccaccattttgggaagaaattggctttagtttttactcagattgaaattttatttagaaacgggagtagcaagaccaggtgcagttagttacacctgtaatcccagcattttggaaggccaaggtgggaggattgcttgaagccaggaggttgagaaatgggagtagcaaccaatgtcggtagaagaaacagcatataataacaggatgtgataaatctcaagaaaagttacgcacaaattactatggcagcaggaacgagtgagccgcccgatgctgtcagtgaaggctctgaggattgggaaggattggcagggttacaggagacaaacaaatgctacaaataacattccaagtagaaggggaagtgagggtagggaaaggaatgcagacaaggctgagccttgtttggagagctaagttcagtgttgcagatgctcaatgtcataccttaggagggaattgcaaattaaaacaacaatgagaaaccactgtatactatttgaatgactaaaatccaaaatactcacaacatccaatgctggcaaggatgtggagcaacaggagcattcattcaccgctggtgagaggtaaaaaggcatagccactttggaaggcagtgtggcagtttcttacagagctaagtataatattaacatacaatctagcaaccatagacgcaggacaagaactcgggcaaagacgccacagccacacaggtttctgaacagaaaatcaacatcccaaagatcccgtaacataatctatgctcaatctccatctgtatattaaaatccatccacctacctccttagggatttctttttttttttttttttttgagacggagtctcgctttgtcacccaggctggactgcagtggcgcaatctcggctcactgcaatctccgcctcccgggttcacgccattcttccgcctcagcctctcgagtagctgggactaaaggcacccgccaccaagcctggctaatttttttttatttttagtagagatggggtttcaccgtgttagccaggatg

SEQ ID NO: 1884947 - DNA, 4001 bp, Homo sapiens
gggaggggtcagtgtggaggaaggggagatacaaggagaatggggagaagatagacaggagcagctggtgggcaggcatggggggtgggcagtgaggggatggggctcttcattctacagatcctggacattccagcaggcctgcattccaagtgagaaagccaggattgccgagttgtggaaatacctttggaatggtcccttgagcatctggaatactgggagatggggggctagtatggggtgcctcaaggaaagagactgctgaaagaagtggaaaaatattgtggaaatcatcctatccataccgcagacccctgtgcaaatgtgccatgcgcacacacacacacacacacacacacactcacacacacaggacttatggcatgagggagccccggagagccaggctgccctttgcctggcccctccctagtggccttctcttgctatgactttcctgtttccaactctattctttttctctgctcccagtcttgccttccttctttgtgtctctcattctcccagtttgttattctcaccgtctctcagcctctgcctcggtctctcaatcactttttctctctcattttgtttctttccatcttcttgtctccctctcgcccctccccaaattctttggacgctgctccatctgtcctgtttctgccactcttcagcccagccatccctcctacctcagtcccacctcagaaccctgttctgacccagaggatacctttgggagttaagattccaagaatagatggaaaggagaaaagaggctctgaatgagtccctgctttagtgggaggtctgggaatcatactgggttatgatatggcacggaagggcagggtgggcagaaggtgaccagaaagagaagcacaactaagggaggtagggtgaaatgagagggaagagattgaaaaagaaaaggcataggccgggcatggtggctcacacctataatcccagcactctgggaggccgaggcgggcggatcaccagaggtcagaagttggagaccagcctggccaacgtggtgaaatcctgtctctactaaaaaatacaaaaaaaaaaaaaaaaaaagctaggcatagtggcacatgcctgtgatcccagctactcgggaggctgaggcaagagaatcgcttgaacccgggaggcggaggttgcagtgagacaagattgcaccactgcactccagcctgggcaacagagcaagactccatctcaaacaaacaaacaaacaaacaaaaaaggacaccaggccgggtgcagtggctcatgcctgtaatcccaccactttgggaggccaaggcaggtggatcacttgagcccaggagttcaagaccagcctgggcaatatggcaaaacatcgtctctataaaaaatacaaaaagttagtcaggcatggtggcacacacctgtagtcccagctactcaagaggctgaggtggcgggatcacctgagcccagggaggtcgagactgcagtgacctacgatcatgccactgcactccagcctgggtgacagagtgagaccctgtctcaaaaaaaaaaaaaaaagaaaagagaaaagaaaagacacagaatgacaaacactaaagagagaagggtgcggacttaaagttctctctgtgtgttttgggtcagtgtgaaggggaggagctgaggggcatctcttaagtcatattgagatacaggttcaaagacaaggtctggaggctcagccagaaagatgtgatgtccaccaggcatccacaattctggactctctgtcacctacctaggaagttctcagagacctttttctcctctccagacagtcttggagtgttggttccttccccattcacctcctccactctgtcacctctcttcctcccccagtgagaatgacatcagctctggctgcccctgtcctcagccctgttgctgatgtactctcccatgggtgaaacagaaggctaatcacctttgccccatgcattcactctctagtccaggagctggagtttacatagcctagcactctggagtaggagtgggaggaggctgtaccaagaaggtagctgcagaacattgtgggaaaagagggggcatgggcatcagggggagggagagggagaggagtggaggagggcacttgaggaacagaggcagcagcagtaaatcaccctgttggggggctccctctgcctgagctcagtggggtagggaaagaatagacataggggggtggggggaagaatggggaatcgccacatctggcaggcaggtgtctggcactgttcaggctgtagccactttcccagccaaaggggaggaagggggagaggggaggaggggcctcccagcattccctgggaaagagggaaaggctcacaaacagaaagacagaggcttacagacagaaagaaaccaaggaaaagaaataatcagaccctgctcccaggctctgcttcagtcagtgcttggggatgtgtttactcatagccctgaaaaaaaattgctggccaaaagactgggtaggccagggcaccaaagttccattcatgctggaaaacagaaggcaggagtttaacccagaccaggctggggaaactgaagctcagagaattccaagtttgagaactggatagaactccacaccatcacagatcaccaccacccagctctggcactgacactgcccctcccccaggtcaatgctgtgtggtgagtaggaagattaggatgttaaggctgagtattgcttttccccagctcagacaggcaaagacaaaagaagtacctagtctttatccaaactcttgcactccaactttcaatgcaggactgttggcagacgtggtacacccaggtatttttcttttctacctgctgaggagtatcccatgcacaggtgccccatagttgttgagcttaattgtcaggttttcacagaagagcaggcaagactggaaaactctgggtttcatgttctgatgctggagagactctccccattcctgctaccttccttcccccatcctttcccatctgagatactaatttggtctcccttgcttaatcctggaattgcaggtccattttatgagcggcagaggtgactgaggagacccttcaaactgcagtggagaagaggctccccacactcccccctccttaaaaatcctgcagaggaagggggaaagaaaaccaaagcattctgtcgccgcggcaaccataaaacccccagctaaatccatcttgtgagctcaccgccccattaagatgcagggccaggcgctgcgccagcccagccacattcatttgtgcgaataaaggtggaggagggggaggggagcaggctctggagggacggggaaatggcgagaagaggttatttacaccaccgtcctgaccttctggagcagcgctggctccgataaataacccgctcagcgccgtttcagagcaggagtgggaggtgcaggaagtgagcaagggctggagaagagcccccacgcaggtgcgcgtctctgggttactaatggctgaggcgggagcaggcagctggctttgggggtgatgggggaagaactcagttccctgggactcccactgagaaaataccatccccaccccacccctggcgccaatttccaggcgaggggacggagagatgccaaggaggcaaacagccccgtaaattagggatgggggggcactgctaggagtctctgaggtaggagggaagaaatattataagatggggaatgacggggggctggaggaacaggagtagctgccaaaaagagaggaagagaaacagaaacatcacacaaaggcagtttggaaaaaatgttttattcctctttgcacagagcagtttatgaaggtggttttctcctgactccatgcatcttttacacaaagatgcccccttaaatatgccccgttatctgccccacctcagtgctggagaactggcagttagtaagtggggc

SEQ ID NO: 1884948 - DNA, 4001 bp, Homo sapiens
tctaaacacttaggttctaggctcaccgctaactggctagccatatgaccctggacaaatcacttcatctctctacacccatttcctcttctgaaggagaagattggactgatggcttctatcccctcctcactggcctttctaggtcagcttccaggcctggaggtctgtgctgaagtagctctaattaggaggggaccccaagttaaggacgaacccagagcagaggaagagaggatcaggcaaaggcaggcatggtgagaggaaaggcaggaggtgttggggccactgggagaggacttataagggcagaaagagccaagagaggagggatattggggagagtagaaaggccagccaaagaatgactaaggggctcccggtgtaaacaggagcagggaatggacagggagggggcctgtttgagttggccaaggctaggggtggagtggggaggaggactggggcaggacgctatgtcccctgtcccccaccaaggctcctgggaggagctgagtcacacacctccttccctgcacccctccccacccccacccctaatctcccaaatcctgggaaaatctaaagagtttgcctagactgagaaaggagagtgtttggttcacacacgtgttttgctgggctaaaaagcaatcaggcctcagcccttctcctcccaaagggggttcccagcccatggcttgagtagctctcacctaaaggttgcctttttggcaatgctgggcttaaagatcctgacccagagattccctgggttcctcacctaagaaagggtcaggacttgcagatgtgagaatgggatacgggccagcattgccccacagtctggccagccagcctctcccttgggctgcagctggctctggaggggggcttttaaaaaagcagatgggtgatttgggacaggaagtggagtagcagagtgagggggagagtcatggcaggaaaaaaacattgactctgggcactcttattctgagcctttcagcccgaagtggggcaggggactggagaacagaagggacagggttgacaggatattattgacagggtattattctggaaagtgaggagtcctggaggaaagagactgaaaggacttgtagtcccctcccccagactaagataaaggctagaatcctgaaaagtgatctcatcacacagagcctgagcttggggaagaggtgggcagggggtcactgccttccctttctagagtcccttcctctacttccacaggggaatctgggaagaatggggtcctggctttccgctcccattgtttttttggtttttggtttttggattttttttttttttttttttttggatacagtcttgctctgtcacccaggctagagtgcagtggtgcaatcgcggctcattgcagtctctgcctcctgggttcaagtaattatcctgcctcagcttcccgagtagctgggattacaggtgcggaccaccacatctggataatttttgtatttttagtggagatgggttttgccatgttggccaggctggtcttgaactcctggcctcaggtgatctgctcacctcggcatcccaaagtgctgggattacaggtgtgagccaccgtgcctggccagagctcccagcgtttacagccattaggagctgaaggttgggtccctttgcaagactttccaccaccaccaccacctctcacaattctccaggtttgtaggaacccggccagtttaatcaagcaggtactgaggggccagccactcgcaggcttttggtcaactgtcagatccaaggaaggggctcagcagaggtttacataccctaggaccaagaagggggcaaactggagcagaatcctcctgatgaatgaccccaaactcctgggttttcaatactagcaagcttggaggaggaagcagcggaacttgaggagcccgtgtaggtcctctagcaagctgactgcgaacgctgtctctgtacctcaactgttgtgtcccaaatccagctggccagaacccaggcacccggcggccccggaaggcaagggggaatcccagttggccggacgccagaggagtctcctgtctctttagaccccaaagtctcctccctaaagcactgagggagaccccacacacatatacaggcttcctccgcccaccagaggtgattcctttcctcattaggaaattctccgctcccttttccgactcgttttccgagcgtttacgttgtacatctggaaaggaatggggaggaaggagggggaagcagagaggagggggaagaacccaaacccgcccagtctaacccagtccagacaaccggcttccagctggggctggggaaagggggttggaggggtgcgccccccccccacgccccttaggggtgggggacgcgggctcagagttccagggacccaggaatgcccccccgccagccccctcggcaggcggggggagggctcagccgggagtttggcaaactcctccccgcgttgagtcattcgcctctgggaggtttaggaagcggctccgggtcggtggccccaggacagggaagagcgggcgctatggggagccggacgccagagtcccctctccacgccgtgcagctgcgctggggcccccggcgccgacccccgctgctgccgctgctgttgctgctgctgccgccgccacccagggtcgggggcttcaacttagacgcggaggccccagcagtactctcggggcccccgggctccttcttcggattctcagtggagttttaccggccgggaacagacgggtgagtgaggagggctggagacgggatgggggtgggggagccgcctggagactgggggcgcggctggggtctggaggggaccagggcttaagtttgagggtggagtttgtaaggaatagagctgcagttgggggccctggctagagttgggggcccgcgctggagtagggagggcaccgtggcgggtgaggaggggccctggcgtttgagatcagtggggagacatgtgtccggtggggagaggacacggagctggagaagtctgggcaggggtctccgggccaagggagaggagagcgcgtgaatggagagctgagggtctctggctgaagtctgtgggctgctgggacctggggcgggtgggggcgcagagggggcgcagaggccgggaagggcttttgggggctccaggagacctcgggatccgtaggggccattgtgcggcgagagaacgggtagaagccgaatgagctacgtgtagtaggaggaaagtcaaagactgagggggtcggaaggttaaatgggggccagcctcatcctcccctcccccctcaactcagaccggggaaagacccgagagaggacggcggctccctctcctttctcctctgtctcctactcctccctccgcccccaatctctgttcaggcgaggggatccgagaactgggggcgagtgcggggaccctggcactggggccctggggctgggggcgaactcagccaagggcgggtgctgggatgtgtcgggaggggtgtgtgcgcgcgtgaaggggggtgggcggtttccctcttcctctggctcttgggaggaagagaaaagctggtttcctgtagctggtcggctggagctgtgctgagaccgggacttctggggctggggtcggaagctggggagacgggggctccgtggggccaagaacgtcagaatgaaggactcaggaccctggaaatctcaaaggaggatccttattcccaactcagcacagtgataagcagacccggaccccgagtgcctagaaaatggggtactgacaggcttgggaaacaggagttagagtggaagcaacattagaaccaagggtgtctgtttaaatgtgggatggcggggagattgggaagcaagagaggtaggtggttgctcctgggctaggccatagatgccagattcctggtcctccacaatgactggtgtaa

SEQ ID NO: 1884949 - DNA, 4001 bp, Homo sapiens
gcatgatccccaaatagcccaatgaataaagaaacattagttggtcaggcacggtggctcacgcctgtaattccagcactttgggagaccaagaagggcagatcgcctgaggtcaggagtttgagaccagtctggccaacatggtgaaaccccgtctctactaaaaatacaaaaattagctgggagtggtggcgggcgcctgtaatttcagtactcgggaggctgggcagggagaatcgcctgaacccgggaggcagaggttgcggtgagccaagatcatgccattgcactgccgactgggcggcaagagcggaactccatctcaaaaaaaaaaaaaaaaaaaagaaagaaagaaacattagttatctcggcattttgtcttcccaacacaaaatatcaggtaaagggtttcatctggaaaactaaaattttccccacctcttacctcataggtgatgccttgtagacacagctttggacagtagatggaatgaaacgtcagactggaaggatcatgctagtttccctgaattctggtcaatgtcccaagattgaaatgagttgttcctagagctgtgggagtggatatctgaaattacttctttaaaagctgcaggaggctttgggactatgaaatggtaaaatgaaatggtaaaatgtcaacttgcaggaaattaaacgtttcaaatcctgagcttgaccttggaaaatgttgattcctgagcaactacaggaaggaaaatcacagccacagtggactcgggcaaagaaggtcatctaaacacaaagcctaagagctctcccaaacagtagaatgctggaataaggaaaaaacaggacaaataggtcttaactccagtgctactggatcctagtcactcaaattctctaaaagccattgagcccatataatatagtgatttagcatctgggctctggacagtctcggtttctagtgctggttctatcatttaccactgtgtgacctcaaactctctacgcctcatctgtaaaatggggctagcaatagaacctaacactcaggattgttgtgaagaatcagtgagtgaatatgtgtacacttggcacatagtaaatgctcaataatagagctcctgttactattcccatgagctgctgtgagaacacctgagataaaagatgtgaacatgctgtgaagaacacaaatggccacacaaattcaaggtgttgctagtttgtttagttttccagtagacctaccttggtagctcaccagagatctggatgaaatctcaaattgtattgggaaagagtatgccttctataatcctggtagtacctgcaacttgtgtttccaaaagttatttcttctttgtatgtgtctggtgagatgaaggcctaatgctgctggcagccatgcccctagcctgaatcattatcaattattttaataaggcacagatccattcctcacccttgcaattgagaaatgctggaaaggacacaggagtaagagagttatattccttacttcttccttattctaccttagaccctacccctcttaggttctctggccagttgattagctatactttcagtcattccatagatttatgatgcctattcttacataatctaaatgacagaaccagcactagaaacctagaccgtcctagtcaggagttacaaagaccagctttctgcctgtgcagagattaaacctagtatatggggaattggaccattaatttgggtggtttaatttgaaatgaagtggattctgctacttgagaaatattcttggaaggaaaacaaaaacccaaacattctactcactgtgagagtgtagaacagtgtaaaagaatgggcttataatttgggagatgctttgagtttctgcatgaaagatgttatcagaatccaagaatttttgctactcaatagcaatcctatcagaaggcaggctttttcccaaggcctggtggcatcaaccagcttagagtccagagaaaaaagcattagaaacaagttttctggatgaaatgacacatggagttatatagagttagcaaaatacatgatattttgaaaagtactcctgaagccgagctccggcttaagagaagaaatcaacaatgagtaagattctatggaaggaattctgaagagttctgagaatattttccttttctcttaacatggatgaccttgtgtgtgtatatactatcattgacttcagtaaacatttattgagtgactacttagtcaacaaaataaatgtactcccctatctgtatccctgtaaaacactcatcctcttgcagtctctggggaaatctcagcagaggggcattttgctcaacttaatcctcagagaaaatctgaagatgccctcatgtactttcttgcccaagaaaggcactgtctagcagcttacatcccttttggcctgatgactaaatcacagcaaaaatggcccatatccttctacactgccttctcctgcaatcctctaaaggggaagagatgatggatagggaaatgttgggctgtgtgtaggaagagatctttattctgtttttaaattgtccctcaactctccagtaccatgtcacaggtgaagatgagtaggtggacaaaaatctgttgattggaacgtatttgtacctgtttgcaaagcattaggaaaagtacattttgatcatgaactgcaataattagcagcaagcattacactcattgttaatgttgcctctattccaggcagaggtcaacattgcctcatgaatgagtgactcagcattacaaaatagtgaggtgtctcctctgcaattaaatttggccttctctgaagtaaagaaaacaaagtcctcagtaggaaagcaaggttggagagtaatttggcaggatatcgtagtgattatcactatttcataatccttgtggtggaaactgctaattgtcaaccaaaatcttctctccttttcctctgggcatatgccacatgccaccctaagattgcattttcctaactcctttgagaccagatacagtcatgggactatattctcaaaaagggaatgtgaatacggtacaactcctggatcctttgcttaaaatgaaactgatgctctgaatctggtttctcttacaccctaatatatccaggattcatttttgaccacacagatgaggacagggctccttctggggggttgccagagtaacaaaatgagagaaacaagagtacttgaatgtccatgtaaattcaagccacccctgaacctgctgtgctcacttaaggactgtaattcaggagggaaatacatttctcatgcattagattattctcaattctctctatttttggatctctttgagaaagcatctttgactttaccctgatgcaatatatttttatgtaatatagtcatgcactgaagaacaacttttcgctcagtgatggatcacataaactatgatagtcctgtaagattataatggagctgaaaaattcctattgcctagtgacattgtaaccatcataatgttgtagtgcaatacattgcttatgggtttatggtgatgctttgcaaacaaacctactgtgctgccagtcatataaaggtataacacaggctgcacgcggtggctcacacctgtaatcccagcactttgagaggccaaggagggtgaatcacgaggtcaggagttcgagaccagcctggccaacagggtgaaaccccatatctactaaaaaatacaaaaaaaaaaaatagccgggcatggtggtgggcatctgtaatcccagttactcgggaggctgaggcaggagaatcacttgaacccaggaagcgggagttgcagtgagctgagatcgcaccattgcaccccagcctgggtgacagagcaagactccatctcaaaaacaaacaaacaaaaaaggtataacattaaagtatgtatagtgcataatatttgataataaacgaatgttactggcttacatatttact

SEQ ID NO: 1884950 - DNA, 4001 bp, Homo sapiens
gtaaaacaaaaatggacgtctagaagacagaaaatatatgtcatttgaaacatcgtttgtatacatctacttggaaaaatgttttcatccagcaaattgcagggactttctaatttagagctatgtgcatattatgtgcccaaagtttatggaaatatatgtgtacaaaattctcctcatagagcatacatctatttttttgtgagattctttgaaaattccatgttggtaattttatagttatatgtgtttatattagaaaattaggaagaataaacaaattcatagtttcaactctacacaaatatgtggttataaattttataatttaggaacattctagggaaaattttgagaagaaattgttcttctaagacatatttgtgtttttttatttttctatgtctttttatgagtttgcttatttgtatattaatttcagaacaaaaacaatactgtgttagataactgtgaggatgcagttgaacaaaaggcaatgtctttttttcaagttgtttaccatccagcagataaaaaggggtctgttataataccatatcataaatgctatgtttatgttaggtgaagcaatgtcagctggattttggttgtttttttcacataaagttgattgtggtgataagttaataaatataaccatagatgattttggcttgggagactgtatttgcttctctcctgtccaacatttaatcagtggctggagtgaagatggtataaaaattagatatgttgatgacataaaattaggataaatagaggataattggggcttttgcttccaacttatggtgatattttgaattttaatgcagttgttgacactgttgaattaaatgtggtaaagataaatataacagtgttttttaaaaaacccattaaagtgctggatggagaatccataatttaacagaaagttgtgtgaaaaagataaggaatttatccttagcacgaaactctccattttggttaatggcttgacaaggcatgtttagactgtgtttattggctgagacaacaaaagtgctaccatacagtgacataacaaaaagaaattgcatttatttgtgggtatcaaattgttataaggtggtagaagtccagtggtaaagttgaagtaattaaatacatttaaattggatgaaggaagactttaaataagtaagttttcttaggttttaagatcattattatgtgatagaagaattattttttctctgttgagcacctcattttttagttaacacagatgtagatcctaggtgagtgacttctagttaatagaagaaacaactttgtaccactctcagctgccttgtagtgtatacattgtgaggtagtgagtgagctccctgtcacgggaagtttagggcttcatatttcacgtttgcattagatttttggggtccggtttttccgttcttcactagattgacttttaatactgttttattactttagtaaaatgttttctataatgatcaaattaaaaaaaatactcaaatgacttggtttttgtttgttctgggaaatgcccaagcttcatttttaagttatgctaatctccaacttaaagcaagtagtacctgactgtatattgcatcctatggtcttttcggcacagttttccatctgacagacattttcataatattatatgtcctctgtatagtataattttgtattctatatcaaaacttggcagaaactgaccaagaagcattggtttaatctcaagctgcccaatatctgtgatagtgattatatcagtattatctagtatatcactgaattagtttgctagggatgccacagcaaaagaccacagatgggtgtcataaacaacagaattcattttctcacagttccggaggctagaagttcaagatcaaggaatcagcaggtctggtttcttctgaggcctctctcctgggcttgctgatggtcacctcttggtgtcctcaaataatcctttctctgtgaatatatatacctgttgtcaccaagtgtccaaatctctttttaataaggtcaccagtcagtttggattagggcccaccttaatggcctcatttaactcaattacctctttaagggcactatctccaaatgcaatcacattctgaagtactgagaattagcgcttccacacgtaaattttagggaacacaattcaacccacaacacctgcctaatgcaattttctttccatttttctctgattctgaaatatttgactcaacattgtttttattaaaatgcggggcttagaaatgcatctagcaagtaagtgtaatctggccaatgtgtatgtctaaatttgcttatattcctaaacatgtaaagtatcactgataatcaatgatctttactcttgaagtctacagattattttttcctatcacatcttctgcatctttatacataatgtcactaaaccttctcattttctctctcagaacatgcctggtttatcgattttcctttcaagctcatggctgttgtccctattttggcagaactgaaccctgaattgatttctctatcttctctgattacttatttctccatctcctattttgctatgagattacttttccttaaacagaaaactttttttttttttttggagatggagtctcactctgttgcccagggtggagtgcggtggcacgatctgggctacttcaacctccgcctcccgggctcaagcgattcttctgcctcagcctcccgagtagctgggactacaggcatgtgccaccacagccagctaatttttgtacttttagtagagacggggtttcaccatattgaccaagctggtctcgaactcctgaccacgtgatccacccacctcagcctcccaaagtgctgtgattacaggcgtgagccaccatgcctggccaaacagaaaactttattgtcacctcttcctcctccgaaaattgtccaataattctgtatcaattatatgtatttcatacttaaacacaatttaaggctttccttaatatgcccttttctccatgtataattgtattcctccttacttcctagcatgggttttcagccctggaatgtgtgtctcgctaaccacacctttaaatttccatctgcaatcttttgttcatgatgctccattttcctgagtcaacctgtctctgctacttgatactttaaggatcaatcaattttctgctcattccacatatccttttcattcagtttcaatatctgctgactggttcttcttacatacttctgtatcatttagagttatgagctactcattttagtatttggtcttctattacctcacttacttatgttttgtgttatttttctcatcagcttaagaagagagtatccatttcttataaattccttactgtctccataatggggactttaaattcttttcaagtgaataaaatattaatttgcctgcacctaatgtaggaatagctaaatgaaagacaaagacacatagatgaacaatataatccatgatgattttaaaactgttttttcttattttgaaaactttttttctattacttcgaaacattttgtgcttagaataattataaatgtatttccctccaatactgaaggatttggctgcaaatgtaatttattaacttgttgccctaagaagcagtgcatagtgttgactatggctaatcacaaaactttctccacctgctaaggtagactcactgtgtttttttttttttaataaaaaaaaaagaacaagtttacaatatggaattatgtgcttaaagaggttgaattatgacagaaaagaactagaaagaagacgggaagcaagccaacatgaaataaaaggtaatatatctttctttcatatgaaatgcctttattctggggtttttagctttcacttttactaacctaaaatgttatatgtgttacaatggtcagtaagtagcataagtatttggctagaattgtta

SEQ ID NO: 1884951 - DNA, 4001 bp, Homo sapiens
ccagataaaattctaagtgaatctcttttctcttttgcacttttaaaagctatttcccttctctggtttggtcttctggttaatgtgctgaggcaggctcttggcagccagatggaatatcatctatatttagggcttccattaactcttgtgtttgaatctgctgccatttcctaatttcaacacaaatattctacaagagtggattgccatttatgttattgctgtataataaagtcatcatgctaatatgccttatttttcatggagattctttttgctaatcaagcacattccctttttattggtcacataccgatacatgagaagttgttaccttgataacatttaccagcattcaggctggtcagccttggttctggcttttctcgctgtcctttccaggctggtttggataccattcagtgttttctttttggttcatgggagttcagcaacccaataaccttgagaaaagagaaatgagaaatggaaccagttcatcttaggctaaaagattcattttgacagagtaattttttttccctaggataagaaattactgtgtcattccaaatgcatagatactactgtgccaaagtgctgcagagagtttcatgctgaacttttttaagaaaattaattggatgttaatgaaagtttggggctggtagaattcaagggagaagtactctgttttttatcaccacttcccaaaattatatagttgaaggctcttataatgattacaaaaatagtaacccccacttgcttgtgctagacagaatataaagcagtttcacaacatttctgcgttgaattagagtaatcctcctggtatctgaagacctcctctgagcccagtgtatgctggcattgccaccagaatcttaggagtgaggcctttggccaggcttgggggttctaataaatttagcatatgggccaggcgcggtggctcacacctgtaatcccagcactttaggaggccaaggtggacaggtcacttgaggtcaggagttcgagaccagcctgggcagcatggtaaaaccccatctctactaaaaatacaaaaattagccgggtgtggtggtgtgtgcctgtaatcccagctactcaggaggctgaggcaggagaatcgcttgaacccaggaggcagaggttgcagcgagctgagattgtgctactgcactccagcccgggtgacagagcgagactctgtctcaaaaaaataaaaataataaataataaatttaaaaaagcatagcatatggaacactcttctggaatcagtgtctgtaacagaaaaaaagaaaagaaaaatttgaagttgcaattactcagatgggtttgtggacactggaaaggagatgaggaacctacacatcaccttatttccaggagaaggtgggtggcggattcatgcttgttctcaatcgtagcggttgtttggactcagtaggagtatttgctgtgaagtctgtcatatgaaggaaaaaatcaggggtgcaacattgcggccagaaaaaattggatggtgtcatttccagtcaccaaggtgggccgtcagcacagataagacgtgtgtgtctggagtttgctcttttacatgtgcgctgtgacaggcttcttgcttctgtcacatgactcccagctggagaggatgatgaggggagagcccaagctacaccaataactctcagtgccagttcctgctgtttcgtcattgtctccccatcacagctgtaccaaggccacttctggttgccttcttgcttctccaactgcttttctctggtttcttccttggcttctctttctgaaattgtcacttaaatgttgacatacccagactgtgccctttggcacttatctattctcactttacctacactccctggacaatcacctccattcccatggcttcaattaccgtctctactactggcagctctcaaatgaaatctacatctccagcccagaacttgttctgtggttccctagatgtctcagaatcagtgtgtttgaacctagctcatgatgctcccacccccacaaactatgcctgctcctgagatcttgtctatgtaatagtggccaagatttactgtgcttgtgatattccaggctccgttccaagcatttgacatactttacctcatttaaccttttccagagccctgtacagaagatacaattattatccctctcttatactctgaggcacccagtgaatcggtgccttgccccaggttcaacagctagctgtggacagagccagactttgaatgcaggctgttgaaactgtagcccatgcttctaatcactcggctgggctgcttgctgttgtacatttacccaagtcaaaaactggagcatcatttttgatgtcatcttctcccctggctcccacatccaatccaatgccaatccagttccttttacctcctgaataacttgagcctttctttctttttcttttttttttttgctcctgggtcactactatagtccaagctattatctcttgcctgggcactcacgatggcttcctaacagctcttcctgctgttctctcatctctcctttccaccccatctattttccatactgcagccaaagaaacctctctaaaacataaattcaaatgtgtcacttcagtaaaatgctccaatggttccccattgtcagggcaaagtctggactccaatatgcctaaaaaggtatgctctgggctctgttttctccagcctcatccttctccctgactccatcccctccccttgctctgttagcatgccccgtcttcctgtgtttcttccctttcctggctcccggaaggcccccttctctctcttacctcttggccacttagttgtctgatccctttgcctatgatacagtttggatacttgtctccttcaaatcacatgttgaaatttgatccccagtgttgaaggtggggtctcgtggggggtgttttgtcatgagggcagatggctcatgaatggcacggtgccattcttgtggtaatcagtgagttcttactcttaggtcccacaagatttggttgttaaaaagagtctggctcctccttctcttctgcttgctcccttcctctctcaccaagtgatctctgcacacaccagctccccttcatgttccaccatgagtggaagcagcctaaagacctcaccagaaacagatgctggcgccatgcttcttgtacagcctgcagaatcatgagccaaagaaatctcttttctttgtaaatcacccagcctcaggtctttcttgatagcaacacaaagggactaagacagctcgaatgtccttccatcttctctgcacctgcttgagtcttattcattctcaaaggctttggggatctcctctctggggtctagaaagggactttggtgccttggctgtgtgttacagtatggctgtcactctgtgtgccatggtttgtcccaagcacgttaaatatattaactcatttaattttgcaaaaaccatatgaggtagacacaattattatttccacttagcagatgagactgttggagcacggtgcatctgccactctagtagttcaccagaggaagtctgacatggggctctgactataagtctgttgcaagaacacaaaaaacaaatggaggatgcaagacaatccaaagatgagaaacagtaggaagctgctgctccaggttggagggacagaaggaagtggggatgtcaccagaggtgaggcactgggactgcccagcgggaactggagctctagaggaggtgcagccactgtcagagcagccaccccaaactgagaggggcttaagtaccctgacattccctcatcctactgctaagctccaccactgcttcctgtcggctgagctaaccagacactcatgggcaggagcctgggaaaatgtagtctgcagaggtcgcggtaaagatggggaacaaactgagagaaataggtagaagataggccc

SEQ ID NO: 1884952 - DNA, 4001 bp, Homo sapiens
tcagggctgctctgaggggagcgaaggtctggccgcaggcattgcctctctcctccttccaggcccacgccatggcagtccctcccactccgcagtctgcttttgttgccagctctgtctggggcaagtgtgggttggcggtggggaggggcaaaggtgtgggcggaggcaacttctcattttacagatgtggaagcacaaggccaaagaggttgagtgactaacacgaggttacatgacacgttggggccgaggccggtgagaagaatgcatttgaccccgcgtaggcaccatcagctcaagagggtttcagcgacaacactgaggctgggagtcggggaggagttgggagggtctcagacctcctaggtgggtagaatcagagctatccaggcgcctctccccagattctcaccaataaccccctgacacacagacccgcacacccagcctgcaccactctctgcctcctcaccgtgcaagaaaagagagaacctgtgcttttgaggccagtgatgggggcgcagaggcaggggctagacaaggcccagctcacccacagtaagaaggttctcaggttgggccacaagaggtgaatgggccaggccagctcaggcatcaggctgcttgctccctcctgggtatagccgggcctcagctgtggcagcctttcacacccttcaaagcctgccatcaccctgcaggcccctggcccctacccttctcactgttcttcacaggggttcttcctgcctctctcatccccagcagccccacagcaaagaacctgacactcctgtgctgaccagccagaggctggttgcaaaacccctctctgctgcagtcctactcctgcctccccatgcccctcacactgtgcctctccagatatggtctccaaaacgcgggacaagaagccgaagcctcgggcaggcatcggcattctgagtcgccatgcttcccagctgcaggaattgctgggtcaggtgtgaaaccacatttctgtccctcctcatctctgtctcacctcccctgctccccacacctgggctttgctgggagttggggctgaggctggagcagtcctcactgagcacagaagagccaggccccaggcttgtcatcccagcctcacattccaaaactctcagccgcatcagctcactccttggtaggcctggcacaggccctctgcacgttagaataacacaaaaaaatcaagttttcaggtaactaaagttctaggccaggcttagcccctcccttgcagcaggccctcgaaaagtcagttctttccccagggtctcacgggttctgttgccatcgcatgtgccgctatgtgcatacatttccgtttctccaccagatggaaagtgccttaaagatatgggttgtgtatctcaagccttcctgctccatcccttgacctggtagagttcaatattgaagaatacagggtttggggtcagatcaatctgggtgccaattctgactctcccagttactagatgattgaccttaggtaaatctgagcctcagtttcctcatctttacaatgggtatccatgaactgatttacttattcaaacaatatttatgagggccaactccatgtcaaacactgatgtgtgtacaacagtgaccacaacagacacaaatcccggccctgtggggttacttcttagtggagactattggtgcctggcccagagagtgattgtgaaaactcagtgagatgacatttggacagggctcagcacatacgtcatatgtcagcctggcatacgacaggcctgacaagttagagccattattgtgaacatccattctgaaccacagaaccatttgctgagaatttactgtgtgccggcaccatgctaggtgctagggagacaaagacgtggaactctcatccacaccctcaaggaacttatagtcgaatgcacctaccgaatgtcaaatgccaccatcctcatcattgttcagaagcttataaccagcaccaacttgtattacatgcaacaaagaaccatgacattctagaatgtcaggtacaacagagacagctgtttgtcccccagtatccttcagacaaagccatatatgattgaaggttatcagtactgtgcttttggaggattcagaagaagttatatctgattgggagattgaaaaggattggcctgaaggagaggtggtttttgaactgcatcttaaagggtaggcttcaacagacaagagacagtgatgttgggggaggagaatgaggccctgcaggggaccagaatggtgtgcaaatgaaggcgtggaggaaggaaaacatgaggcgccaactttgagctgaatcctaggaagaaggtggcctagcccagagtgaggttggaggctgatccaggcaaagcagctgtattcacagggacaggaggcaactgtctaagaggtggggtttgagggacccccttcccagccgtctacccttggccgagactataacaggctcaatattccaccactaaaaattcatttccttgagtaagcctccagtaggagacagaccatccccagaggaataacatgaaaggataagtctgggccaaggagggagtgatgaggaaaagacagctgggaacagcggagagccaggcggggccaggggccagagccctcaacttgccaggcctcttgcattaccctacttgtccaggccatccatactgacagagcactgctcggctgtgggaggcaggactgggtcactggaaaggggtgggcaggtgtcggtgctgtgtccatgacctccctttgcctggccagggctcctcagcccttcctgctctgcctgcgggacgtgggcagggccacgtccacacagcaatgccatttttcagtgcagtttggcccggcagcagtgtgggtcactccttgtgtgcttgggtggggaccagaactcatttattcaaccaagtgtttccagcccagcctgagagtcatgtcgtgagctaggagagcagaagcaagcaagagaccccctccccgccctccaggagctcacagtctagagggggaagcaggtcttaagtaaatagccacatgctggagtgcagaatcacacatggcgagtgcctcaaagccaaagcccaagctgccttgtggaagaataacagggcagtaatgcagatgggtggaggagcacgtccgggggaggcctccagcagccccgagtgatgaggtggggttggcgaggggatgagtgttctaaacagagggaacacctgtgcaaaggctgtaagatggggaagtacctggggcatcaggcagatcatgccagccttgtggacaggggagggctttgggaagttacagagtaagggaggttgaaggggtgggcacccactcagattggccatttaattaattaattaatttatttattcatttattttgagacagtctcactctgtcacccatgctggagctgaagtacagtggtacgatctcagctcagttcaacctccgcctcctgggttcaagcaattcttgtggctcagcctcccgagtacctaggattgcaggcatgcacaccatgcccagctaatttttgtatttttagtagagacagggtttcaccatgttgcccaagctggtctggaactcctgaccttaagtgatccacctgcctcagcctcccaaagtgctgagattacaggtgtgagccaccgcatccagcccagattggccattttagaagcccccctggctgcaggacagagaagagacacgcggaagctaccgctgccattatgggagaggtgatggtggcctgggcttgtgttgggcattgaaggtggataaaattcacagattcaggggctgtttaaggggggatctggtgaagggctgcctggcggtagaaggtgagagagagggagaggtttccagcttgagtggacatgaggaagacagaggagggtccggcccattcctggagggttgccattgct

SEQ ID NO: 1884953 - DNA, 4001 bp, Homo sapiens
cccttaccttccctagtctgcaaggtggcgacgcacagaaaatgtgaagcaaaggtgggtatctgattctacctgatagggggagagggtctggagtcccttcctcctcccaaacaggcttctgcaaccacactggcatcaaccctccacctccacccctctcaccactggggaacccctcctgggtgggaggggtgctgtactgggccctttaagaaccaccctactccgccttctggagggctggccagcccaggcgggtggacagcaagacagcgtttgtcttggtgctgtgcccagactgcagctggcgagaggatgggggtggggaagaggaggagaatgaggaggaggaagggtggggtgggtggggagtgggggagcaggatttcagagactgggcagccggatgggctgtgccttccctctggggaagggtcctcaaaatgcctgggcgggtcttgtcctgggccctggaaaaactgggcctttccaggtataagctgtggatagcacccactgtccactggggacctgagacagccctgtctctgaagaggtcccctggtcctcttccttcaggacagggggaggaggatcccagggccctggagctggcttgggggagctgtgtgcccaggggcggggtctcccggtgaaagaagccagtgtccatccctggccatggcctgcctgcttggctctatatataactcctgccctacagctggatgaatgggggtctgtgtgggctgggggctgagcgccaagagcaacaagtggggggcctggggggtgggggaccaagaggccagaggggaggtgcccttaaatagcgcaacctcagctggagcctgtgcccatccactgaaggcccctccaccttcctcctgaagctgaggggctgccccatcctcaagcccacgagagcccttcaccaggagctcagttccttactcggtccccttccaggtgacttcagcctgtcaggccttgcctcccgtggagttggtgagtgcgctctgggatggggtggggagggcaaggaacctggccatggtgtccagaggtctggtggctccagagagggcccccaggagatgaccttgaacggagtgctgtgggtattgctcatcctatgaggaaagaaaaaactgtctgagtcctctgctgatcttgtgcccttgggcctgctgggggtaggactcctctccccttatccagtacagccttcaaaaggacactgacattcccttcccctgtccccaaggcccacattggtccttgcccctgctgtaactaaccactcccttttcctcccccatctccctctagcggcgaaacacggccccagtcaggcgcatagagcacctggtaaggtgatgctggagcaggagggggaagcaggtagctttgggagtaaggatctagatttcctgaagacaaaaagggcatggctctggagtgggcagtctagagtagggggtacccaaagagatgtctagacactgtctgttaaccaccagggatccaccaaatctctgaaccactcaaagcagcgcagcactctgcccaggtaagtgagggtgctggggtggtcccacgtgaccccctttccgccggccccacacctcagcccagggcactgccccgcaacagagctccccgggacagccccccacccccaaagcggtattctccctccagaccgatccacccaccctcaggacccagcaggcttcacctgctgcccaacagacagccttcccgtcacactagccacctccgggtgccccgcccctgcgttcatgcgtaggctcctcctccccaggagcttcagcctggacccgctcatggagcggcgctgggacttagacctcacctacgtgacggagcgcatcttggccgccgccttccccgcgcggcccgatgaacagcggcaccggggccacctgcgcgagctggcccatgtgctgcaatccaagcaccgggacaagtacctggtgaggggcggggccatcaggagtccgccaatgagagggatgtagggtccagatgggcgaggctaatcactgacgtcaccagcggaggcgaggccgccagggggcgggaccagagtggtggggtgggggcggggcccggagcgcggcctggagcggagcggagaatcctggaacgctggcgacttggctgtgactggctaggccgggccttagctacctttttattttctttatttatttaccttttttttgagacggggtctcactttgttgcccaggctggagtgcagtggcacgatctcacctcactgcaacctcctccacccgggctcaagcgattctcccacctcagcctcagtagctaggattacaggcgtgcgtcactcacgcccagccaatttttttttttttttttttttttttttgtattttttgtagagacggggtttcgccatgttggccaggctggtctcaagactccagggctcaagcgatccacacccggcaaattgttgtaattttagtagagatgaggtttcaccatgttggccaggctggtctcgaactcctgacctcaggtgacccgcccgccttggtctcccaaagtgctggggttataggcgtgagttactgcgaccggcctgcaccttattttagaggaagattcttacttaggatccacctccacctcgtgcctcattgccggagatcatttctgtctaaagccctccccctttatttcagctcttcaacctttcagagaaaaggcatgacctgacccgcttaaaccccaaggtatgaaggaaatggcctgcccaaccattaaaccaagccaccccaaccccagaagcccccagcttcctcgttattaatagtagcaattggcatctacttcactcttaagcactttcccactctcccatgatatattactggagacaccccaaaacgtgatgcagcaggtatcagcccattgtatggataaggaaagtgccgaggctatcatggacaaccagcagacccccagccttgcccccggacccctatgccctgtcccctttccaccctgcccatctctctctgttggtggcccccggccccagttgcacccctgcattctccccaggttcaagacttcggctggcctgagctgcatgctccacccctggacaagctgtgctccatctgcaaagccatggagacatggctcagtgctgacccacagcacgtggtcgtactatactgcaaggtgggccaggacctcgggttccctggtgcctggaggttccaggtcagcctggagctcccagaccctcatccctgtctctctgtctgtcagggaaacaagggcaagcttggggtcatcgtttctgcctacatgcactacagcaagatctctgcagggtgaggctcccagcgcctgagtagctgcttccccagtggccctttctccagctggccccttaggaacccatctcccctggagcccacctcttcgttgagagtcctttgctgtcagcttagcacttccacctcccttttatcactagtactgcaacatagtctgcagcagatggtctgtagagtttcctggggcagccacaaacagggtggtgtaaaacagtggaaatgggccgggtgcgttggctcacgcctgtaataccagcactttgggaggctgaggtgggcaggtcacctgaggtcaggagtttgaaactagcctggccaggtgaaaccccatctctaccaaaaatataaaaatataaaaattagccgggcgtggtggtgggcgcctgtaatcccagctactcaggaggctgaggcaggagaattgcttgaacccaggagacggaggttgcagtgagcccacacggtgccactgtactccagcctgggtgacagagtcagactccgtctcaaaaaaaacaaaaacaaaacaaaacaaaaaacagtggaaatgtactctctcacagttctggaggccagaagccccaaacc

SEQ ID NO: 1884954 - DNA, 4001 bp, Homo sapiens
tcataatcagttatcacccaccttgggagatgaaatcaaaactgagccattcagaaatgatgggtggatttcatcttggtaagaagcgcttatttctacctgttctttatggagtgccaggataatagagcaactccttctctgggcgccggatgcccacccatcagacactcacagtgatcagtgcaaatgagaagcagtccgtcagaatgcacattctctggcctggctgaggagtctcacttagcagctgttccattttctggggctgctgtaacgaattcccacaaacctaggttactttccacagcagacagttgttctctcacagtttcagaggccagaaatccaaatcaaggtgtaggcagggccatactccttccagaggctctgggaaaggatcctccctgcctccccccatctcctggtggctgcaggcatcccctggcttgcagccccatccctcttcctcccctgttccctgtaggttttgttgcttccctatttatctttccggaggttttaagtcaaatacaactgcatagtcttactttcctctgcactatggcattctatgcacagattcctgaaggtctccctccgagcacataaaccctttcgctactgagtccaggggagagccaggggtcctgaaggtggcaggggggctgcatctggaggctgagggcagcgacgacctacaaagcaatagagaagaatccccatcagctgggttggttttcacagtgggagctgggcacacaggccctcctgtattgcctctgacttttccactttggaatctgcctggcaatctctccatatgggtagggagagcaccggctggcttcttttcatagctgtgttgtaatccagagctcactgaaggtgcttgttcagccagcgcccggtgactccgatggagggtcatgggcctgtggtgtgcggcgcggccctcaggctgatctctgccaacaaggagaggcagagccagggggctgacctatagagcacatccttggtccttcccctggcagctcctctgcccctcctctccttacttatgcacctcagggggagggaggtgcttactcgtggattgtgggtgcttctggggcagtgtgttatgttttcgcttgctggaatatagtttgctttctaattattcatacaacgcatttatatatctcatgttcattggtatatatgttatatttcacaaacaaaaactcagaaaattttttaaaaggcttaagcgtgactcactcaaggttaataggaatcaaaaggcttcatggtccaaaggaatgaatctctaacagggaactttctcaatggtcgggagggagggtagacaggtagtggagctggctgttttcctccctcgcccctaactctcacatcacagcacatggggaatcctcagaatctatgagcatcttcaggaagcagacagagttaagtgcaccagagattaattgaggactgcagttgtgaaggataaagaaaagatggagaaggagtaggcaggctgagcttcaggatgcgatgcaggtctggtccctgggaaaggaggatgggaaggagggagaaccgggcaggaagtgcctgactgcaggaagcactgggaatccttgggcagccaagcaggaaatgctgccgcagaggttgcccatagaggagccttgcatggagtcccagcagccaccctgcaccttggccatgctcggacactgaccaggtggcttctgaaggcccctgaggacagaagggacatttcaacagcattcctccatggctgccacccaacgctgccgcatagacctcatcagactacacccgctggtagggagagggtgtattagtccgttttcacgctgctgataaagacatacccaaaacggggaacaaaaagaggtttcattggacttacaggtccccatggctagggaggcctcagaatcatggcgggaggcgaaaggcacttctcacgtggtggcagcaagagaaaaatgaggaggaagcaaaagcagaaacaccggataaacccatcagatctcgtgagatttattcactatcacgagactagcacaggaaagaccagcccccgtgattccgttacctcccactgggtccctcccacaacatgcaggaatcctgggagatacaattcaagttgagatatggtgtggacacagccaaaccatatcagagggtgactgcatgaattggatgtttgctacatgcaggcaaaagtctaaggagtttatctatattaactcatttactcttcagaccacccaatgaagttggtaccatgatcaccatccccattttgcagaggagacaaccaaggcacagagaggttaagtgacttgtccaaggtcacacagccagagagtgaaggagctggaacaatgttaacccaggacatccagatccagagcctagcaatgcctcacctttatctagaaggaaaaactcacacggccattcgggcctggggtctcttcctcccgcagaagctctgaacacatcctattggtgtcttctaacgctattgtgctttttccatccctatttaaaaggacttaattgtgttcatgttcggtgatagtagttttccatctctggtaatagtacaaagttgtgttttttacataaaacaagaaattgattattgaagtctagttaatagcatgcagtctagagcatcgaggggtaaacagatgtttgcaacttccttggaaatgaatcagaaaagaagatgaatagagagctgggaagtggacagatatgcgatagagcaaacacagcagaatgtcacttacggaagcgaggcattgggtatatgagtaggcactgtacaatttatctttctctttggttaacatttttcataataaagtcttcaaacaattaatcaaaatattgagaactcaagacgatgtgtgggtatggcagtaattctgcatgtagattgagcactgctgaagtttgggaaataccgcatgcatctgagtgtgtctatataagagccagggagtgcttccccagaattggcagaggagatagaagagtctgaatgaaccaagtggctcattacattccctggcacctgagccagccacagcctttggggaggattcacctgagccgagtcatctccctcctgctgaacattacagcccagccacaagctaaacaggaccagggacatcgtctgcaagtatgtcgtctactacccaggactttgagatctgagtcatcttcccaaacccaggaatgcaaccaagaaaccaggtcagaaaataaagcaggcagcctctctcggccccacctgccaaaatcaggaggaaaataaaactttcaggaagttttctaggtgccacacggtgaacatggagaagccagtggccacgatgtgatggctcactgccctctgtggactaagatgggtggaaggtctgtgtgtgatgtaaggacgttcagggatagaatattctatttagagccacagatctcagtagggacataactgtccccacaccatgtaagtgtctggcacattttcaggagtgattattttttgcaaggatcaaggcatattcttgcatttcatggtcagaagtcagaagtactaaatgccctgcaatgtccaggacaggctcttgtgacaaagaattgtcctgtgttctggacgggtatagtggctcacacctgtaatgctagcactttgggaggctgaggcaggaggatcacttgagtccatgagttccagaccagcctgggcaacatggtgaaactccatctctacaaataaaaaaaaaaaaaaaattagccaggtgtggtggtgcacacctgtagtcccagctactcaggaggatgaggtgggggtattgcttgagcccaggaggtcaaggcttcagtgaactatgattgtgccactgcacttcagcctgggtgacagagtgagactgtctcaaaaaaactgctctgtg

SEQ ID NO: 1884955 - DNA, 4001 bp, Homo sapiens
actatgttgcacagatataatggaacatttcacctgttcacctcttgatagacatttggtttacttccagtttgggctactacaaataaagcagctataaaaaaaaaaaaaaaaagaccaccactgcatcttcagctttaacaacagtgaccacaccactgaggaagtgctgaacagacaccctcaccgcttctctagccccactgggtttagaggtcaaggatgggacaagtatagagccaggctcagagtggggcaaaaagaggacaaaggagcaggactgtcagtgcagccatgagtttgtaattaacaagagtgcttttccacctggatgccagtgttgtgaaaagaggactaaaggtgacaaggaactggttctacggtggctcccttccaaaggaggctccctttctccactgccaggggctaattgcctcaggctgctccctgacctttgaccttccccttctcatcctggccctggctcaatctgtggcctcatccccaccgcagagctgtaccctctccccatctcacacccgtgcagggcctcagcctgcccccactgccctccatgcctgcagcagctggagccttcctggctgcccctccccatagaccacccagccttgtactcacgcctgccatggaagctgctgaggtaagggtgcggccccagggagtgggcctgcagagccaccttcctggctgccttgctgaggaccacgaaggccgagatgtggcttggttggcatagaaggtttatgagtaccggcagggacacctggcaggcgacacgcaaggacctcaactccaagcccaaatcagtccccgtcatgagttctccaaccccacaaccctggatccctttcctggaggggcagtagaggcctggacacacagcccgctcttcccatgtgctcacagagtctctgactccatctctgactctccctctctcgctctctcctctcttaccccttattgctaaaaggtaaccaaggtccttatgaaaatcactataggctggataaagaaaatgtggcacatatacataatggaatactatgcagccataaaaaaggatgagttcatgtcctttgcagggacatggatgaagctggaaaccatcattctcagcaaactaacacaagaacagaaaaccaaacactacatgttctcactcataagtgggagttgaacaatgacaacacatggacacagggaggagaacatcacacaccagggcctgtcggggagtggggggctaggggagggatagcattaggagaaatacctaatgtagatgacgagttgatgggtgcagcaaaccaacatggcacatgtatacctatgtaacaaacctgcacgttctgcacatgtaccccagaacttaaagtataataaaataaataaataaataaaagaaaatcacactaggaaggacgtgcttaaacagaggggcttcttaaaatttgaaattgtgcgacttgttatcgccttcactggggaacattccagagaagaggaaatgttaaaggtcaggagacagggcttgcttggagggagagcagttgtgcctccaggaggagaggaattcacagtcctcctacagaaggggcaagtgcagcccagagagcaatgtactcaagggtccacagctagaaactgaccgagggactcaagggtccacagctagaaactgacctagagactcaagggtccacagctagaaactggccgaggaactcaagggtccatagctagaaactgacctacagactcaagggtccacagctagaaactggccgagggactcaagggtccatagctagaaactgacctacagactcaagggtccacagctagaaactggccgagggactcaagggtccacagctagaaactggccgagggactcaagggtccacagctagaaactggccgaggaactcaaactcaggtctccagagttaccttcaatgcccgtctttcgctccactgagtcacgtctcagaagagaccccgacctttgagcagaaacagatggagatcagaaggggaggaagagacactacaaggggctagatggaggggagggaggaagaaggcagtctaagggggcagaatagtgatcttgggaggcaggggaggaggaaatggagaggcctctttggccctacctgtatgtaccatttgtagaatcttggcacacatctgctgggtatcttcttcattctggagaaacaaaagaaaggatcaagacatggaaccaatgccaactgaatctcccaggtattggcctcccctggcccactgatcaggggtgtggatgccaaagcacctccctgtcaggccagccaggcccctattctgtgtctctgctcccaccccttcccttctctgtcccctgcccctggctcactccaccctcggtcccctcacttgcaccaggtcctgctcactgagggctctggctggctgagcccaacaaggtggtggatgatgatgttcccctggggcagagtcatgtagctgtgctgccccagcgtcttgatgaagctcagcaggggcatgtgtacctttgggtcacagaccatcacatgcatgacaggaaggggctgcaggatggcctcttgttccaggtgagcacacagtggaccagagcaggtcagggaggtcttcaaggacctcaggcctcctgactccaagtccactgtgactcttcagtgggtgctgtggctgtgacagaccacccgtgactggacctgcccacttctgtcctctgctctgaagttccgatccactccagctctgtcatcctcctggagaactccaagaacttacttcccatacttcatatgcccgcagatactgaaattggcaggagtgttggtggaggggaatccaagtgaaggaaaggtctcgtgttttggcctctgtagggaaagccaggaagcaatctggcaagtcctgagggcccagccctcaagagcccagcctcctgtgacccttctggaaattgggcccttgtttttcaggctgatgcattgttctctatttaacactcaaaaccagcatgccctgctgcagctatcccaacgcactgtcctacaccatccagagctgggagtctctgctgcctgcacccctgactgcagagctgcttaaaaatacagcttctcaggtcccactccagccatgaagcccaaggctttctcctcccaagaaacctgtgggttcttggggcctgagtcagtgtcatttggagccctgaggacacaacagtgccgcccacagaacaggctcagaagggggcatttaggcaccacctctccacttctcaaactcttctctggttttaaagaacccaaatggaactgaaggacaggggtctgagcctgaattggcttggtgagggtgccttcctactcattccctatctccctctcctctccatttacatgacaccagggtctcaagaaagcaattgccctcccagcacagacacacggcctctatgctcacaggtctcagatctttctgtatcagcagaaccactgaactcatcacctccttcttcaaggtctccctctggggcactagagaaaacacaggcgtgcagctggaggtcagcctccaccccgcctctgctgcttggggagacatcagatgacagccgggcgggaggaacaccaggtacagtcccggccgtcaaaggccaggtggagtctccacaggcatctcagccatccctgtgcctccaaccacactgaaacccaccagcctggccagtactttccacaggagggcatttgagccccaaccctcgctggtctccatgactgcccacacaaatccgcctctccagccaagctgtcctctcctctgtccatctcaacctttccaacctcagctgctgctcctctcccctgtggcctccttgtcctgatccatggtcacaggctcctctctacttttggcccatcccctctgtaaag

SEQ ID NO: 1884956 - DNA, 4001 bp, Homo sapiens
ctgaccttacccttttccgagggacctgaagtagttgagggtggtcctgggacatgcttgtatattttagaggtgcagagtgtagaatttagaagtaaaaggccatcgtgattgcaatgtacttcgaattaattccaaaaaatctagagaagaagcaaatgcaggaagttatcggtaattgtgacatctggctgatggtaaatgggtgttctccatacccttctccctccatttctgcatgtttaaaattgtccacaataaaaagatgaaaacatgaatgaaagtatcttttgctaaaacaacaatatagtggagatgaggtattattgcatgaatacatctacctgcacagatttgaagcaacctctgattagccccaagcaggccccacagtaaatagagcaggcataatatcctccatttaacaagagcctccctgagcccgggggtcaggtgcatctttggtgaaggtctttttatgaagcacttgcctgcagcgcctttttgtgaatgtctaatctgatgtcaggtggtccctccaatgtcagcctctggtagaaaagtgctactcccagagaaaagcgtattcaaaactgcaaaatcatatccttttctgcctcctgcagggctcttggctcttgaaaaactgcttaatatttcctaaaacccaggggctattttccactctcctctcctctctgcattccattcagcaatcccgaggggatgtagatgaggatgctgcctgttgtttccttattcaggaaattctaaggcattttctctacatggaggattttgaagagtgaatgagaaaagataaacatcttcagaaagaatctctgggtgctggcaagcaaggaatgagttttgcattcggggaggccatttgccttcagtgtggggagtcggcagtgtcagaacttggcagtgaacctgaggacgtggacaggagcagatgggatgtttgacttcacctccctttttctccccgatgcatttcagtgcaggtctgctgtgctgcaccagctgcgtggctgaggaggagacgaggaggaggttcttgggcacaggaggaacggggctggggtgaaagcagccagccaagtgcggggggtgcgctcagcgggggaagccaaagtgcgtggaaaagaagtgctctccaggaccagccctgcccacggcctcctggccctcagggggactcacagacctgactcaacaggcgcacactcacacacaggcacacatgcatgtacacaagacacgtgtgcatatgaatgcacccatgcacatgtgcatatgtacagacgtgcatggcacagacacagaaacatgaatctgcacatgcacacacatgcatgcacacagagagacacacgcatgcacacacatgcgtgcacagagagacacacacaagcacacgtatgcacacatgcgtatatacgtatgcatgtataccacaaacacgcacatgcacagatacacaaacacattcacacacacacatgcacacatatgcatgcacacacagagacacacacaagcacacatgtgcacacatgcatatatacgcatgcatgtataccacaaccatgcacatgcacagatacacaaacattcacacagacacacacatgcacacacacatgcacagagacagaagtacatgcacacacacacacatgcacagaggcatgcacacatggaagaagcagatacaaatgcacatatagacacgtgtgcacacacatgcaaacacagactcaaagtgtgggagacaccaccaccactgcgctgtctgcttacctgtgtttagggactttcgagtttttccacctctgccacattctgcaaaccccgagaagtgcagcccttttgggtcatgatggtgtctggttcccctgcaggagaacatctgggcagctgtggcgttcgccttccagagagactcctgtctcctcctactggggaggactcaccgtggacacctgcagattgctaagtcatatctccaagacgttctggagcctgcttttccacaactcgaataactgtcgaatttcccacaattcgaataacaatagaacgtgtccccattcatttcagaaagtggagggctcagtggaacagcccaggacctcatgtgaggaggagatgggggctgctgaggccagcatcagagcctggacaggcacaatagaatgtcctaaagaatttctggagacatggcgaattgtactgctgtctagatttgctcctcccctgtggccccagccctgctcatgccgttgggttaggccagtcagtgagtcaatggaaccagttgattggttagacggtccaggtattggctgccgatgtgagcgtgtgaggatggtaaagggctggcccccaggttaggctgggcacacctgatttgaatagatattacacaaaatgtcctccaaacagactgctcctacacgcactgccaccaatgatatgagggggactgtcccatctcccccaggcccttttcccttccctaaagacggcagaacaggttctgtctttgcaatgatgaacccagactcaggcacctccagtggctgagctccccagagaaggcagggccagcctcgttctgcacctccaggccatcccaccattgcaggaggcagggcaggcatttagaggaaggggaggggacacagggaggacaggagccgggcctttcccccagggcttcctccgtcctgctcctgcaacagcttctgggctccgctggacctcacctgaccctgctccctgcacggggcagctcagggaccttgacatctgggaagagaggctgcaggggaggggctggcgggcggctgggggtccccgtagtccggctcttttccctcctcacacactgctgtctgctccccgcttgcctggccctgaggcgaagggcccaggggtcgctggtgaggacgggctgcagctgggctgtcctggtggagggaaggagattataaaaggccctcagagagctacacaaggtggccttgtttggggaacagcctccctcaagctcagggttccctcccatgtgagcaggaaggggtggcccaggacctgtggtcaggaggcctgcactgtgtggctggggtgggggtcactgcgggtctatttctagctccggcctctgccccacagccggaggcattgggtgaagccatttgcagcctgaggcatccagcgccctggccctccctgcagctgtgacctcaccaaaaacagaggccacacttcccagggcgggaggggctggagggcccagctgtgagggtgaatgtggctgagaccttagctccctggggacccagggcagaatgagcttcctctacaacatactgtggctccccattgatgtgcagaagagtccatgcccctcctcagctggggttcaccagtgtcactaccacccttagtcctactcctctaccagcaccccctgccaccttgcccttcttctctgggctgtggcctcatccacctccatctgtgtcctggtggagaccagcaccctcctggggcagggcaggagggcttccctctgtacctcagtgcccagagtaggacccggcagggccctcaccctgcaaagacgggtacagtgagtgcagagggtgaggacgatgacacccatcctcgggcacgctgtaagcagccatgccttcgagcctgaaaagtgctggccacagttcccaggtggtcaggatgcagtggagctgatggccctggggagtcagctcagcccagcccagccagcaacaggctctgccccgaggcgcgagttcaaatcccctccaggctccagctggggagggcagcccactcagcctccctggacctcagggtcctcgtctgtgaaatgggagtgaaagtcacggcgggcgagcccgggagggctgctgtgaggatgaatgagggaccagctcctggcacgatgcacaccccgtccagccagc

SEQ ID NO: 1884957 - DNA, 4001 bp, Homo sapiens
cagaacactaaaaatagaattaccatataacccagtaatcccccttctaggtatattaaaagaaagaaagaaggaaagaaaagaaagaaagaaagaaagagagagagagagaaagagagagagagagagaaagaaagagaaagaaaaagaaagaaagagagagagagagaaagaaagagagagagaaagagagaaaaagaaagaaagaaagaaagaaagagaaagaaaaagaaagagaaagaaagagagagagaggagagagagagagaaagaaaggaagaaagaaagagtctctgctacggtttgaatgtgccccctccaaattcatgttgaaactatctgcattgtggtggtattaagaggtgaggtctttggggaagtgtttgagtcatgagggttccagcctcataaatggattagtgccttttataagggatggagggaactagctttagacccttttgcgctcttctggcttttgccatgtgaagactcagcattcatgctttttgcatttttcaccccctccaccatgtaaggatgcagcaggaatgtccttgccagacagcaagtgccagcacattgatcgtggactttctagcctccagaactgtaaaaattaagtttctattcttaaattacccagtcttggtattttgttataccagcacaaatggactaaaccagtctcaaggagatatttttacacccatgttcgcagcagtactagttacagaagccagaaagtagaagcatgtcaagtgtccactagcaggtgagggactaagatgtggtatattcatacagtggaatattattcagccttaaaaaggaaggaaattctgacacatattgcaacatggatgaaccttgagaacattatgccaagtgaaataagccagttataaaaaagacaaataatgggccgggtgctgtggctcacacctgtaatcccagcactttgggaagccgaggtgggcagatcacctgaggtcaggagttccagaccagcctgactaacatggtgaaaccctgtctctactaaaattacaaaaattagctgggtgtagtggtggcgcctgtaatcccagctacttgggaggctgaggcaggagaatcgcttgaacccgagaggcagaggttgcagtgagcctagattgcaccactgcactccagcctgggtgacagagcaagactctgtctcaaaaaaaaaaaaaacacacagataatgtatgattccacttacatgaagtacctagggaagtcaaattcatagagaaaaaaagtaaagcggtgatttccaggagctgagaggagcaaggaatgaggggttattgtttaaagggtacactgattcagttttgtaagatgaaaaaagttctgaagatctgtttcataacaatgtcaataacttaacattagtgaactctacacttagaaacgattatgctggcacattttatgttgtgtgttttttttaaccatagtaaaaaaatacacaagaaaagttgtgtcattgggggagctctagtgttcagtgatgacaaataagagaagcatattctctgagaagactgagaatgtaaggacagtgttttcaatgaaatatcctctctccctccatccacagaattggaagatggtcaatcatatcggaagagtgcagtaagacaatgaagatgggagagtgagtgaaagcctctaaggattaaagactgtggctctatcactccatttatcttctgcctcatctgttatttaccgcctgtgtgcaccgtaattagcccattcaaattcagaattataaacaaaatgtttcctgctaaatttaaacagttaaaaagtgcttattgccgcctaagaaaaatattaacaagattaggcgtgatttctgagttaagacagatgtgttctaaccatggaagggactcaccgtttggctgtggcttttctatttgcttggacttctcactcatcagagtccagatgtaccagttaagcttcatttaagtctcagttcttctttctttcttctgtgttcctatagattttacatataaatacatttataatgtatttgcaatgtggtaatataaatgtatgtctatttttgctaggaaatgaaaattttcccttgaactgtgactttttgtaatgccggagaacaacgacacaaatgtatattgaaggaagaatggatatgtggtgtatttattgtgcttatcctatgcttcctatttgtgctggagtgtagctctggaaaacctcctatatttgttttctagggcttccataatgaaatgccacagactgggtggcttaaataaaaataattaaataaaaaataattttttttcagagttctagagtctagaaatctgagatcagggtgttggttgagttaatttcttttcttttcttttttttttttttttgatggagtctctctctgtcacccatgctggagtgcagtggcacaatctcggctcacagcaacctccgcctcacaggttcaagtgactctgcctcagcctcccaaatagctgggactatacaagcgtgtgccaccacgcccggctaatttttgtatttttagtagagacagggtttcaccatgttggccaggcttgtcttgaactcccaaactcatgatccacccacctcggcctcccaaagtgctgggattacaggcatgagccaggagttgatttcttttaaggcctctctgcttggcttgcagatggtcatcttctctctttgtcttcacctggtcttacctctgtatgtatctatgtcttaatatcttcttaagaggagtccagccatatttgattagggctcacctttaacttatttacctctttaaggactccatcttctaagggttaagatgtcaatatatgaattctggggagaagagtaggaacacaattcagcccataacacctcctaacaaattttccacatttaatctaggagattggtaatatttgtcctcaaaagataattttgtgtgtgtgtggttgggcattataactgaatttaccgttactaatgcaagaaaatcatacagcaaaatatatgattttaaagtaccaactgaacctactgatcaagacttgaaatacaaactctttccaataataaatgtactttctataacctgttcaataatacattatactagtattcagaacattgtcaaaattgtgatgaaaaaagatattgtatgaaagtttttgatgttcaaagttcagaaatttccactgcaaacaaaattaggtcagttgcacaggaaatatttaccacaaaagtctctacagaaagatacttttataaactgtcatcaatcagcatgtcagctatcagtggagctataagcataagcctgaagtccattcactaagatggggatacatattgttaaagctcaattttgtaatctaagaattgtgtttatttttagaatagcacagttctcccatcattttcgtgttatcaaatacaaatacaaaggttagggatgggggataaagcagctgctggaagtcaaattctcagagtataaagtaacatgatctccttattatgagagtcatgtgagactctaattcagtcattcagttactgttcagaaaacatctactatgttacgctccacattatttgttgggagggttataccaaaatgttaaatataaaatacaaacgcataatagaaacctagcaacgacaaaggtaagatacaagctgtgtcttcagaaaaaaaggaagtggtaaattcttgctgattttgcaaagatggttgtggtgttccggatggtggtaaaagtaagagagtttctctgaagcaaataacattctaaaacaagtggtcaaggagcttggattttgaatgccatgaaaagaaaaaaattacatgaaataggtctcatctagcaataaatatttataataaaagcagacagaacatgcctgcaaatactctgcactaacttcag

SEQ ID NO: 1884958 - DNA, 4001 bp, Homo sapiens
aggaagactttattcaaaattgttgcaataggtgtcaagcctgttccaataagaaagagagactgtattcaaatctgttgaacaaaaagcaggagagattgtaaaggctggagtatgctagtgaaaaagttctggagaatattagtggggaaggtgggtcaacatgattaggccatctgtatttgctaactggcacatatggaagttagagtactaccctcccacagagatgggaagataagggaactatttttcttgatgattatttttcaaagaaatggctcccaggtctttgagaaagatattcctgggttgcaaaaccgataaaaggctagagaaaaatttaaatctcaaataagaagacagaaagaatttatagtgggaagttttctaaagtaaacaatctaagaaaagagaagtaaaggagtgatacgtcagggagaaatctgtctaaagtttagtcaagttgaggggaacatcaaggcagtcccgttcatcctatacatgtataaaatcttgttcagaggtaccttgacattaactcaccctcaaaattcttgcaaaactcataacagaatattttatttacgtttgcaaagtctaagcaatatggataacattttgtgttgaaagcagctaaaaggcttttagcaaagcaacacaataaacactggtttaatctgcttgaatttagccagaccactcaactaagagcagagctacctttttaagaattaagcccagccttaggcaaaactgtgaagtagacacgattttgctttagttcttcacctccatgtgtcctggtataacagcccccaatgatactgtagattttgaaagaagcctgaatttgggagttgagaaacagttcagtcttcctgtttactcatctacaaagtaaagaaaagaatatctacttagcaaatacaagtattggtacctccaatgaaataatgtggatttaaacatttcatcaattagtttctgacttcagtacacaggtgtaaggacagaaaaagaaaggcattgcagcgccctcttctgggaactgttggtaaactaactcagatagttgaaatggattttctaggtgaatacaaaagtttcactctaggaataactgctccactttttaaaatatacagatacattgaagtgtgcaaacaaacatcaaattcaaactcttgaagagaaacaccaatgttcatccttttcctcaacccctatccacacatccatgcaggcagcccaggggacctcagattgaaaatcggaaaataacttatcaagaagccatgtcacttatagcattagctctaaaactttaattcatctatgtattacctggagatcttttaaaactgcagattcatattcactgggtccaggattctacatttctaacaatctcccaggtgagacctacactgatggtggcatgactgaaatcacctttgaaaaattataacagtgagaatgtaaccacccaacaggttcaccttgcccaaggcctagacagagccaatatatcaagacagggaaattgcaatagagaaagagtaactcatgcagaggcagctgtgtgggagtccagagttttattcaaaactcaaatcagtctcttagagcattcagggagcagtttttaagaacaacttggtaggtggggggaatccagtgatacaggacatagaaataaattatttaggcagatagtaaggacaacagagtcataggcagaattttccattttaacaaaaagcagcccaaaaaatcatttcttttctaacaaagagcagcctgagaaatcgagctgcagacatacatgagcaagctggaagcttgcacagatgaatgccagcagctgtgccaatagaaaagggctacctgagggccaggcatgttcaacatggagggtccatcttcttttcttgtcatcacatgtacagtaaaggaacaggcaacaaggcacaggccaggtagagaacccatctgcataataaaagattagggaggacagttggcatgaggttctaagatggccaaataagaacagctccagtccacagcttccagtgtgagcaatgcagaagatgggcgatttctgcatttccaacttaggtaatgggttcatctcactggggcttgtcggacagtgggtacagcccacagagcagggcggggcatcacctcacccaggaagcgcaaggggtcagggaattccctttcctagccaagggaagccgtgacagatggtacctggaaaatcggggcactcccaccttaatactgcacttttccaatggtctaagcaaatggcacaccaggagattatatcccgcgcctggctcggagggtcccatgcccaaggagcctcgctcgctgagagcacagcagtctgagatcgaactgcaaggcggcagtgaggctggggaaggggcgtacgcaattgctgaggcttgagtagataaacaaagcagccgggaagcttgcactgggtggagcccaccgcagctcaaggaggcctgcctgcctctgtcgactccacctctaagggcagggcatagctgaacaaaaggcagcagaaacttctgcagacttcaaagctgtctgacagatttgaagacagtagtggttctcccagcacagagtttgagatctgagaatggacagactgcctcctctagtgggtctctgatccccaagtagcctaactgggagacacctccaagtaggggccgactgacacctcatacagccaggtgtccctctgagacgcagcttccagaggaaggatcaggcagcaacatttgctgttctgcaatatttgctgttcagcagcccctgctggtgatacccaggcaaacagggtctggagtggacctccagcaaactccaacagacctgcagctgagggtcatgactgttagaaggaaaactaacaaacagaaaggacatccacaccaaaaccccatctgtgtgtccccatcatcaaagaccaaaggtagataaaatcacaaagatggggagaaacaagagcagaaaagccgaaaattctaaaaatcagagtgcctcttctcctccaaagggatgcagctcctctccagcaatagaacaaagctggatggagaattactttgacaagttgagagaagaaggcttcagacgattggtaataacaaacttctctaagctaaaggaggatgttcgaacccattgcagagaagctaaaaaccttgaaaaaagattagatgaatggctaactagaataaacagtgtaaagaagaccttaaatgacccaatggagctgaaaaccataccacgagaactacatgatgcatgcaccagcttcagtagccgatttgatcaagtggaagaaagggtgtcagggattgaagagcaaatgaatgaaatgaaacaaaaagagaagtttagagaaaaaagagtaaaaaaaaatgaacaaagcctccaagaaatatgggactatgtgaaaagaccaaatctacgtccgattggtatacctgaaagtgacgaggagaatggaaccaagttggaaaacactcttcaggatattatccaggagaacttccccaacatagcaaggcaggccaacattcaaattcaggaaatacagagaataccactaagatgctcctcgagaagagcaactccaagacacataattgtcagattcaccaaagttgaaatggaggaaaaaatgtaagggcagccagagagaaaggtcgggttacccacaaagggaagcccatcaggctaacagcggatctctcagcagaaactctacaagccagaagacagtgggggccaatattcaacgctcttaaagaaaagaatttcatatcaacccagaatttcaattccagcgaaactaagcttcataagtgaaggagaaataaaatcctttacagacaaacaaatgctgaaagattttgtcaccaccaggcctgtcttacaagaagagctcctaaaagaagcac

SEQ ID NO: 1884959 - DNA, 4001 bp, Homo sapiens
acaaataattgtgaaatttacaggataacttgttggaaatagttattgatgatttactgaaaataaaatttgaaaacacggcatcatttgcattatttggggtaagatttaaaaacaaataaccttaacttgcagaaattatcttaaaatttctttctctgttctcttgaatatagatctttgaaatcagttctacttttaatggtaaatagaaatacttgaggtactctttctcttcagtgaacagaatcttgtcataaatgcaacctcgtaagctcatttctcacattacaactttacatattaatataaataaaatttattcacagtgtgggtgtaggcatttaatataggaaatacaatttcatacttaaacgggattagttacagtttttttttcctttcttccattttgtttcttaattgacaaatagtaactacatattcataaagtatgtagtgatgttttgatagatatgatgtacaacaattctattagggtaattagcatatctatcatctcaaacatttatcatttctttatgttggaaacatttaatatcctctttctagctttctgaaacaatataacatattattgttaactgtagtaatcctacagtgctatggaatgctaggaggtattccacttatctcgtgcacagtggagaaacagaaaatggttttttttctatcacatcatcaggctgaacattttctaaacttttatcctctgtttcccttttaaaactgaatattttaacagcacccaagtcacctcttaactgcttcaatgcttagaagtttcttctgccagataccctaaatcatctccctcaagtttgaagttccacaaatctgtaggctgcaataagtctacatggtttccaggaggtgaagcctgaacccaactggcagcacacaaagcctagaatatcctctttcctggtaccaccctgtgccactggactcacggtgtgagatgagtgactgcacaaccacattcaacaaaggaggaggtacaactgggcagagacaacatcacaactagagaagattacaaaatcattcaagaggatgctgagataaagtacagttacctactctccattattctttgctgagaaaagtgagggtatggcatcagcagaaaattatgtttattcttaaataaatcccaataggatggggttgatagtcaggcagtagaatgagataaaaatctgcattcattaaaaatctttgtgcataaggaaaagaacagcaatggcaaaggagaaaagagagccttctctttttcttaaataagacaggaaactgcattcctttccttgctgtagtggcagcagacttactggttttcataaaacataatttctgcaatgtggtctgttgataaggctgctccatgatgggaggacagacatgaggccaagtgttcatgacagaactaggtcttctctcaaagcctctaatgtgtgctatttctcatgaggaacctgacactatatgacacttcagttaaagcttctgaaatattgcaatggcataattgacaggttttttggtgtggtgactttcttgtacatgtaaactctttgagaaaagttggggataaaaggacaggggagcatttggtttagagccacaatgttccagacgccagccacggatccctctgccctgtgtcactacacgttcttttctgagaaacattcaattgctgagtgttacacaccgtggttgaagaaaatgatccactcaccaccatccgctctctctcatcctctgtgtgaagctcccaatagcagaggctgaagacagaaaggtcgtctctgtttccttgcaccaggtacattacttggtgacctggtgaatggcatgggcaaggtagcccacgttgccggaggtgacccctgccacagaaatgcggccgtcctttgtcatatagatggagaactccttggttagccactccacctgttcaggctttagccctgtgaaacaaaacatgccagtttgggcagtgctatgtggccagttgtgggtggaacccttcttcttgaggttggagacaagctgagtccgcatgctaatgatgtggtcggccatgcctttcacttcttgcaaccattgttttcatgaatctggggtgttcagaatggtagaagcaatctgggccccattgtggggacggttggcatacgtggaatggatcaagatcttcaactgtgactctacccttttggtttcatcgcatctttgcatactacagtgaaggctcctacacgctcacaatataagcccatgttcttggcatatgattggcagagacaaacattaatgccctgttcaaagaagtggtgcacagcccgggcatccttatcaccatcaccactggtaaagccttggtaggctatgtcaaagaaggcaaagagactcttcttcttcaccattgttgctgtatccttccactgttccagacctgggtccactcccgtgggattgtgggtgcaggcatgcagaagaacaacattttgctctggtatttttgaaaggccctccacagcgcctgtgaagtcaaaatcgcaagtcttggggtcataaagccgataaccttgtagctgcatgccagtgtccctgaagatgggcgtgtgatttccccagcttggtttgggcagaaagacatctcagctgaacttaaaaaatctttgcagaaagctggctccaatccttaaggctccagttccagaaatggtctgcacaatgacaaaccggccacttttcaagacttcgctgttctcaccaagggctagttctgcagatgccttgcaaaattcagccagtcccccagtggacaggtattccttgtccaaactttttgtggcaatctgggcctctgccttggggacgctaggcagcacgtccaaggctttccgttatcatcccggtaggcaccaactcccagattcatctttttgctattggtgtccctcttaaagtcttcaatgactgccaggatgatatctggaggtcccatttccacatgggtccatcaggagctggctctggcagaggccgcagctgcgaggcccaggtggaaggtggcagcgatcccagagaggacgcagccagagtgcagcagggccacggtggacagtaggagggcagtgggcagctgcaggactgagcagagggctctctgtagtgttttaattgcgagagacgatttgtgaggctgatctgaagctgtagccaatctggtctgctttgcatgtctttctgtatggtccatagcaaatttgctgaggacctccatcttgtttaacatccttgggagcaagacctgtaaccacttggcaaggttttgtgtagcctctgtgtagcttggattcaatcctggcttagggaatgagtcttacctggtttgatatctgcatgaccttttgctatttgttgattccatttctctccatgaactgccttggattttcctttctctgagcctttagtaaagtttgaaagccagaaatattggccacttggtgtggctaaattcagataataagggagttaagaggaatttcttaaggagtgctcagcttaactaaaagtggatatccaagttagagtcatatttaaaaggtttcccttttcttggaccttgttttgctgggaaaaggtttttcttggtcaactgaattattttttcttcattttgctttgccacttttttaatgcacgcacaagagaggagagacctcttttttttctcatggactccagaaattaaaagcacccagaggccaataatccaattaggagattggcaaatgaaagatcttatggggaccgggttatcttctacctgtctgtgtaattctatatgtgttgtgtgtgtgatgtttacataaaaaaaagagctctaattaattttgcctaaaggaagacaagcacttggatcaaatattttatgaaagagaagataaaaagctgtggta

SEQ ID NO: 1884960 - DNA, 4001 bp, Homo sapiens
aggttcagaatactaagacttccgtaattctttttcattgctactagggtaatgtgtaactctccccttaaaacttcccccaaatctcccatttgcctctcttaataatcttctaaatgtgcctgctttctcttcttcttttttacatctctagcccctcctactaatactgagacagccaggtgggaaggggtccctggagaaactccaattagcctgcccactgaggtggagccttgggaagttcacaaggtttgcagcagagagaagcctgagcctggccccagtttttcatttgtagaacctgggattcaaactgtcaggtgggaagcgctccggcggaaggactctggccctgcaagagtacctgtttccccctttttttccctttttcacccaataaaactctgcttcacacaccctttaaaccatctgcgagcctgaatttccgtggccgtgggacaaagaatcccatttttagctgaaataaggaaaagtcctgcagcaatattcccacatgcatcttgttccacttctctcttgctcacttatttctcttctacctttcttacagtgtgtcctgactcccgcaaattcataccactcttaaggtacacactgaacacaataactcttcagacttctagttggaaaaacaacattaggaattatctctcagaagaacagagaaataaagcattattactgatcaaattttaactcagtttcaggatctgaaaaacttaaatcacaggatgcattttaaaaaacaagtttcacaactgtaccaggtaacaaatatttagtttcggttctgtaaacattctttagaatataacatttggcttagttagtaagaatataacttagtaggaatgtaacttagccaaaagttacatttgtaacatctaaaaaatgttagaacgtactgctccgggacacaaatttaagaagaccgatttgagtaataataaaactcccatcacctgcaaagccggctctgcgtgaattactctttctccattgtaatccccgtcttgataaatcggctctatctagcagacaaagtgaacccactggacggttacaacagtaccatgaatgctaagagctaggagcaacatgttacaaaaacagtggcatcccttaaaaacaagtttccccaagaaaggtgggaggaaaataggggctcaggacagttgcaaatagatgtctatcttccaaataaaatgccaagtcttcttgaggtcacagcatccacaagtttccaactaggctggaaaaacaagttggatcagagagaggttgggggagggcccgtgggtggccctgaagcaggccactaggacgccgtttccctctctccgcccttccaaaagcccttaagccacagacagccgtggcccgtccagggggcactcccctctcaggtcccccaaagttctgcaaactctgacgacaaaggcaagtcagagtcccgtgacatgtggggaggcatcgcacagatttttcttttcatggcctggtcagagagagtgctcacccaaccgagaaggccctggcggggtcacactggctaaataaaaagcgccttcttctgcttttttcggagctccaggtgacggctcctccttcactccagggcggagctctgcagaaaaggcggggaggcacggagggaggtgtactggggctgcgggattcgcggctacatgggcttctaggctctctcgcgcccaccctgccccgagctacggagccccttccggtcccgcggactccaagcctcaagtttccgccacaccctccagagaagcgtccccgccgcagccccggggggcgggaggcgcgaggcgcggctgcgcccagcactggccccacctcccacgcgcccgcgggagatttgcttggggctggatcccccgcctaccgtttccccgcagccgccggcgcttctggcgcttgtgacccgagcaggaagcccagagagaaaccagaaagacaggaaggggattcctggacttcctttccacatccggcaggaacgcgaccctcctccagctaggagcgcttgtccgggtctggtggaccccttaccctgtgataaggacccagaggatgcccttgtccccgggattagggggaacccaatggaggcctccacccggggccgattcccaccctgggccacaggagctttttaggcagtgaaactattctatgtgtaatggtggatatgttataggaggcagaaacgaattatttgggtagacagggtaaagccagtccccggtagaaaactttgcttttaacaaaaagcagctcaaaaatagctcccttgctaacctcatgcagttcaaagaaatcacttttctaacaagaggcctgaaagagcagacagtaaaacacagaaaagacagctgggacacagaaggactggggtggacagccgagagtctcccgggtaatcaccaagcttcacacttacacgatgggccccagtaaaacagtgggccttaataagcacattcctttctctttaggcgcaccaagatgcctgcagcttcaagaagatgtatgggaacagacacagaaactttccctaccagataagcaggacaaagaaacacagactaagagttggcctgtgtggtcacggagtgggttaagagatgataaaaaaatctgctctgtacagatggcacacctggtcccaactaaaccctggggccctagaaagataagacatcccctcctcacaagcccctcctcaagagccccctcctcaagagcccatttataaaaactctgacattcttaactacaacttggcaatcttctcaggatccctctctaacagagacctgttctttccttttgcctattaaactcctgctccaaactcactctgtctgtgtgtgtgtccgagacctcgatctccttggccatgagactaagaatcttggtatttaccccagacaacgaggctgctgcagatatatctcacatgtttgtcaaacccacagaatgtacaacagaaagagggaaccctaaacgatggacttacttacaatgtatcaatatttgttcatcaagacaaattgtacaacactaatgggcaatgttaataataagggaaattgtgagggaggaagaagtgataaatcagaaatctacacttgccactcaatttttccacaaccctaaaactattctaaaataacatgtattaattatttttaaaaagcagatgactttttgtcagttatgattgtttttagctatgacatagaaagctataatcatccttcaatttaacttataatttgttgatatatatatatcatatatatgtatgtgtatatatatatattatatatgtatacacacacacatactttgcaccacaggatacagtaagattataattttcttacatgataatgaaacaacctcgatcacatttcagaagtagtgccttaatagtccttccaccttttgactctctctgaggaagtatggaaaaggagatatgatgttaatatctaagtttattgcttgtgtaacaaatattttgctatgtatgcatacggataataaaaataataaaactatatagccataactatcctaatataacccttataaagaaaagtgtctatgaaaaatgagtgagtttcagtgcatcacggtggtttaaatttttttttcttcctttattttttcaaactctaaaagacaggcataaaaggatctgattgcagggccttaaatttgactaggtttcttaaatgtgtcatcacagtaaatgaaatgtaagcccatgtctattatatatgaaaaaaagttaatacataagcacaagactgttaatttctggaattgcattcagaattctcctgtcctcagaagaaaggaaatgttctgcctcatgcattattgtcctttgtatataaaggacaataaataaaggttatgtaaataagtacacagccaggatt

SEQ ID NO: 1884961 - DNA, 4001 bp, Homo sapiens
ttctagacagggggaaagatgggtaagattggatgatcttaagcagtaaatatcgtttggattttggctcatataaaaatatcaacctttattctttctggttctacactaacgcaaaattgtcttaaaggttcagaatactaagacttccgtaattctttttcattgctactagggtaatgtgtaactctccccttaaaacttcccccaaatctcccatttgcctctcttaataatcttctaaatgtgcctgctttctcttcttcttttttacatctctagcccctcctactaatactgagacagccaggtgggaaggggtccctggagaaactccaattagcctgcccactgaggtggagccttgggaagttcacaaggtttgcagcagagagaagcctgagcctggccccagtttttcatttgtagaacctgggattcaaactgtcaggtgggaagcgctccggcggaaggactctggccctgcaagagtacctgtttccccctttttttccctttttcacccaataaaactctgcttcacacaccctttaaaccatctgcgagcctgaatttccgtggccgtgggacaaagaatcccatttttagctgaaataaggaaaagtcctgcagcaatattcccacatgcatcttgttccacttctctcttgctcacttatttctcttctacctttcttacagtgtgtcctgactcccgcaaattcataccactcttaaggtacacactgaacacaataactcttcagacttctagttggaaaaacaacattaggaattatctctcagaagaacagagaaataaagcattattactgatcaaattttaactcagtttcaggatctgaaaaacttaaatcacaggatgcattttaaaaaacaagtttcacaactgtaccaggtaacaaatatttagtttcggttctgtaaacattctttagaatataacatttggcttagttagtaagaatataacttagtaggaatgtaacttagccaaaagttacatttgtaacatctaaaaaatgttagaacgtactgctccgggacacaaatttaagaagaccgatttgagtaataataaaactcccatcacctgcaaagccggctctgcgtgaattactctttctccattgtaatccccgtcttgataaatcggctctatctagcagacaaagtgaacccactggacggttacaacagtaccatgaatgctaagagctaggagcaacatgttacaaaaacagtggcatcccttaaaaacaagtttccccaagaaaggtgggaggaaaataggggctcaggacagttgcaaatagatgtctatcttccaaataaaatgccaagtcttcttgaggtcacagcatccacaagtttccaactaggctggaaaaacaagttggatcagagagaggttgggggagggcccgtgggtggccctgaagcaggccactaggacgccgtttccctctctccgcccttccaaaagcccttaagccacagacagccgtggcccgtccagggggcactcccctctcaggtcccccaaagttctgcaaactctgacgacaaaggcaagtcagagtcccgtgacatgtggggaggcatcgcacagatttttcttttcatggcctggtcagagagagtgctcacccaaccgagaaggccctggcggggtcacactggctaaataaaaagcgccttcttctgcttttttcggagctccaggtgacggctcctccttcactccagggcggagctctgcagaaaaggcggggaggcacggagggaggtgtactggggctgcgggattcgcggctacatgggcttctaggctctctcgcgcccaccctgccccgagctacggagccccttccggtcccgcggactccaagcctcaagtttccgccacaccctccagagaagcgtccccgccgcagccccggggggcgggaggcgcgaggcgcggctgcgcccagcactggccccacctcccacgcgcccgcgggagatttgcttggggctggatcccccgcctaccgtttccccgcagccgccggcgcttctggcgcttgtgacccgagcaggaagcccagagagaaaccagaaagacaggaaggggattcctggacttcctttccacatccggcaggaacgcgaccctcctccagctaggagcgcttgtccgggtctggtggaccccttaccctgtgataaggacccagaggatgcccttgtccccgggattagggggaacccaatggaggcctccacccggggccgattcccaccctgggccacaggagctttttaggcagtgaaactattctatgtgtaatggtggatatgttataggaggcagaaacgaattatttgggtagacagggtaaagccagtccccggtagaaaactttgcttttaacaaaaagcagctcaaaaatagctcccttgctaacctcatgcagttcaaagaaatcacttttctaacaagaggcctgaaagagcagacagtaaaacacagaaaagacagctgggacacagaaggactggggtggacagccgagagtctcccgggtaatcaccaagcttcacacttacacgatgggccccagtaaaacagtgggccttaataagcacattcctttctctttaggcgcaccaagatgcctgcagcttcaagaagatgtatgggaacagacacagaaactttccctaccagataagcaggacaaagaaacacagactaagagttggcctgtgtggtcacggagtgggttaagagatgataaaaaaatctgctctgtacagatggcacacctggtcccaactaaaccctggggccctagaaagataagacatcccctcctcacaagcccctcctcaagagccccctcctcaagagcccatttataaaaactctgacattcttaactacaacttggcaatcttctcaggatccctctctaacagagacctgttctttccttttgcctattaaactcctgctccaaactcactctgtctgtgtgtgtgtccgagacctcgatctccttggccatgagactaagaatcttggtatttaccccagacaacgaggctgctgcagatatatctcacatgtttgtcaaacccacagaatgtacaacagaaagagggaaccctaaacgatggacttacttacaatgtatcaatatttgttcatcaagacaaattgtacaacactaatgggcaatgttaataataagggaaattgtgagggaggaagaagtgataaatcagaaatctacacttgccactcaatttttccacaaccctaaaactattctaaaataacatgtattaattatttttaaaaagcagatgactttttgtcagttatgattgtttttagctatgacatagaaagctataatcatccttcaatttaacttataatttgttgatatatatatatcatatatatgtatgtgtatatatatatattatatatgtatacacacacacatactttgcaccacaggatacagtaagattataattttcttacatgataatgaaacaacctcgatcacatttcagaagtagtgccttaatagtccttccaccttttgactctctctgaggaagtatggaaaaggagatatgatgttaatatctaagtttattgcttgtgtaacaaatattttgctatgtatgcatacggataataaaaataataaaactatatagccataactatcctaatataacccttataaagaaaagtgtctatgaaaaatgagtgagtttcagtgcatcacggtggtttaaatttttttttcttcctttattttttcaaactctaaaagacaggcataaaaggatctgattgcagggccttaaatttgactaggtttcttaaatgtgtcatcacagtaaatgaaatgtaagcccatgtctattatatatgaaaaaaagttaatacataagcacaagactgttaa

SEQ ID NO: 1884962 - DNA, 4001 bp, Homo sapiens
agctaggccagtccaactccgtccggggcttgccaatgagcagatgccgagcaggtgccagggcaggtgctgggccacagcagaaaaacttcaggaatagtgaaaacaaaggcctgggcagatttgtggcttctgacccggcagggccaagtggcctctgcaggtgtctacccaggaagggccagaacaccacatgttccacgtaggaattttctctcctaggatccagatcgcttcctggccctttccaaggagtcggaaggtgtcctctgccacttgcctggctcctccagctgggtgctccccaggaggggcccaacctaaaaactaaaggcacagcgcagacccttgccgcttggctggacctccccgcccaggaacaccccgggctccagggtaccccccaacacctgcagcggcctctgcccttgtccacttccccaggccaccccgcagcttctacaccggcctgggcccgcccttcccccttgtcctgggccccaagttcagctgtgacctctgaacccaccctctgctcttgactgccctttgaagaacctctccattccttcctcctggggcatctcttgggtgggggaggaaatctcagccctgggaggagagtaggggccttttccttgccctcctttgggaactggagaagagcgggagattgtgctggaggcgggagggggcactcgcttggctccatctcaaggaaatgggtctctgactcaaattggattcagaaaaaaaaaaaaaagatttttgggagttattccctctctcagatcactcctaacttagaatcaacgtaagggcccaggacagcaggggaccgctctgggcggatcccccgccccgtcccggcagagtcggcaactcgggctggcatttccttccctttccgcggggcgtgtctggggatctccaagcgtctctaagggcctgctggggtgagcgggtttgggacgcggctgggtttttctaggctggtaatcggtcccgactggggaataagcacacacatccttccttcagtacgggaagcggagcaccctctctcccactttagccctcgaaaccccaactccgctcccttctccatctcccctcaaaaaacttttccgaagttcccccaagttgcgtttgaggaaagaagtcgtctccctcagactctgggtttctcggcccctaaccctcccctcaatcctcagtttcggaagcaaccctccccctcccctgccagctaccaccttagtccctaaactcggggaggaaagctgctctgaccccatgcatctgacagaagcccaaccccagcccaaatttctcccgggggaaggcagattaatatgtcagcctgcaggggaaacaggggtaaggggagggagagaccgggacggggagagacagattgttctcgggctgaatcgcacccgtcccgggcccagcttacctgctccggacaggctcatctagatttccatcctgccaaaagtttgtccttctctcaaacgattccgggaggagcgcaaactcggctcttggggagggcaggcgggccgggtacccttgaaggcgcaggcgcctgatacagagcaggccccggggaagcaggactcgggggcacggtcgccaaagtggggacccgagcagcgatccggagggagagcattcaggcgcccgggctgggggctacactgctggcgcgggatggcccaggacagagtgggcgctatagcgtgagtggccatcagggccgggcgggcccggggaactggagggagaggtccctgggtccctggcgacgtctctcgctttctccagtttctgccgtgctggtgtgccccagcccacaacattccctcgacctcttctggggcggcgctcagggcccccacatggcgaaaagggagggtgaagggatgaggcgcccctcccgccttagcccctcctcagcccccacgccacagccccccctttctccccagagccgagggacagacagagaattgcgactagaattcgatcgattggtacgagggaccacgtggccaggggctggccaatgaccaggccgcccgggatgagctaataatggaagcaatttgtaactttcagtagctctctaggcctgggtaccggagggagggaggcgggcagaggaggggagatgggcacccccagtctttccatcctcctcattcgtctaggggcacccgaatcccctattccttatttcccctatcactcaggcactggcagggtccttggcccactcctgttggccgccgcggctccaaagcgaggtaagctggtcctctacccctcaaactcttcacaaccctcaccccgtttactagcacctgcaaaccacagcctcccttcctgtcccattcgtgaatttaaatcggattttgtttttcctcttagttgaaagaaaaaaaatatgtttgtattcttttgtgtaacctatcttggatttggagaaaattttaattcaaattaatacacttatattggggggggtgagtggtactttcttccttttcaataaatttgtatacttgctactttatggagagtttacttttctttggggatgagttacaccttatgttttcacatgtgttacttctttaatgataagttcaactcctttctccattccatcctccaattttgctatttataaatatcacctaatagatttagagtttattcatttttctcctccctcactagtttttcagctgttacagaatcaccacaatttattttcctctgtgtgtggatgaggttttgcgttgattcctctttttgttttgtaaatgaatttattgtttgggaaactcttggggggtgtgtgtgtgtaaaaaaggtcttttgattaattccaacctctcctcttctgaagaacaatttgcttgaaatgttttgtgtattttcctcgtttttatttgtttaaatttgaggtattttaccttctttaaaacctggcctctttttaaaatttaaccttttgcatgttaaaccatttttaaggtttttattttataaacttcaatggttagtagatttacttgcctttccctgacctccttcacgcgcctgcctcctccatctcagaactcccatctccagcttccacaattctcagcttccaacggactcatcctcccctctcctcccagccaaggagggatgcctgggaagtagacagtgtccttcttgggtcagaacctatgctctggttctagttcaggacacctccagtctgacctccaagccggcaaaacgagtgagagcagaatttctgttcaactttttcatttgggactaagttctttacacttggctgtattctggagaactctgatacatgaaattgaattttaaattctcattttttccctaaattctaagaaaagtgcaggcagattgtttttcttccttaaatgtaagctgaacagcttaggggtcagccccttgggtcttttacctcctgggggagacttctcagagagacacacagtgttgattcttccttttagttttggttaaggtagaaggggcagggattggggaagcccatattgatctctggctctagctctgaacaaagaagggtagagagctggcctggggacttgtcccttttgtcagtaaggtttggcttaggagagagtttgaagtaaatcccagctctgaggaaattcttctttttagcattactgtgaaaataaactattaaaatggtgtgacatggcttcaaactattcagattccttgaagtaacaaaaataaaattacaagagtaattcgtgtttcccaaaggtccgcctccagtgactatccatttctctcagggaaacggaacccaactgggcagaagtaaaactgcccccctcccctttcagttccccagtcacattgacattctgggcacatttggcccagcccccgtccctgtttctcccaagtatgaatctaaatta

SEQ ID NO: 1884963 - DNA, 4001 bp, Homo sapiens
gtgaaatttgatttaaacatatttaagatcaagacagaaaatccctgagttttttttttttttttgagatggagtcttgctctgttgcccaggctggagtgtagtggctcagacgactttcctgcctcagcctccagagtagctgggactataggcaggcaccaccatgcccatctaatttttatatttttagtagggacagggtttcaccacgttgcccaggctggtctcaaactcctgacctcaagtgatccacccaccttggcctcccaaagtactgggattacaggcatgagccaccacactgggacttgtgagatctgggacttctgagatctttttaagataaatctatattgattcataatagcaacctggtacagtatgtggttggtattgttctatgtaccttatatgtattaactaatttagtcctcgtaagaatcccacaaggtgtttactagttttattttattttcattttatagatgaggaaattgaggcagaggttaaattacgtgacccaagatcacatggttagtaagtggcagagccaggatttggacctaggcaatttggcagtcaaaactgtgctttcaattattacatgacactgcctcttgctactaatctattaactttaatagattagtgtatttatagactcaaatttttctgacttgtaagttcaatttatcacaatgagctgctgggagattaattacagtgatttaatgcaaatgttaagaatccaggaaagtcaaactcatggtcacacagaaagtacaggaaaaaagtttgtcagccattagaccctaaggatgcctgttcttttcaagattttttttttctttctgaaatgcccactaagtctgccatagggtcagaaagcaattttcttacatgttttatagtttctgcatctagcctggtgcctggtacccagtgggcactcaataaacatttaactcagggcagatccaatgacctcagaagaatgctcttcaatagaccttttgcctacattgattagttcttttcggtactttttaagattacaagagtaaaaccctaataaattctcattgttaaggattcaaaacacataagtagacacatcaaaacttgaaaatcctgttactcaccaacacatgcttttccccaggtaaccaccgtcctctgatttgtcttcctatgaatttacatacacgtaggcacatacgcgtttgtataacttaaaaacataaatgtaatcacaaatacacattactctgcaactgtcttgtgtcggttgttcatgccattataaatatatttcatctattttagcagctcttcagtgattcgtagtatggatgtattgagctttatgtaattcacttgtaatgaacatttagatagtttcctattaaaaaccacgttgctataaatattcttgtgcaaatacgtgtatgcatgtagaattttacaccgatcccgattctccaaaaatccaaattgcaggtgggatcattttagaatgtacttcaatagcgttcttcatcctgcctcgcgtttttaaaaggactgagtggagagcggggaagaggtcgtaagatcccctgttagggtgttcataaagtaacttctcctctcgcacagaacgtcttgactaaaaaacaatccgtacagaatgtgcgggagagctgtaggaactcctacggtggcgacagagagggaaacaggcttgttggaagaagcgcctggtcagcgttatcctcgaggatcatgccttcctgttaattccccaccccatcaattctacctttttaggttagactggggagtaactttcccaggtattaaaaatcgtctagagagagcagggcgaaattagagtgccgaagtggcttgagaagcacagtgaatggtggcgaagcccgagccgggtcgcaagacgcccgctggcactgccggcgccatggcggccgccttcggccacggcggaggactcgctttcccaggggcccccgcggtcgcaggggcaacgagcccggccggccctcgcgagcggaggcggggccggggccggaagtcacgtgctgtgacagtagctggggtgaggccgtcgtcgccgcacgggctggttggggctgtgtctgtgggaggcgccggggtgatggcggtggagactctgtccccggactgggagtttgaccgcgttgacgacggctcgcagagtaagggagctgcagggcgagggctgcgggtggacgctccttcggcccgccgctgttctgggctgggcagcgctcctgcgagagggacggctgcgcagccgtctggtgcgggacacttcagagcccttggggtgtgcgagggacgcgctctccagcgttactttcggggttggggtcccagccacggcgggtcaggctgcccgttcagggctcggcgtgtgaggcggagactctcctggggagcctgcggtgccccgcggggagcggcgtcccccttcagctgccccggggcttgggcggggcgcgcccgggaggcccagcggccccgggatcccaggctgcttctgtctctggcctcttggggatttcgccagattctgagcgttcagctctggaggacgctgatgtctgggttcctgtttcggtttcctgtttttcttcttttcctcccaaatcaacttttgcaagtttgggtgtctttcccatcgcgttgctataaccgtagaagggagcgaaaaaagaacttttcaccctgcgaaaataaacacgtgaatgtcattttatcattttccaggccttttatttatgctaagtgatatttttcagtgatgttctgcagtttccatcgcagttataaaggcttcaaaaattacagcaaatcttcaaattttgcttcacaagatcgaattgtctgattttaacttagaagtctatcccgaaataaacaaattgtgtttctttcagtaaaatattgaggccaaattaattgtagtgaaactctacttgaaataaatacaagttggcaatctgcttcttatctttggtcatagtaatctgtgtaagtgatctaagagagattggagcatgctgtttgtgattttttttttccctcatagttttcccaaaaggtggaacgttgcttttaaaaattccggatgaattttgcttgatttacgaagagagactaatgcctacaatgttagatgaattaggttttacaagtctctcagagaagagtgagctacatccaggatgggttgcagtttttcacaaaacattcctgaggtcaggagttcaagaccagcctggctaacatggtgaaaccccgtctctactaaaaaataaatagctgggcttggtggcgagcgcctgtaattccagctacttgggaggctgaggcaggagaatcgcttgaacccggcaggcggaggttgcagtgagccgagatcgcgccattgcactctagcctgggtgataataaggtattagctcttatgcagcataaaaattaaccttggagataatgacaaaatcttttaatttttttttgtggaggggattctgtattgttataaagtgaactgtaccttgtcatatatgttttatggacaaagatgacgaactggtatcttcaaaaaaaattggaatagagttatgttaattgagtttgaaaatggttcagcctggagtagaatggtctgattcactcaacagatattttctacaaccagtggctgtgctagatattagggataaaaagataaaacaaggagtgcagtctgttgacaaagatgagcatgttaagtaggtttttggaatttttactcttaaaaaattaccatgtagttcttatctcaacttttgttattttaactttcaccaattttacaaccgtttattgtcagcaaggaacttttaatgttattttaggttttctgtttcctgtttgtgaatccctgaacatactaaaggagtgatttattggcgtggtgtttctctagc

SEQ ID NO: 1884964 - DNA, 4001 bp, Homo sapiens
cttgttccccctagaatatagaaagtctgagccgcagatatcagcattttatctccagatctcactatgcatgtatgccatgtaataaatgtggttgcaataaaagaagaaaaagtggaatttgaaaatgaaaaatggcattcatgaagaaaagtacacctttttttgacttttgtttgcaaagtgcatgcactacatatcagatttttaaaattcacatcgttagtatgcatcaatgatctctttatgaatttgcaaaatttagataagttatggtgtcatatttgctgtgtttattttttagatttttttaatggaggaaaatttggagaaggacatgacctgggcctgtgtttcatggggtgcccttacttgagacaatcaggacactatcactttccagatggaaaataatgatccaaatgctttaatgtccattagggaaattatccttccagcccaagaaagcaatcatgttatcaattcataatactggggggtcttcatgttctatgagatgtcttcaaaatgtcattgctacagtaggtcatttttttacatgatttttaaaaattttatttcaaaatgtaggcttatctctttaggttctacaaaggatgaaactatagaaaaacctttttacatatctgcattgtctgtaggaataagccactttgcaaatagtgagatggatgttacgtcttaatttcttgtccatgtgatgatgaatttttgctcctttagatggtttaattcactctttatatgatgcaattctcttaattctctttgctgctttctttgcacaaagatactgtgaaaatatagagaaagaggtaattcacggttttcatttttcattgttacacttggaactgaagtgatccattacttgattttgagagagactgtagacctaagtgtttaaattaaaagaataaagcttctaagataaagctcttgctatcttgggtttagcaaagatttcttaatcagatctcaaagttactaacaataaattaataaaataattgagcttataaacatttttaaaaatacttttcctgatccaggagagaattgacttaagagtctaacaccttttaaagtctgataagaaacatttacaatttatcctctctgagcctgctacctggagggttcatctgcatgataagaatcttggtctccacaaccctttatctgagcccagaccttcccttctttggatatctggtctttagataacctctttcaaccaattgccaattggacaatctttgaatccgcctatgacctggaagcttccactttgagttgtcctgcctttctggaccgctgatgtcttcggtctccctggaatgtacaaagccaaaccgtagcctgaccaccatgggcacgtgctctcacgacctcctgaggctgtgtcacaggcatgtccttaaccttgacagaataaacttctaaattgattgagtcttttctcagatactttttggtttacaacgtgaaatacattatgcttccattacactagttatcatgggaaaacacctcaaaaaaataaaaacagaccaacaaaagacaataaagacctttgtgccgtccattatttttctgtcctagtatttgtggccgggtcaaaaacaaactagacagggaccctgagggagggagatttcgctgacatctgtaggtaggatcaggcttccagggctgcagagggaagagcttcaataagaggagggaaaagcagtgataatgaccttcatgggtcctctactgccgactgtctgggctgcagtgccctggcacatttccttgcagagaaaggacagcaggagtgggcttcctggttccctttctgttttctctgaggccagcaggtgcctggcgtggcctttgcgccccctgctggtcgttctggcagcacacagcctcctgccttgccagtgtgaaacccggtgctgtcttgttccccgggtggaatgcaagagaatgcttgggaagaactttgttacccaatgaagcctcctggttctctagtccctggtagcctgtcctggttgccaggtgcttgtttgcattccaagctccacattccccagggtccagtgtagtcttgtgtctaagctggtgtctggccaccaaaggcaggcgtgcagggccttggctactgcgctaggtctgctgatggccacaagcctttagtcccagctctgccttagcaatgggggtgtctgaaggctcaggggatacacaggtcctctaggttcctggggagatgatggtaagtaatccttcttaacagtctttaaaaaatacataatttaacatggacaaagcaagtaatcaaaaggctatctgacaaagtgaaaaatattgtaaaattcttaacacgtttaactagatcataaacccaggaaatccttgagcttccttcaagacaggccagctctttgagtgagttagatacactgggtttgtcatcagttaatactaatctgaataggtctatctctttgtgtaatgataaaagaggccttgttgaaaataagccaaaagggagccccctctctccatggtgaagtgtgtatatgggtcattttcaaagttagatatggtttctgtaagatgaagcctggccattctaagtcacttgagtgaaaacagcttacgagcctggcagaagaataattcacaacataagaaaacactttctgatctttaaaaacattgaaaatttcttttacaagaaattgaaggctggaaagaaagggagaaggacttgaatagaaagaaggaaattattggaattctaatgaatacagaacacaaatcctaaatgatagatttagtttaagtgtctgatggaaacctttctgaatatcacatatctaccagccaatagaaaataatgtagaaggtggaaatctgaaattcaatataaagagtggattataaaaggaagaccgcattatccattaggcaaagacccttttgagaaacctatctgtgcttttaaagtaagcactttctcctagaggaaaaaaactagaagacagatagtaaaccaaaaaaaaaaaaaaaaaaagaaaaagaaaaatctaataaataaatttcttagaactcaaattgaaagcatcctatggaaggaagaatctttccatttagaaaatgctcacacagaaagtgagaaagcttctgcagaaacttgaaatgccatctgaactttatcaataacagacacatcaggtatggatttaccatttaacattagagaagaaacagcttgaagtaaaaggaagcatcaaccaacccccttctaagctggggacttaagaaacaagaacaagggaaatgaatcagaattagaagcactttgatttgatcaaaacctttttatctcccctaaggaaagaagcttgcaataactaattagcagctccggccactggagaaagctcaatgccttgagaaaagcaaatgcaccggagaaacaagttagatagagctgaattaaaggtgagcttttggccaggcacagtggctcacgcctgtaatcctagcactctgggaggccaaggcgggtggatcacccgaggtcaggagttcaagaccagcctggccaacacagtgaaaccctgtctctgctaaaaaaaaaatacaaaacttagttgggcatgatggcgggtgcctgtaatcccagctacttgggaggccgagacaggacaatcacttgaacctgagaggcagaggttgcagtgagctgagatcgcaccactgtactccagccagggcggctgagcgagactccatctcaaaaaaaaaaaaaagtgagcttttatgaagtggtccttatatccctgcaatctccagtacagctctgggagagccttcagaggacacagtgatccaccgataaccagatctgggagaaggaaagataactagcaacagatgatcactaagttggaaaactggatttttcccccacctcc

SEQ ID NO: 1884965 - DNA, 4001 bp, Homo sapiens
gctgcaacaggccactcggacgtgggccttctagaagggtcttccggggtgtcactgtctccagggcagggctgtcatatctccaggagggccgtttgtgaccaagcaggccgtgaaatattatgccagctcacacagatcagcatgtgctgtgtgccacaggtgctgttctgagaggcttacatgcaaaacctcgttccatcttcacagcgactccgggagggacgtgctgctaatctgtacccaatgaaggcactgaggaacagagaggttggggagcttgcccacagtcacagagctgatcagtggctgaggtctgaagccaggcacaatgactcatcacctgagcccttaaccctgcaccatccagcctccgtgcgtcattccaggacccctgtggtccggttgctctcacagtccttgtcagtcccccatcatgaatcatgacactgaagaccccttagacaatcagctggtccagccctctcattttaccctggcagaaactgaggccctggggaaaagaaatgactagtctcctggccagcggcagagaaattgaacaaaatcaggtactctcccacctcttaccttggcgttatttgctatgccccgatcctctcaatttgggaagaaagcacagctgagaaactgattcgtaagtctcaagaggtctgagccagatttagcttcctctctctggtgcatgtatatcttaaagggccgacggatggctgtctaatgatacaattccaggcagaattagtcggtggggcagggaggggtcctgtccactgacaggcgggtcagcccacacctaatgaaaatgatcatgtattaagccctgttgtataccaggaacttcacacccactgcctcctttaacactcataacacccctgcccagtagatgttctcagtgttgtctccattctcaaggtgaggaaatgagccaccaagaggctccatgacttgaagtaacagctccacggccttttcttaatccacccactgttattggcatagagcagtgcttccaaaaggtggtccctggaccagcagcgtcagcttcacctggaagcttgttagcaatgcaaactctcagttcccgctccaggcccactgaatcagactctgcggctcggggcccagcaatccgtgcactaataaacccgccacgcaattccaatgcatcactcagtttgagacccaccagcaaacagggatgctgccgagcccagcaaaagaaaaatcagctcagggcttctaaattgtaagggtagtttgaacttagttctttgggtacctgagtctcaaggtgtgagtggcagccagccctacccaggccccctcaaaagagagtttcttcgtcctcatgacatcaccaggaacactggcagatcctgcatcagcttccttctcttctattttcttagccgcatcgcactttgccaaaacgccttgacctttgttgagcatgttatgaattctgacgaataaaataactctctggaggatggggatatttttaattgaattgtagaagccaacaactgccaaataaagccagggtttctacattccgtggcaataggtggtttagatttccttcctaatcctgaaacctgggcttagtctcagccaggagcacgagctagggcttcaccttccagatcttcgccgtctcttccagccaattaaaaatccctgctgctaccattacctattttcagctcccaaccagttcctttgtctgccagacactgtcttgctatcattaaaaaaaaaaaagaaggttgagatgatgaaattcattttgatcacaggcgtgtaggacgcttcatttccctgcaacacaaactgattccacgcacagatcaatgttaacaagcaattttatgcaagattgtacctgtttcttcagaggcagggaacatacatcctttttccccaacgcttgtgaggtatttgctgcagaccttgcagaagctcacaggaaagagggggaggccttagcaaaaccggtaccactcgtgatccacgcgcccgtcagcagcacctcctgagacaggtccggtcatgcctggctggaagcggtctaatcggtgcccattgctctagttctcagcactcactcacttgcatgtgcagtgggaggaagggggcctatgccctccacactgcctcactgcctggagtctggaagcctcggggccatttgcaagtccatcacaggtctcggtgtcagctccagataatcttggcagcaaagcaggctgagtaatcctgggccgttgggtagaacttccaaaggcacaggccactgaggctccttctccagctgccggcatgcagtcattcctggtcatctctcactcactcattcattcatcccacaaaacagtgattgggtgcccatacaccagggaggcagagattaaaataactgccctatcttgaaggagcccgtagcctcgtggggaagacaggcaggcaaatgttatgacacagggagataaacgcaatggtcgacagaaggtgggttccggggacaacggaggtcagggaagactcctagagaggatgagagctaaacagagacctgcagggttggggctgggcagcaggaagaaataacagcatgcaccaaagtgggggcgtgagagccaggctgcagggggggaccatgctggggaagcggcgagagaagctggaagcagacagggcgtctttgctttgctgagaaacttgggtttcacactagggatgtggggagccctgggagaaatgtgagcagggacatgagctatgatgccaagttagcagcctagaaggatggctctgaagatggtttggaggcagggagactggtgagaaggctactgctgttaacagccatgatgagaaaggatgaagccctaaactgcggctgtgggcatggggaggggagaagttggcagagcccagggccgtggagaagcagcagggccatggcccacgtgggagggagccaggcagccagcgcacagccagtggtctccgagctgatgagaattcagaatacgcgtgtgcttcaggccccctgtgttggtactccatctaccaaataaacacgtacagattttccatttcagaggcagggagatgctggattcagggacatttcatctgaagaatctatcaaactagacattgtcaaatatttactcaagcaagttagactgttagctagctagagccactggaatgggggcagccactagcatgggggcagccacctggacagtggttgttgagagggggatagggcccagtttcaggtcagtgaggaggggcagctgcaatggatgaggggctcctccagaggaaagagtccacctggggagggagggtgatggaagccaagaagacggtgtttccagaagggagcaattaaccatgtcgatgctgccaaggggctgggatgaggacagagataggccgttggatttggccacatagcaaccagcaatggccgtgacaagagaagtgttaatggtgcctggggttggatgcttgagtggagcaggttgaagagtgaatggagaagaggaagtggaggcagcaaagaggagagaagagaggcagtgtctagagagcaacgagggctcaaggcagggttctgatttgtaagatgaaaaagacaagcacttgggtgctcctgaggatgattcagtagaggggaggcgtggtagctatctgaaagaacacctcaaacttcgtgtgccccaagatggagactccgtctctccagcatgtgtctgcaccatgatacactcacactagagaacggtacctccaggcccctgggtgctcctgagatgattcagtagaggggaggcacggtagctatctgaaagaacacctcaaacttcgtgtgccccaagatggagactccgtctctcctccagcgtgtgtctgcaccatgatacactcacactagagaatggtacctccaggcc

SEQ ID NO: 1884966 - DNA, 4001 bp, Homo sapiens
ctcttagcaccatctgaacctatttattcttcctcactggaatatacattccataaatagaggaaccttgtctgtcttgctcttctctggctccaggactcagaactaggtgcttcaacacctcataggcattcaacaaaaatctgatgaatgaatgaggagccagccagacatcggggctgtaagtaaaggtttctcttccgaggctgggtaacggaggtcccatgacttgaatacctattagttaaatggccagttctttaatggtttcaaaccgttttcagataaccccacaaaaaccctgtgtggtatttttataagctctattttatagagaaagaaactgagactcagtaaacttatatgacttgcccaaggtcactcagcaagtgcttgaactcaggatttgaaccacatctgccagacccccaagccacctgaaactttctatctcctcacttttcctcccaccagggtaagtgggataaaaaagacagatttggtgaccaaactctagaatgacaacactaaacaatacagaagaaacgttaagtattatttcacttccccatcagtggtaattatggatctcattattccagaagcagcacaggctaaatcatagaggtttagataaatctgagtataacggattcactaagccctattaaaaacatttgcagcgacttgttcagccctcttcaggttggctgtgtggaggacaaccatcacctcccagtgccaaggcacacaccaggacagcaaagctcacgctcataaaacgaggttagagttgtgaaagcacttcaggaacatattagttcttaacgtgttcattttcttcagtccccaattatcactcattaccgagtacagactattgttgtgggctcagttgtgtcctccccacattgatcttggacatcccaagcctctgggactgtgagaaaacacatttctgtgtctaagccacccagtttatggtattttgtcacggcagccggggctgaccaagacaactatgtggcaggtactacctaccgtatggccctaaaatgttttaacttcacacacctggaaagcaccacagccccaagagaaaagcttttccgcactgctgttaagccagggccacacactgcagtgctgcggtgctccaccagctggaggatggcctggcccataatacccgcattcccaccttgctctggccctgtgtcccctccaacgtgcatcctgagctcgcaacctgtgtggaacccaaccagctgcttatcaacatttaagtccacttttatgacacttccgtcaacaatctggtcaactgcactcatccctggcctccgtactgtaccctgctccgcctcgattcccgccccgggggaagctagactcacgcagctaactttatcggctctgggctctgatcgccaagtttaggatcccagctgtatccttgctaaagttagtatcgctggggctcagtttctgtaagagacaggtgggttacaagcgctcactcactgttgcagtgtcttatctacgtaacataatccatgaaaagctcaacacagctaggccaaatctaagacccagacacgcggctgctgttaatgccgactcctgcgcaccgcgccgttccaccgcaggcacaaccttcctaggccggccccgtccccacacaggggttcccgcttgtcaatcacgctggcccggccctccacttccggaatgtttttccgctccggacgggccacccacctttgcaaacaggggtccggtgccggaacagacgcccagtttgcgatttcaccagtctgcccttcctcgtcccgctgttcctcgtcctaaggacctctgctgccacacagcactgcgctcaccttcttcgccggcagaattgctacgctgaaagccaggccccgggaatcagggcaaacgccactgaatttgaaactggcgggtggcctcagtgaaaggctgccggaacaacccccgccgctgcgcatgcgcactccgggacgcgcgctaacacgcaacagccagaatctattttataattaacccagcaatattttctcaagaaataataataaactagaagaatgtaaatgagaaccgcattctttcttacattaagtgacatttttaatgattatacagaatatatgtgtgtgtgtgtgtgtgtgtgtgtgtgtgtgtattcatctatgtcactaacaaaagagaaagaaggccctgtgatctgctgataaaactatataattgactctgttatgtgattgcttgtacaaagactgacttcacatcatctgaagttattcttaagtcattctccttgaaatattattgcttcattctatattaaatatatgcatacaattcaatttatccattcatctttttatatacttttaagaaagaaaaagcaagtgttgtttctcatgggcacataattcttttcatttatttattcaacaaataattattgaatgcttgttattagtggatatacttctgaataataagaaacagtgaaaaacaagacatctctgccttatattccagagaggagagacaggcaataaacaagaaatataagtaagttcattttataacatgtcataaaatgacaaatgttatttttaaaaaggcacagcaagggagatcaagagtatcataagattggggttagactttgcagttttaaatgctgtgatcagggtagacctcattgagaagctgatagatgagcaaaggtttaaggcagtaaggaagttagctatcagaacatatacagaagaacaatacaacagaagataataaaaggtgtgaaggcttcaagtcaagtagaaagattctcaactgccaaagaaaagcaaggagtttagtatggctgaggaggtgaaggtaggagacccatcaggttggggttgtggtaactggggatcccagtgtttgcatgtacaagtatgggacatttcattctcctgagcaaaacttccattggtgattcactaagagcaagaaagaagactagtctggatgacttagaatgaacacaccagtgtttctgtaaatagaattatatgatttgtaatgtgtttgtgtatacgtgtttgtgtgtgtgtatgtggaatcttttgctcagttctatattcatgggattcattgacactgatgcagttaacattattctatttcattgaaaaacactataaagttttaattgtatgaatatgccacaatttacatatcctgttgtgggacatttgagttgttttcaatttagagctattacaaataatgcaaccgcaaatgttcttatacgtgactttttgcacatttgctgtcactctcctgggtatttatgtagcggtaaaaattgctgggacagaggctctgtggatgatgaattctagtagataatgatgattcattttcacaattggatgagagattcggttgctccacatcctcactaaaacttggcattatgaatcttaactttaaccattttggaggatatgtagagatttcattgtggtattaatttgcatttctctggagaccaagtaccttttcatatatttattagctatttggatgttttgtgtaaggtgctaggtctttttctaatttatttctggaagtcttcaatatattctgggtataagcacttgtcaattatatatacagaaaatatctttttcttctctgtgacttttcctttcactctcctaataatgtttttaatgaataaaaattttaattctaatataaaaagcaagactgggctggtagaagattattttccactagggcagtttctaataatatgtatagaaggaagcgccattgcagtattgactaaagcaggctggtggaattacagctcagttgacaagcccactggcctgatctctgaatattaatatagtgtcatattaagtgtgagtctttctaataagacaaaaagcacattcatcatgttcttttta

SEQ ID NO: 1884967 - DNA, 4001 bp, Homo sapiens
gtgaacaaatattcagccaactagtatttattgagcaacaactagaaaccagaactttgaagggttttaaacaaaggaaatggaatctctttgtcatttaaaaggccacaataaaacaaataaaagtaaaaaataaaaaagaccatagtgaggagggtgcagtggctcacgcctgtaatcccagcacgttgggaggctgaggtgggcagatcgcctgagctcaggagttcgagaccagcctgggcaacatggtgaaactccacctctactaaaaaaatccacaaattaaccaggcatggtggcatgcaactgtggtggttacaggtactcaggaggctgaggccggagaatcccttgagcctgggaaatggaggctgcagtgagctgaaacagcaccattgcactctagcctgtgcaaccaagccaggattaataactttattgatgtgaaccaattatccaaaaataataatcacatattagccatagcggactccccagctagatgttttctgcctgtgtttgtaaatcctggacatagttaaatttcaagtgccttcaataagaaatcaatggcttggaaaacatctctgcgcagtcttgataagatttctaattgtggtgaagcctcattccttaaattatttattcaacactaacccattctacaaacttacatctgctgggctctgggagtaacaagatgagttagatgcagcagtcccaaatctaaaggaggttggagactagaaagaccagtgcctgctctgagctctccagtggtccccagcctctcagtcaggcctcacaggcccctctgccagaggcggaaccagcttgcctccgctctgcagccacactggccttttctttcatttctgagaactctcctcactccctcccactttgggctctgcagaaatcccagttccctttgccttgaaagctcttggtcaatttagctcctcctccttcagccctcagctcctgccttgctgccccaataatctttttctgactgcagatctggtcaaatctttgtctgaaaccttagagcccattacatttgtagttttacgtgtacacgtgtgatcatttaatatttgacggtgtgctctcaggtgcctacgctcctggagaggcaggggctgactggttttgttagatgccagtgcctgacacacaataggccctcaaggggtgaaaaaccaaccaaccaagtcaggacccaagcaacctgggcctctgtggaagggcagaatggcctgagtttgggtttctcgagctaccttaagatcaggcctcctggctcctatcttagcccttctaacactctgaagtgtagaggttgtttgttccaagtccccaaggtactgtaagctcccagatagcagaaatcccattatattttagtgctgtggccccagcatccagctgcgctgttacttagcatgagatccacatgaaaaccatttcgcaactattagccattgccagtattaatactttccggaaggtggcacaaagtgggggatgttatagacagcttcaaagaaacgtttaagctagagttgactctttaaataatacaagccatccccaaccaaagattaaaaatttaaatacaaaaaaaaaaaaaggaaatttgcctaccccccatttgtgaaaacaaagaaaaaaaaaacagttaacgtcttaacttttctaggccttcactctcgcctctccccgcgctacaagggcgaattctggacgtatctacacagtcaccgcggagtctgcaatcgccgcgacgtcccctggcatttcttggccaggctgcaactttggtgacggtgtatgtagttacatcccctgtagtgcagctggtatttagggtcctcattggcaaagttgagggtataagcagggagggaggggaccttggcttctttccattcactggcatgttttcggggcacggtcatcccacgctgggctccagcgccagtcccaaggcctcgccgaactccagcccgggagtgcgcgcggccccgcccaccgggcggccgaggtcccgcccctacctcccccgccacacctacccacccaccccattgcaatggtctctgcacgcaggcgcagtggcgcgcgggggaggcggggcgcatgtgggcttcatttaaacagagcagagggggcggcgcgcggtcgccgcggtgctgctgctcagtgggagcgggtcttcgcaactgtctccgcgtggcgcgcgcctctagccgcccttcccctggcggctacggccggagggagcggaggcgagcgggagtcgggctccatggagagcggcggacaactgggcagaggcggagctttcatctcggcaccctggttccagtgacccgcgctagcgtcccgtcccgcccgcgtcggagcggccgccggccccgggactgaccggcctcgccgcacctcccgcaccgactagcgctcccgggcgctcctgcgcccgactcgccctcgcccccactccccggcggggtggcggcggccgggcccccacggcggcggccggagcagcagcagcagcagcaggagcccgcctctatgatgaagttcaagcccaaccagacgcggacctacgaccgcgagggcttcaagaagcgggcggcgtgcctgtgcttccggagcgagcaggaggacgaggtagggcgcccggcgccgcacgctgccctccggggcgccggggtctagggcccgggtgcttcccctcgctccccgcccctgcgcaggctgcggggctgggagggattagcccccttcctccctccctcctttcctccctcactcctttcctccctcacttcttccttcctttctctgggctgatagatgagacaaagggggctcgcccagccccagtttctccatctgggcactcgagaaggcgcctggtccccgggaaggtcccgggccgcgtaagtctcgcctagcgggagtcaccatcttaacgtgcgaattgagttgaaagccggataaacctcgagtgctcagcgagaggagggtggaaatggcgtgagtgttgcagcagagcccttgtgcctcttttacatattttccttccatgttacagccgtttgcggtctcggattcgatctaagcatgtttgtggagtaacagacagtcctcgtgcttggaattgagtctagtcttggcaattcttgtgggtccatgaacccgcaagctgttggcataattatgcctcatttttaaaacggccttcccttcttaaagttttctgactgcagaaaaatggttagtgaaaaatgtggaataatgccaaaagggagacgatggactagagatgggcaaagctgccattttcagacagtaatctccagctctcagcttatgtataaagggttctttgctgtctggcttgacatctggaaaggagtagcctttctcgttctcagagcagtcgttcttggataatttacccatctgcattgggctgagaatgagacccttggggtttccctggagagcgatttttacttaattcagtagtatttatttaaaatggctaactgttgaagtttgcttagggcaatagtagccttttggtattgccactcttaagataaattacataggtgaaaaaaattaacattctgagttctgctttcataaccaaccgtgtataaaatactaggctaaggctggagatgggaatttaatggcttccttactgctagtccctgtagttgtgatgaatatgacacagaatacactcagtggcttagttcttgttatgttaacgaaaagttctcgaaatttgcccttcaaacccttgttttgcctttatttttttttgaaaagaaaccaagccctttaaatgggttgctctgtgctcactcataacctttacgtattagacttgaatcccaaacgagtgtgcagagaaatacggccccagcctttgagatgggtctgcttaggagagctagaaactgcaaagg

SEQ ID NO: 1884968 - DNA, 4001 bp, Homo sapiens
ccaatcagctctcaatgcagccagaataaactaggcagaagaacatggaaggacttgacttgctgagtcttcctggcttcatctttctgctgtgctggatgcttcctgccctcgaacctcagactccaagttcttcagcttttagacacttagacttccaacagtggtttgccaggggctctcaggcctttggccacagactgaaggctgctctgtttgtttctctagttttgaagttttgtgactgggactggctttcctgttcttcagcttgcagaaggcctgttgtgagacttcgccttgtgatcgtgtgagtcaatactccttataaactccctttcatctataaatctatcctattaattctgtctctttagagaaccctgactaatacaggttttcagacattactctgaagacctgtgtgggagtcatgtttgcatccttcttcagtaatattagaaaaattaaaataacatagaactttttaaaacaccaaattaattcaaggcaaagagatgtgttttgttcctaattatatcctttctacctttttggtatttgttaagcttttattgtatttaatcatggtcacagtagaaggtaattttatcttctttcatctagttttgtggcctatatttggcaaatgaaaatgatgatgactcaatattggctttccataattttgggtggagaaaatatttactgactcatgacatccaaaggtctgggatccctaatttgaccaactgctatgtctcattaggtagcccccaagctgagcaaccacagtgagaaataaaagggacttccctaaccatttattttcttaagaggatagtggctttgattctgaatggacttttactacatttggcatgctttaaaaaagctgttttgctgaggatgagatgaagtttgttaattgcactatgggttgctaagggacgtgccactctgaagcgctgcatgcacgtggcaactccttagcacctgtggcctagggaccttatcgccattatcccacgcattcaaaaacacaatacccacttgttagtcaaagcagctgacctaggaataccttctaagtcagttgaaaagctttgacaatttttcaaacaggaaaattagccaggtattgttcagaatggttgacctgtgaatttgatttttatttgtttacctacacagccatgacaccaagttagcaataagcagacttcagccaaacatcatggttggtgacatctgagctgcacatcatccaccacattccaagcatgtgtgacctcccccttcccccaattcctgttagaataagtggaggcagggaggtcatggtgaaggcttattaaaaaaacaatcagacataaaacaattgtttccttggacttagaaggacgaattttctttgcctaagcaggaagcaaggaaatattcaggagaggctattggccattcatcatgtccctatggagaccagagtttatgtgagtgatactattagatctactttctccacctctcccagactatttaagttttggtcaattgcagcagaatgaaagggagaaatgttgaaactccagcaaagaaaatatataagggcaaactagtagatcaatgccctcaccctccaggccttagaacagagaagacagtaaatatcacctacccatttctcattcattgattggttcagtcacagatgggctgacctcgtcattcattgatccattgcaaatcaaaaattttaatactgactgttatatgcaaattattcttatcttcggaccatgggatggagaggtaataaaaatgagcccaaaaggaaaatgcttttaggaaacttgttttagtctggtgtagagactgttggtttttgagggcccatgggtatctttttggcctcaaaagggctgagtaggttggaggtttctatttcggaagagatgaaacagtccatctggctgatgagggctcactccagtcttcatatcttaagggagaaaaataaatacatcattcatgtttcttcctcagggccagtcagtttcccagggaagaaaagcagataaatacttagggcataagcttatctaggaagagtgggtgtgtcccctggaatttaaactcactggggaagagagaaaaaaagagtaatcgctagccaccctgattcaccattaacagagtttgtgtttattgatattaataattattattgcttattggatattaacaatttaagcacatgttaatgtctactcttatcatcatcactggactgaaaatacagaaagtcaaagcatagctcttaccctaccaaaagttgctcattatctagtcagggaggaagattggtcaaaaaaaagacagcagagtcctgctttcaattgagctttataaaacacatgatatgatataaaatcttttcattcttctggtatgtcattggagggctggttctatcacagtgaaaattataactgccatgtgtattgcatacttcctacttgccagagcctattctaactactttgcatacattatcccatttacaaccacgtgaaataggcaatgttattattctagatttgcagatgaggaaactgagtcacagttaaatgatttgcatgaggttatacggctagtaagtagtagagctaacattcatattcatgtagagtgcactgaagtttccgtgcataaccaatatgctatattgctttgcatctgagagattgttatgtcggaactatggcttagcaggcaccaaagactgggcagagcaagcacttcaggacaggttctatcagccatatcagccagagatggttgtgggcaatgggctgaggagatgtgatgtgcctttggagggagcaaatgtagccacattgacagatcacagaagaaggaactaggtagtcctctaagcaggtgaataataacaaaactaacatatggatgacttgcaaatgactgtgctcatcaagtttatttggctccgaacaaaataaactaaatataaaccatcttaaataaacaagagcatgtattagataatgaaagtgaagtgtctacgggtacattagcttcaggaatagctcaatccagctgttcaaatcaagaatctgtttctttacctctgacacctgctttttttgttggctttattctcagtttttctttaggtagtaatgtcttattgcttagcaaccatagtggaaaaaaagtttcttttctccaatagtttattatttaattagagtacttcaggaaaagagaagagcaaacaaaactctaggatctgtttggttggagaacacaagcattaaattccgtgctgtataaataaggatgtgtaacacttggaccatgcatttgaagagttaatagtcaaactggggtaattgacaggtttaaaaatagcaacagtgcaggttgattgacactgtttttgtttgtttgtttgacagcgtctctctctgtttcctaggctggagtgtagtagtgcaatcacagctcactgcagcctcgatctccggggctcaagctatcctcccacctcagcctcccaagtagctgagactatgggcataacactacaaccggataatttttttctaatttattttttgtagagacagggtctcactatgttgctcagaggttgtctttaattcctgggctcaagcaattctcctgcctcagcctcccaaagtgttgggattacattgtgatgtacctgataataaattttagggtacacttggggcttaaagacatgaatcagagaaggcctcagttgggaatcaaaccttttcttcaagggtgaaaaaggtaaagctttcatcatcacacacagtaaacaaaactatggctgtgatttccgtaacagagtctttggtaattgttttgttttactttgttcacaataaaacttgttgagaatagcaggttatatctacatctgcatatttgctcaatgatctgtg

SEQ ID NO: 1884969 - DNA, 4001 bp, Homo sapiens
ggaactaggtagtcctctaagcaggtgaataataacaaaactaacatatggatgacttgcaaatgactgtgctcatcaagtttatttggctccgaacaaaataaactaaatataaaccatcttaaataaacaagagcatgtattagataatgaaagtgaagtgtctacgggtacattagcttcaggaatagctcaatccagctgttcaaatcaagaatctgtttctttacctctgacacctgctttttttgttggctttattctcagtttttctttaggtagtaatgtcttattgcttagcaaccatagtggaaaaaaagtttcttttctccaatagtttattatttaattagagtacttcaggaaaagagaagagcaaacaaaactctaggatctgtttggttggagaacacaagcattaaattccgtgctgtataaataaggatgtgtaacacttggaccatgcatttgaagagttaatagtcaaactggggtaattgacaggtttaaaaatagcaacagtgcaggttgattgacactgtttttgtttgtttgtttgacagcgtctctctctgtttcctaggctggagtgtagtagtgcaatcacagctcactgcagcctcgatctccggggctcaagctatcctcccacctcagcctcccaagtagctgagactatgggcataacactacaaccggataatttttttctaatttattttttgtagagacagggtctcactatgttgctcagaggttgtctttaattcctgggctcaagcaattctcctgcctcagcctcccaaagtgttgggattacattgtgatgtacctgataataaattttagggtacacttggggcttaaagacatgaatcagagaaggcctcagttgggaatcaaaccttttcttcaagggtgaaaaaggtaaagctttcatcatcacacacagtaaacaaaactatggctgtgatttccgtaacagagtctttggtaattgttttgttttactttgttcacaataaaacttgttgagaatagcaggttatatctacatctgcatatttgctcaatgatctgtggcatcttctcattgatgtggtgatgaatctgaaatccatcaagaaagaatggaagaataagatttacttcacaaaggttaaccttacaatccagtgctgtcatgttgctgtgaataaaggaacatttgctaagaattcccaactaaaaccaccaatcaagctcattgtctccttctggcttgctctctttctcccttatgcgctaaaaaaatgatttatcttttaacttagctttaattcacaatttcacaattaattaaacatcagcctaatcattatacccacaaagcatttaaactgatgttaggagaatgatggggaaatgaataatgctttgaaggtccatttcaaattagttatttgattaatgaatatttcacaagggcatttgggagatgacctctgttgatgacttaaagaaagacaagtctgtttaggtaatgagacgacaaagcaagtttgagttatctctgggtgtacgttgtgtagaattacaaggattaatccatacaaaatgtattacctttcccgtggctcgttggagataacatagaattgtaagatcaataaataaagtttggcatttcaaagatgctgcttgatgataaactgcaatgtgcaccccagaccgccagctatgagcacaagccgcccaccagaggcttatgaaagaaagctgggcttgttcctgataaggcctgcggtggggcgggctgtttgcctcataaactctccataatccctcctagcacctgacctttcgatttcttagatgtagaggaaaaaaattggttgtcaccagcttcctatatattcaaacaaataagaaacagcttaccttgttttgtggtttagaaggagccttttctcagcagtttcatgatcaaaagcacatattgcaagagggaatcaaatataggtcaaagacgctgactgcagcacacgataagaataggacaatgaggaggaggtggtgtaatcacaaccagcctgccttctttggcaagaagcacttatggcaatctcactgtcctcatcttggacagttaagttacttttcattcttaattatgttaaatcttagaacagtcaaagctgaatcaaacatggaggtcatcagggtcccaaaaggattggagttatttgaacatgaagcaaatactagaaaaggtttaatttttatggtaagcaacatagcacttgttttcctcctgagtttttctttttgtcttgaaattatggaagtgactctccaaaggcagggtttctgttcattccacagataataatccaaagcctcctattgctaaatcccttcctcatagcaagttgagaacttgaactcttacggaccctgggggatccctagatacccagtacagaggattaaagcagagcttctggttgcaacacacagggcaggtgagtggggccaggctccagagcccaccttcccccgaagtataaaggatgagttaacatcttctaaaaccatctattaagccattctaaatgactttaactctaaggaaagaaagacaaatacccctttagaaacaggagaatttatgacatggcttggactttaagattctacttcggggtagtagaaatttttgaaattataagattaactgttcagctttagccaagtcacttagtgtctctcctgtaaaaatgcaagcacttttccagcttagaatttcctttcagttcaaaacctctcttctcctaaggtttattcctctacatgggagaaaaacaattcaggaatcatggcattaaaattgtgtgtagtcattgccatgtgaccgttagggaaacagatttttagccttttgagtggttgtttctcagaatctgagtcctcaattttttattttcatatgtactttaacataaatcactcaacaggaagttatttgttacagcttgcatttatctgcactcacttccaaatattatttgagacccaagtttctcatatcatttccagcattgcgtcatgatttcagtgcttcttggcatattttgttttgggcttgaaatattctagctcatgcatttctaaggttattggctagggaaaatccttgctttaatttagccttataaagaatcatctcatgctgaagatctcccatataaccttcctccaggagatgatttaaaagtcaaatgacacgacaagactggctctcatttttccttttcaagtccagaaaggctttctcgaaatatttggcatcctactctctggcaaagcagcatccgggaattgctcaggatgtcaagcacttcttggtttcgtttctcttgctcttttttttctcacaaatggagacatccttgcccttggaatcaattcaggcttgggactaagggatttgaataagtctagtacctctctctgggcctcattgtgtcttcctcaacatgcctttagtttggactttgtgtcctgctctaatgactgattatataccattgtcctttcacatttgtgtcttcctgagagctatggtgtcctgctccttgaaccgatgactaatgactagaaatctcatattatgacctgaaactttcctgatggcagccacttgcctggctttgtttaaaaaaaaaaaaaaaaaatcttgttctgtttcagaagcgggttagatctcttcaagagtgccctcagggatggcaagtcaccaagactccagaaatctgaacacttcctcatttgtagctgactttacatttctaactttggctgcccctggaattcatttcttgacactagtccaaatcagaattggtgcctggttttaacatcctagttgattccatcctcaccatcatgcattacaatttcaacaaagggcaacactctcttatgcaaataacataagtattttccttgttataaattga

SEQ ID NO: 1884970 - DNA, 4001 bp, Homo sapiens
cgtagcacactagaaacaagggattccttaagacacatatgtggggtttttgttgttgttgttgttgttgttgttatttttattatctttaaggataatttgttgggtaggggtcagtgagttgggagtcctgattggttgggtcggagacgagacacgtaagtttaagttctataatgaaacgctttcaatcatgtcagtttatctgtgcctataaacacactcctttagagaaaatcaaaagtttatagccaggcgcggtggctcacgcctgtaatcccagcactttgggaggccgaggtgggtggatcaccttaggtcaggagttcgagaccagcctgaccaacgtggtgaattaccatctctactagaaacacaaattgaacgggcgtgtttgtgggcacctgtaatcccagctactcgggaggctgagacaggagaatcgcttgaacccgggggacggaggtggtagtgagccaagatcgcaccactgcactccagcctgggcaacaagagtgaaactccgtctcaaaaaaaaaagtttacatataaggctctcttagtatccctgggaagagggttcatcctgtctatgaacgggtttaggatgacacaaattatcaaattatccgattagtgcactttcctaacccatatgtttaatcagtggcacatcctggttttgaattatttaaacgcattattatttagccattcacatacttacgtttgtcacttccagttaaactgtagccacctacagagagcgaaacagaagtcggctgataaaattttgataaaatttcatttgcccgcagctggtcatttcattgggcgcttttgtgttacaaaagtgtgtgaattggccgggcgcggtggctcacgcctgtaaatcccagcactttgggaggccgaggcaggtggatcactaaaggtcacgagttcgagaccagtctggccaacatggtgaaccctccccccccccacacacacacacacaccccgcgtctctagtaaaatacaaaaattagccaggcatggtggtgcgcgcctgtaatcccagccactcgagaggctgaggcgggagaatcacttgagccttggaggtggaggttgtagtgagcccagatcgcaacactgcactccagcctaggggacagagcgagacttcctctcaaaaaaaaaagacttatgaattgtttgaagaggcacgagaccgtggcaaccctaactgtccccgacatctggcagccatatgctatccttgaacttgaacttcagagtgaaagtataaatttgtaaggggaaggctcagccgcaagtcacataccagtggtcagttaaaaaaaaaaaactcaggacggcaacctaaatcatttagaacgcgtcaagagcctcggaaaaactattttcacacacttctctagcactaacatgggaagcgcgtttccttcacatattccacaccttttattcttcccaccaacatcaagaatacaaagcgcccagagaggacaataagcctaagcagcggctccaagagaccggactttcgtacttcccgggggcaggcggaaggttacggagcgctggaaggatcttactgctccttgaagggctgtctgagaaaatacacagcctaacgactcctcgttagtatagtggttagtatccccgcctgtcacgcgggagaccggggttcaattccccgacggggaggtgtgtagctgcacttttttggcgacagttattattttctgtatcattcaatgacaggacactgctgttaaacataatatgctaaaccagctcccttaagtgcacaaccctgtcttcaaaatggtgacttttaaccttaatgcccaccatgaagtgaaagcctcccctgagagaaaatgccttacattgtttgcaggaagggaggaaagggaaaaagaaaacgctctgaaggcctctgcccttgcctccagccgccatcttgcgaaggcctgcgccggcttagtggcgccccgccagattacaactcgaggtcgcgaactcagcgcgcggaacctgttgggggaggggagagagggcggagtctcgcgactaacggggcgggggcagggcgggtaagaacggaaatcatttggtaaagaaaaggaagggccaatttcctttgatcctggagacccgactaaacgggaagccccgttctcccgcttccgctggttacgtcccagccttggttagaggactagcagtcaggaaagtttggacgctgaaggaatcggtctcctggtccgacagatactgggtggaggggcagagagtaaatggaagagaaagactggtacccctggaagaaacgccatttactggtgtcctaagaaactgcgcgagccacagcccagcaggacctcgtggcgcaacggtagcgcgtctgactccagatcagaaggctgcgtgttcgaatcacgtcggggtcaaactttttttttttcctcctgtattttaaactaccgactactagaagccgaggtgtattcctgccgccaattttcttgaatgttagaattaagttttcctctttcaggtattatgatactaatccttggtttgcaggaagatatgatttactctatatcgaagagcctcaaggctgatgtttttatcatttggccttttaaagtgagtttttttgtcacttaacatgcataatgtgtaaagaggtggactattactgctgtgcattagtgggtgtatcagtccactagtctatcacaggaagtgtacaatatactgtacaagctgttttttccaaacagttttaggctgtttgccttttgaaagagagtacaatagtgtacaatttctaattttgaatattatgctaatcaagtgtcttagcccttaccatgtgccaacactgtgaacaacctcacaatgtgtgactattatcccacttttacaaatgtggctgtggctcacagggttagtgacctgccaagggtcacccaagattctgaaccaggtgagggactctggatccctctttataaatactttataataaaggtggaaacaaacagttgaaagaatgtgtgactgccaggctcagtggcttacacctgtaatcctagcactttggaaggccaaagtgggtggatcacgaggtcaggagttcaagaccagcctgaccaacatggtgaaaccccatttctactgaaaatacaaaaattagctgggcatggtggggtgcacctgtaatcccagctactccggaggctgaggcagaagaattgattgaacccgggaggcggaggttgcagtgagcctgggtgaccaagcaagactccttctggaggtgggtggcggggaggaatgtgggaaaagctgttggactgggcgccttttatgttttcaccgattatgcgagtgatgactagtcaccacttttgactattaatctctttaatagcaggaagcaaagcttgctcgttcacatttgcaagctccaggactcttagtactaaatagtgccctacacgtaagtgtcaaatatttgttgaacagaaaatgaatagcaagactatgagaaattaatagttttagattttgatgatatgttttgtaaaattcctgaggttttctgcttagtattttgaaaataccaaacactaatttcttttgattcaacctaatgtagcagtatacctggaaattatatttgcacatggtgtggtttgttcttccctctcctgtttggattaaaattagatcatccatttcaacgggtatttatggactgtcaactctgatgagcctgatactgtgctaagtactaaggatgaggatacactgagtaaaaatgggtttttttgagcatcaggagacagatatgttaagccaccaaacgccataatgtgttggggtaagttcatgttacttggtaagaaccatgaaagtaacatgaacagagtggtatgggggtgctaaaacagtggacagtaactccacat

SEQ ID NO: 1884971 - DNA, 4001 bp, Homo sapiens
ctctttgaatctcagtttcctcttctgcaaaattttgacaataatacctacttctgaaggtagttttgacaattagaaataatgtcacatgctttgcaaaacatttagtatgtagtaactactcagaaagatatagctattctaattagtgacagagaacatacaaacatacaggtaggatttctctgccttagatcatatgtgtttaaatgagtttgaagcatcagagatctagttgtaaattctgagtaagctgaaagtgttatacggttatgctttctctaaaccaatcattgaagtgatgccatattaatatggcagaaagtttgtaatatatttttaggtagagagaaaaaaacagattataaaatggtaatatagtgtcatcccaattttgtttaaaaacagtatacatctagtaagatataaaccaaaatgttaaggttagttatcactggtttatgagactatagtttatttctatatttttaacacttttctgcatttttaatattttctataataaataagtattcatttttcatgacaaaaagaaatgtcatgtaataatatgaagtcaaacatatatcaaatattgatactgcaaaagttttcttttgtgaaccagttgaatccatagaaggaccgctctcagagctcaaacacagtgctccagggtgctacctgctgcttagaattctccataggagaaacgagaaaaagaaaaaccaagcccagttatgcttctctgtgccagtttttcaagccagcatatatagaagtatctagaagatatacaaatgattaggaaacaggaagttcagccagccacattatttaggatcatgtcaaatacatccctaaaaattaaaaagtaataatgatttccgtatttcttattaatcttaattcgtgagacaaggcctttgtatcaattcataataaatttaggagtattcgtgaaaaattttaaatacaatatatactttgaccagcaaccccacttcatggacactgacctacagaaagacacatttgtgtaccaagtttcatggccaagaattgtacaggaaaacattgtaagaacaaagatttccactaaaggggaaatgattttaacattatgagacatttatactatgtaatgctatccatctgccaaacagaatgctatagacttctacatatggacatggaatgatctcctacacgtattaactgtaagaaaaataagcaaattcaagaactatttcccaaagaaaccccttttatgttttaataaatctatatgtgtgtatagatttgtatatttatatatgtaaatacatagaaatattgaaaaggtctagaaagatacatacccagttattaacaatgactatgtctaggaaaggtcgtttttaaaactttatattttctgaattgttttaattccttcatacacacacatttccatttataaacttgaattcagttgaactcttggcagggatggaagacatggtgtccatctagccacagagacataactgatagctcagactggtaggagaatcaattaacgcactcattcaacaaacatttattgaatatttacaagatgccaagcctatgctagaaactgtaggtgcaaaaatgaaaatagtaaaacattgtctctgtcttcaaattttccacgaaggtatacatacctcattaaaaaaatctggattttcacttgttctttatcttatatgttttttataaagttagtagaaacaacggtttcttagtgttgcagaaaacgcagtaatgaatcattaacaatgaatcattaacaatgaatcaacagtggctcgaggaaacatctttatgacttacatcattaagatttgaagaattgattctgctcccacctcctaacatatacccttctacccctaagctcacggttgatgccaaaatctctttattgtgagttacacggagacaggagcagcgacgcaagctacgtgaagtctactaaatccactgttgccctctcggtaaaccagtatgaatgcagcaacaggaaggaccacaagatggcagactggaaacgagtcatggagcctacagcaggcgatgaggtgctacagccagtggaatcccgtagccctggcatctgaagagagactgggaagggctttatagatctgttgaacggagggatcagagcgaagaacaattttggcaccactctagtgcttgctcacatctcttagtgttctatttagttgtttttaccatctaaaaaacaaaccatgttcatctcttcttcccaccccaaatagatagtcatactcatcaaaatcaatcatagctttctattttagtatgattgagtagcagaatttttaaattggacaggatctccccaaatttgaggatgaggtgcttcatgcatagggaggaggcagaaagatagatagggacctggtgggacaaagaagcacaagtccacattgtcataaggaaaggctcttttcatgatgtatggggactagggttgagaaattattttcaggaagttgtgtgagtaaggccaaaactgtaattttccagactttatacctgtgcatgcagagacacataggtaaagatgttgagtaatgtgaaagtgtacattggtgctgctgttcttatttaagcagataaagtatctacataacctatgatccagccatttcattcctgggcatatatctcaaataaatcctcacacaggcttgcaagcatatatgcacaaagatgacagtgtggtttgtagtgtccagcaactggaggtaacctgggtgctcataattgggagagtagataagtaagtggtggcttacagatatttacaggatcatgcataaaagggcaaatggccaagcagcacatattttgacctgccaacacggtgttgaccaggatggctcttggagacagaaggagcagacatctgggacctccaatattgtcctatcatactctgagacagtgcacagcaatctggcagggccaactgtctgactctaggaaaaggacattgaaccttgagctaggaggtttgaaagctgtgattgaggtggcattggcctcttttgaaaagcaaaatcccaaagtgtattttgagaacattgataatttgttgtcaagacaagttgcataaaaagccggcccggcacggtggctaatgcctgtaatcttagcactttgggaggctgaatgggtggattgcctgagctcaggagctcaagaccagcatagacaacatggtgtaaccctatctctactaaaatgctaaaaaattagcctggcatggtggtgcgggcctgcagtcccagttacttgggaggctgaggcatgagaatcacttgaacccgggagacggaggttgcagtgagccgagatcacaccactgcactctatcctgggccacagatcaagactctgtcaaaaagagaaaaaaaggcaaaagtagaataattaatactgtgtggtatagacacagagtcaaatttattgaccagaacagaatagacatcaggaagagagtacacctgtgaaaaactaaatgcacaaaaatacagaagtctgacattgccagacattggtaaagatttgaatgaatggatattaatacacttctgatgggaacacacatcaaattaatcgctttggaaaacagtttgacaccttcatatcaagttaaatagtttacatgcaaagaccaagcaattccactcttaggtaccctagaaactagaagaattgttgggcatgtataccaagagaaatgaataaaacatgtatcacagtatccttcgtatcagtaaaaattgaaaagaaaaaaagaaaaaccttccaatttccaacaacaagagagtgactaaatgaattatattatagaataattatgcagtggaatattacacaacctaaaaatgaatgaactaaagctactcacaagcatagaaagacattttagaaacata

SEQ ID NO: 1884972 - DNA, 4001 bp, Homo sapiens
ctggaatcaacgacctctccaaagagcctggagttccttttagagagaatggtatgtagacacaatcaacaaaatcttcctcccatgcccaacacctcagttctcagtaacaccaacataattactcatttgctttatcccccaatacacacacaaccatctcaaaataacagcaacagtctagtaataacatgtttattgaaaatactaacactgttacgttcttttcattctcagggtatattccactagagatgtattgccctatgttttgaagtcacctagaagagttcttagtgtgggtatatgactacatcaagagttttttacttttgatgattagggactgcttcttaaaacttattttaaaactgattttagtatcttaaaatactcacacagttccgaagtcacatttacataaacaaggcatatttgaagtccaggtttcatccttgaccctcctactctaggctcttccttctcctaaaggtaagcattttcattctttatccttttcatcttattggtatgaacacatgtgtgtccccttccaggcagtcttcagtaatgtcacatgttcccatgacacctgtattgtactcttatcagtcattacatggaatttatcttccataagtattatttggggtcctccatgagactgtgagcatgaccactggagggttgcttcccattatatccatattatcaagcacaaggtcaggcacagagtaagactcaaacatgttttggaatgtatgactggtatgaactacaaaccagtaagctgatgttttcattttgagtctataaatctaatgtttatggtggctttgtgtatggctcaaggctcaaattgtaaaacttaacattatgtgaccaaagcaagttatacccagaacctcaatttcctcaccttcaaaacggggcagagtttctgacttactggtctactctcaggattttaattagctcatgcaaaaacagccctttatataaggttaagtgctggataaatgttggctactataataaaataagcctctaagatacttggtcagcacaggcactacccaagagtatgcactgcagataaactgacaaaattgtgtatctaaaactggccagatgaaagagaaacttttaaggggcccttctgcatgcccgacactgtgctaggcactcacactatcccgacctgagaaaaagatctgggacccagaggaacttaccaagcctccagcatcttgtgtagccctactcgtgggaccatctggatacccgcctcctcttgtctttatagggagcagaacacacctgatatatgtcaggaaacaaagtccaggaagtatattttcacctgaggcaatccttgaaaattgtaggctccagcctccaaagtgagtcttcctctcagtacctctcttctagacacattgagacctttcttccaagcattaagtttaaccacttaatgaatgaagtcctgaaactgcttaaccatgctccctataatatctgaataatcttccttttccgcaacctcaggcataatctcatcttgtttctattacaatttcaaattctggaaaaaggaagttgtggtctggagttgtaaggtccaaatgatctggttgtgcacaagcctgcttatgtcccaatctccagtctagggtctgatgctccttgctgcagtaatacgctttgtggcatctggagcaagttttggggcctaaacagccacaaacactgcagagatgagcaccagacttaagttggagatacaccgattctcctgtttctggggaaggattctcagaaggtggctcatatgagtaaaaatcatttttcctgggtagctgattcctagaaactcgcagggcggcacagcacggcggctcgtggcagcagaagaggaagatgccgcggtggaaggcgtcttcgcggccgggcagcgacgcgtacacctgccgccggaagaagagcgacggtcgcacagctctcaggccgggggccggagccccggcagcccggccgcgcccatccacgcccagccacgcccagccacgttggccgcccgcccagcctgctgggaaactgctcgctgcgcattcgcccgccggcgccgacttggcgatggccagctacacaggtccggcgggggcggcagccatgtggggcgcgggctggcgtggggagcagcccacagctgggcctcccattgaactttgatgtgtttttctttggaaaactttcaactctcttgtatttttctctccaagatactccaagtatattttcacctgtgaggcaatatctgaaaattgtaggctacagcctccaaagtgagtcttcctctcagtacctctcttctggacacactgagccctttctttaaactctgatttttactttcttgaccgacttgttataacatgacacaataaaaccatcttgttacagaaattgggaaaaggatgttttgggggaacaggtttgatacgtttccaatgcaccttcttttttttttttttttttttttttttgagacggagtctcgctctgtcgcccaggctggagtgcagtggcgggatctcggctcactgcaagctccgcctcccgggttcacgccattctcctgcctcagcctcccaagtagctgggactacaggcgcccgccactacacccggctaattttttgtatttttagtagagacggggtttcaccgttttagccaggatggtctcgatctcctgacctcgtgatccgcccgcctcggcctcccaaagtgctgggattacaggcgtgagccaccgcgcccggctccaatgcaccttcttattggcaatattgataatcaaaatgcaaggagaatcttttaattaagttgaattttatttttcactcggattcttaaatatttctgctgaaggaattgctaagaggccacttagtacagtagactattataagtgaacttgatgattttggagtaggctttgaacttaatgacaatagcattccattattttttagttaattcgttcaatgagagcaaaggacatttagaaacttcatattttcatgttgagttttatggtgaacagctaagacagccacagcttgtcaatcaagatcagacactagaacgcccttatctgttttggagttaagagtttttattccccttttaatagactgaaggataaatttaaggcacttctttttttacttaaaagaaatggagcaatttagttaaaacaatcaaaataaacttttgaatggttaatcttcatctgagatcagatagttcccttcaacttccaaattcacaaaaggctctgtgagtctgtctttgcatttgcaagccatgggaaactttgaatttcacttttaccatttaaaggagacctgtgtgcagttcttatctaactggatcttattatttggtttatatttctattaagtgacttccatttcatgtacatgtgtacatatatacatacatatgtatatgtttaattgcctttcagaattaggataaactatgttactttacaaattattatgtgtacctgaagtgttgctttttggaggagtctcaaggatttttctcaggctatcatattgtttgtgtggctttgctcattaaatagttatttgttttggaggaggtgacattggtgtaaactaagccctgtgacaaccattagaaataaggttcctacttggggttatttattttttttactgtggcaaaatttgcctgacattaaattgaccatgttaaagagtacaatcagtggtactgtgtgcattcacaatgctgtacaataaacacctctatctagtttcacaacattttaataagccccaaaggagacctccatacccattagaagtcattccccatttccctcatccccaggctctggcaaccactaatccgctttctgcctctgtggatttacctactttggatattccatgtaaatg

SEQ ID NO: 1884973 - DNA, 4001 bp, Homo sapiens
ctcctgagtagctggaaatacaggcgcccgccaccacgcccggctaattttttttgtatttttagtagagacaggatttcagtttgtcagccaggatggtctcaatctcctgaccccgtgatccgcccgcctcggcctcccaaagtgctgggattacaggcgtgagccaccgcacccggcctgacaggcctttttcatattgaataatgttgtcaaggttactctatgttgtagcatgtatcagtatgatttcatccttccctcattttggctgaataaatattccatgattaccacactttatttatccattcatcagttgatgcgacagactatccttttaagaatgaaatgtttattcaaaaggaagcataaaaaacaccatcacatcagtatggactggtgtatggaacacaagacaaatatacttttatgtggaaaaggggaaacaagaaccagaatgagttattctccattcctcaccccttttacctcctctctcaccttcccctcaaagaggaaatctgggaggggatgcaaggactctccaaaagggaatggtctcactgcttagtgggcccttcccagtcccatcagcctggtgtggtttatgtaaacctcaagactagttagacacaactttctagaagcctgccctgatctctcaggcagtttttagttctatcttcatattcccagagaacactgtacttagattcatttgcatttttctcattgtattgcaatggtgagcagaggaaagagcatcagatagtcctaaatagttcgaccactgaccacctgctgaccatggaggagtcacctacttacaggctgcagggttgttgtgaaaattaaataaggtaaaataggggaaattattgtgatatagtagagtggaagggacttaaaaatcatttagtcaacttgacacttcttctgagacttttttttttttttttttttttgagacggagtctcgctctgtcgcccaggctggagtgcagtggcgcgatctcggctcactgcaagctctgcctcccgggttcacaccattctcctgtctcagcctcccgagtagctgggactacaggcgcccaccatcatgcccggctaattttttgtattttttagtagagacggggtttcaccatgttagccaggatggtcttgatctcctgacatcgtgatctactcgcctcagcctcccaaagtgctgggattacaggcgtgagccaccccgcctggccagagactacattttatacatataaaatctcaaggcatttacttgaaatttcttgacgcagacaatgtaatataaaatgagttgcaaagttcggagaacgctagagccagctaactccttgatggcattgcattgctaggtctactttcttgccctagcaaaaatggcagtttcctttctggattactccctcctcaccttctgttagtttcagagtgacttgttgataactgccaaggtccccagaaagcgcctagccaaaaaggttcttcacttctctttaaagatgtgcactccctaatacatgaaacagcattttctatttcttaatttttctctcatttccagctgctgctttcaccgtcttctggtatttttttgtttggtcgtccactgctaaactcccagctcttcagaattcaaaatgagctttgcatccaagctgttgtgggttcgaatcctgggtctatctagcgtttctttctccatctgtaaaacagggttaaaaatacctattttgtaaagttgttctcacatgtgggtattgaagagcttaatagtgtgggtggtgttttaaaggtgacgcatccttacaacaggaaagggcttaccctcttccgcagttctggcttcgaggaggtcaagccctttaaggtggcatcgccctaagtcgcaggagcgggtctctccgcccctccctcgggccggggggcggggcctcctaatccggaactgaaggtcttgcgtagccggcaccgcccatctgcgtcccggaaggagcgagcttgcggagcgtgaaccagtgagtgaaagcggcgccgcccgccggccgcaggtgcggcaaagccagtgtcatctgccggttctcttagggctcccggaaagaaggagggctagccgcgtgcgttcgcgccgcgcctccttgcgtttctgttccccaaatagggcctctccttctcccgccgcccaggcccctgcgtgggctggacgcgtcagccccacacattagcctcgctgcggcgcccagactctgctttgcctccccgtcccggtccctggcccctgccctgtcgcccgccgccggagcggtgaccgcccggcccgccgttcttctgctgccaccgctgtcggcaccatgggcagtgagcagagctccgaggccgagagccgacccaacgatctgaactcctcaggtcggtgtcctaacctcccaccctcctccagcccgccctgtccccttgcagagcgggctgcctcccagactagggtcagggactgcggacgggaacgcacagaaaaagccttcaccgtgctagtaggaaaaaaaaaaagtcaccatctgtcctggcctcgattcccctgatggaagtgcgtgtgactgcaagctaagccagcgtgggcgccagtgcccttatttattttcaaaacagccgtttctcccagctacagcctcctgtttaaaagacgagctaattaatttttggctctagtgctcatggctgatgtagtgagatttggctcacacagtggatggattataggacctctaagaacagtctgtttcttaaaaacgggtgttagaggttccttttctgaagggatatgtgataggtgtccacttgctttgaaccctttagtgcaaaggtctccagaaacagctttttcttctcagaaggtgtcttggtccgttttctaatcttgtagaggttggccagacagcaggcactggtgttttccattgttgttctctgtccatgatttttagacttctctaagcgtttgagacaagaatgggaggattattgtgtttgcaatacagtgagtgttcaataaatagataaagcagctgatgtttaattgaggaccatttgctgctttttttgttacccacacgctaggacagctgggagtgctttggttaagctccggggttgctaacgcaaattggttaaatctggggcctaaaaagagtcgccgattttagaagttctctgttcttgataggagctgtaattcagaaataggcaagctaatagatctaagggtgtttcactttaaggtgtgactttcaagactagttcagacctacattctggggactggattggggcagctttgaatggtgagcagcatctactagctttgctacgtttttctatttccttggaagggccagagtgtcatatctgttataagaaatataataattgccacctttgacattcttgcctctatggcagggcagaaacatattttagggggaagcggtgtggcatctttttaatttgttttcttgcccatgaaccaacagcattcgagcatttccgatgttagaatttgcctattcccctgtgcccggtactttacatacatttacatataatttttgcagtaatcccattttacagataaagtagtagaggttagctagagtgttttgaagtcccctttcctctggtatctggggaaggaggaatcacaatttatagcaggaaagatttctggcatggcttttgtaaaatgttaggtaaattaccaaaacaggtaaataaatatttcttgaaaagaaataaaagcagcagagatttttctagaagagtgaatgccaagcctccggagacgagcttctaggaggcagaacagttctatggcatccctggattaacctttgagatatgactataatgagcctgggaatattaccttctagagcataaaacactttaaagattcattcttgtcccagtctgga

SEQ ID NO: 1884974 - DNA, 4001 bp, Homo sapiens
gcccacatctccaacctcatcctttttatacttttttttttctttttttgaaatagagacggggtttcgccatgttggccaggccggtctcgaactcctgacttcaagtgatccgcccgccttggcctcccgaagtgctgggattacaggcgtgacccaccgcgcccagcctccaacctcaccctttatcagtctcctcctactcgatctactccagctacaatgaccttcttgctgattcttgaacatatttagcttatttccaccttaaaatttctacccatctgcccagaaatctttccttggatttccaatagccagccctttctcattcctcaggggtctcagcttaaatgttacctcctgagattccttccttaatcatctaatacgaagaagtccccacatccagttattctcttacctcagcatcctgtttatgttcttcttagcatcagactcgggctttttcctgtttattacctacttcgttttcctgaaagatccatgtgccggtaccatgtgttgttcctactgtttctccaatgtctagtagatttggcacatactgatgtgcaattaatacgtgaatgaagaaccattgacagacgattagtcaaaagctcttgcaaagccctttgataggttatcggtggagagtagggagcacaaacctggggtcccattctagcttgaccacttctcggctgtgcacaaactagtctagctctcctgagcctcagttacctattttgcaaattagggatgggaacatccatacctcacgacgccaaacggctaccttgtaaagacgaaaggaggaaatgcaggaaataactccacgtaaggttaatgctccgtaaacagagctgctactgctattatatattctatacaatcctgcgcccttaacggcaggaccctttcagtgcttcagtcctgtcttctctctcctgggttgacctccacagatcctctcagaagagcgttttccaggcgtgaatctccgcagagtggagataaaggctgaggccccaacgcacgcgcactcacgcgagtccgggcctatgacgtcattagcgcagcgccatcgccgcggaaggcccaggggcctgtcctgtatgcggcgtgtcttagggaggcccaggcggacgcctgcaagtcgggtgcgcggttcgggggcggctcggaaaccccagcggaaggcagcaaggggcgcgtggggccgtggagtcacgaagctgggcggcaggaggggcggcctggagctcccgcggggcacagcgcgtgcgtgagggcggccggcggggctgcccggcgcgggtgtcccggcgatgtgtggcgctgaggcggcggcgggagcagcggcgccgagctctgcttcggcttcggcttcggcttcgcggcggtgcaggcggcggaggcggaggcgcaggctcttctttaggacctggcgagcccaggtctaagcggcggccccgcgaggcccttgcacggcgccccgggtcgaggccctccccgcctcgccctaccccaggagcctgcctccccagctggggatgaggctaggaggcggccgcgtggggcccagcacaaagacctgtccccaggggccgccgcctccgccgctgctgctgccgccagcctagagccgcccgccgaagcagagccggcgccggggtcctcatccccaccggtcccgaggggcggctgctgcccgtcgccacgaggcccaggggcccgagtgccgagccctttgctccctcggccgcgcggggacagggctgctgagcagcctccgcctctcccggctgtgggggccccactgagtatgtcggaggagagcgacatggacaaagccatcaaggtaagggggaggtgccccctcttcccccgcgttgtcctgtggcgttcttctcggctctagcctcaaaaagcagggagattttgcagtgagaggttccatcgactaccgggtttcggcctcccccggattccgtggatcgcgctttacagccctggggccaagggttatgggtgtgggtgtaggtgtgtgtccgactcccgccagcttccctggtgagtgtgatttgtgctcagctggaacagaggtgagtggcctggagacactattaagtgtcaatgaatgggacgaagagagccctactactactactacacgtttcgatcactccccaaggccgccagcatttgcttccggatggtctacagaacttggagagttggaatttatccatccctcccgatttgtttgaaatcagccttctggaaatctgcagttggaaaaaggtggttcgccgtacaaaacctgtcctttggggaataggttgtcctcacttttccgtgtattctcccctttttctttttcctcttctttctcctaggaagcattgagtttacttaggaaaagttaacagttcctgtgacttaactgcacttaaaccaaaagaaaagcaaatgtgtgttcgaaaattacacaaataaaataagttttctaaaacctgtttttaactttttttttttttaaaggcacattttgcccactcagggccagttatctgtcttgacagctgtagctaagaaattagtcttatgaaaattaaacattgacgcttaaagtttgatgtattatttacttatttgtagtgttaagtcagcccagtgcattgaataatttcattttatcttgaaggacaggcatctattggcagcttggggttattttccccttcaagacagttactagtaatgattaagaatttacatttctaccaattctttaggtggtgtatatagtttctcaaaatcatcaagtcattccaaagaaacttaaccctttaaaggaggcatcaacatataacatatacattaaggaagaccaggttttttgtctgtttgtttgtttttgagacggagtctcactctgtcgcccaggctggagtgcagtggcccgatcttggctcactgcaagttccgcctcctgggttcacgccattctcctgcctcagcctcccgagtagctgggattacaggcgcccacccaccacgccctgctaattttttcttttgtttgtatttttagtagagacggggtttcaccgtaatagccaggatgggctcgatctcctgacctcgtgatctgcccgccttggcctcccaaaatggtgggattacaggcgtgagccaccgtgcctggcccaaggaagacgaggttttaaatcataaagattctaaaagactgccttgacatatccttcttttgttttgggttttgtttttttttttgagtcggagtctggctttgtcatccaggctggagtgcagtgggatgctcttggctcactgcaacctccacctcccaggttcaagtgattctcctgcctcagcctccccagtagctgggactacaggcacgtgccaccacacccagctaatttttttgtatttttagtagaggtggggtttcactgtgttagccaggatggtctccatctcctgacgtcatgatttgcccgcctcggcctcccaaagttctgagataacaggtgtgagccaccgcgcccagccttggtttgggttttattggcacagaggcatgatatgccgcctgaagttatttaattgggttgtgaatcaaagcgtatgtggccagtttttaaacattgtctcctgtgtgccagatggtgtcctagacacaaatggtacaagccagactcctagatgtccctactgtcatgtagcttatattctagagggtggggttactgctaggtggttttaattaagtgtggaaagggtgaggagtactgtgttaaatagggtagtccgaggaggtgacactgtagagttctgatggaaatgcgagagcaagccaccactgtctcagggaagagtataacaggcagtgggaatagcaaggacagaccttgaggtagaagcaggtgtagtgtgatgtaggaagagcaaggtggctggaatgc

SEQ ID NO: 1884975 - DNA, 4001 bp, Homo sapiens; identical to SEQ ID NO: 916480

SEQ ID NO: 1884976 - DNA, 4001 bp, Homo sapiens; identical to SEQ ID NO: 916490

SEQ ID NO: 1884977 - DNA, 4001 bp, Homo sapiens; identical to SEQ ID NO: 916495

SEQ ID NO: 1884978 - DNA, 4001 bp, Homo sapiens; identical to SEQ ID NO: 916497

SEQ ID NO: 1884979 - DNA, 4001 bp, Homo sapiens
agctcactgcagcctcaaactcctgggcaatccgccggcctcagcctccctactagctggaactacaggtgcatgtcaccacacctggctaactttctttctttctctttttttaagagatgggatcttgctatcttgcccagtctggtttcaaactcctgggctcaagtgatcctcctgccttggcctcctgggtcactgggaccacaggcatgagccaccgcatccctgattcccacattctaaatggatcatgatgccacacaagctaccttggtgcttgtgccttcatcaccaccagactcctggccatgacacagtctagagccatcagccctcagagagagagcctgaggggaatcaaaatggccaatgggattctcgtcgttaacaccagttaccaagtcagccccctttacaaagacaacctccagggcccgctttcatactcacagcatcagcttctgctttttccctagaaactctcccacctgcgacaactgattctaaggcggtgacccagcgctgtttgtcagggaagctgggagctagcaagtagagggttctcccgggccagcaggtggtgtgcgggtgagattccatcttcagtatgtatgggacatctaggagatttcagagagcacaggattgggtgtggatttcccccgttcccactgggagggacgggcctgagagatcaaagatgcccaccaaaccacgcaaatcccagttaccgccaaggcggggagcggaggaagatgggcctcctttgcagagccaatcttccctgtaccaccccttctgtccctgctgattggccaagcccggcccacctccagggcggggctcctccggctcctcctcacctgctttggctgtatttgcgagttcggaagcaccaacggcaccatgaatagatacatccccgtcgggaaggcacagctcaaattcttccaccggcctctgtccagcttggtgcaaagaggaagggcagaaagaaaaacaaaagaacaggaacaagaacaaggggagaagagagagcgagagagacagcaagggagagagagacagggtacgtgtgtaaagagaggcgcacgagaacaaggaagggacagaggtgtgcagagaaggcagagagggaagataaaaaaaaataaagtgtgtcagatgagtagcacagtcaaatttctgatgacgatgcggatttatgggttagttgactgaggcagaagttctcggaaggtgtattagcaggtggaatcttcagggcagcgccctgcgggttcttcaggggggagacctatagatgtgagtatcgcaccaataacctttagagaagtcatttggtttgtaagtttcaaaaatggaaaagcgtagaaggcttgcaaggcagtccaaaaaacaaagccttcgcgccagcactggggagacctgggttagccacgtgcaatgaccttccccctgaattattaatttaccttctctggcttcattgtcataaatgaggacttttgatccctccaggacaatgtacttcctgtcccagccttgctgtcctcgtttgttattcctggggaaagaaagatggaaaagaaaaatgtctgaactcagaagaaacatccggctggaggataggatgagggggtggcagagttcctagaaaagacacttccctagaaaacatcagggacagagtggcttgtgccagcacctgctccagcccaagccaccctgacatggtacctgggcaccttcatccacccttccaggtgcaagctgctgctgggctccttggtctggagacctggggagttcattttgtcacggcagaaggcctcggtgaagtgtgtggcatattcagcaggcaagccgcaggtggctggcaagcacgtggagcacttggggtgacacatcacctgacattctagggaagaacagtgagcaacctgagggcatgctcagctgaccctggacccttcccttcctctgccagccaacgcctgggcttctctaccccagccgggcccagagagtctggccctggcttgcaggtagtctcctgagcttcccctggtgccaggcccctgcagaaagggaaaacaaaagtgccaagtgctcttgacccagttttccaggcttcaatccagaccgcccacaaacaggtgtgtaaagaacacgtttgcatgtttcagttggagtcagcggaaaggtagggagagaccagcctgacaaaaaggggctggaaattagcaaagcctaaggcactctgagcagcaggctggagtcatgagctgcagacatatataaactcacagcttcaacaggggaaaaatagcatcctcctactgaagtaagaagctcgaaaatgaatgcactatatgatgagttagaaaaaaatcacctccacctgatagactttttaagctggagatgcacaggtgcccagcacagatgcacaactactgatcttaccgagacatttggatgcctggcgtccaaagtgcacggtatccagacacacagcacactttgtggctcgcatgttcagtcctacgttgaatcggtgaggaatattgtggtgcatgcgttccttaagacgccgactaaattctggaggaaaatgttttaaaaaatcattagagtactgcaaatgatcccatcaggaaagtgaaaagacaacccacagaaagggaaaaaatacttgcaaatcaaatctctgataagggactcatatctagaatacataaagaactcttacaactcaataataaaaggacaacccaattttaaaatgggccaagaatttaaatagacacctccccgaagaggataaatggccaacgagcaaatgaaaagatgctcaacattatcagtcgttagagagatgtgaatcaaaaccccaagcagacaccacttcacaaccactaggatgtctacagtctaaaaaaaggaagataagtgttgatgaggatgtggagaaactggaaccctcacacattcctggtgagaatgtaaaaatggtgcagccactttggaactcagtctggtagttctgtaaaaggttaaacatagttaccccagaacccagcaattccgctcctggctatatatccaaggggactgaaaacatatgtacccacaaaaatctgtacataaatgttcacagcagcataatttatgacaactacaaagtgaaaacaacacaaatgtccaccaatggtgatatggtttggctgtgtccccacccaaatctcatcttgaattgcagctgccataattcccatgtgttgggagggacttggtgggagataactgaatcatgcgggtggtttcccccatactgttcttgtggtagtgaataagatctgatagttttataaggggaaacccctctcgcttggttcttattctcttttgtcaccgccacatgagacatgccttttgccttccaccatgattgtgaggcctccccagccacatggaactgtgagtctattacacctctttttctttataaattacccagtcttgggcatgtctttatcagcagtgtgaaaatggactaatgaaaatggattaatggataatcagatgtgccatctacacaatggagtattattcagccatgaaaggaatgaagttctgatacatgctacaacatgggtgaaccttgaaaacattacattccatgaaagaagccagacacaaaggccgcatgcagtatgattcatctttatgaaatgtctaagagagcagatcgacagagacagaaagtagattggtggttgctaagaagaacattagtggaaggagaatggcgggggactgataatgtgtatggagtattttttgggtgggggggtgtcaaaattgttcaaaaattagaatgtgatgagggttacacaaccctgtaaacttactgaaaaagactgaattgtacatttttaatgagcgaactgtacggtatgcaaattacatctgaatgaaactgttaaaaccat

SEQ ID NO: 1884980 - DNA, 4001 bp, Homo sapiens
acttgatgcctcactcctctcttcctctcacactgcatatctcatctgtcagcaaatctgctggctctctacctgccagatagaggcagaccccaaccaagcagatttctgtctcattcactgctgtatccccactgtctaggggatgaatgaatgaataaggcagtggagaaaggcgttcctggcacgtctggggtgtggaagctcctccccagggctgggcataccttgaagccgatcttgaggtcctcacagtcctggctgcagccactgagcttgcggctgagacactcattgatgtggcagccacgctcgtccgagctgtcgccacagtcatcctggccgttgcagagcagtgcctcagccacacagcgcccactgctgcacaggaactgtgacgaggcattgcacttgtgctctgcggaggggcggaggcggcaggtcagcggggtctcaggcagtctggggagggggcagaggggagccaggtctggggcccaccttggctggtgcagtgtgggttcttgggagcctcgtcactctggtcgtggcagtcattctcgccatcacactcccactggcgggagctcagacagcgcccattggcacagcggaactcactggggccgcaggtcgggtactctgggggaggaatggacctgtgaggctgatgccctggcccggcagagggcagggcctcctcccaccaccgccgaaggctcaccacactcgggggactcatcagagccatctgcacagtcacggtcgtggtcacacacgaagtgcttggggatgcactggcggttctggcacatgaactcacggtcgtcacaagtgctgttgtacactgtggacagaggtggacacagcccttcagccctgcctggccagcggccgaccgtccctcactctaacctcctgtggttctcctggtagagtgggcagggcactggatgaggagtctggacacctgggctacagctatggctccgcccccagtggaccccgctgaggcatttcctctcctgcaccccggcttccccatctgcaaagtgagactgtggccatttgctgtccacccgctccacgtggccccgccactcacagcaaccagctgcgatgctctcgtctgcaccatcagcacagtctttgtcaccgtcacagagccagcgctcggggacgcacacgtgggtgccagggcaggagaaggaggaggggccgcacgtcttgccttctgtagggggagagagggccactgagagacttaggagcgggtagatcaggtctagcagtggaggtgatggttcgccgtcgtctgcaggggtgtctgtgtgtggggtggagttgggtggggtctgtccctccctggggcacctcccccggcccaatcccagcttccttaccacagtgagcagcctcgtctgagccatccccacagtcatcgctgccgtcacacagccactgcttggagatgcagcgatggttctggcactcaaactgggcctctgagcagaacttgtctggggcagtcagaagccacagttagatggggaagggtgggggtcacccacctggggaggctgatgccatgggaaggacaggagagatgcccacagcacccctctgtgggggggctcagcagcagctagaggcagagtctctgagtctgacctcaagagttggggtgtggggcagggggttgaaggctctggatgcccttttccaagggggcatttgctgggggggactaagaagtggggcccagcaggctcttggagcactgagtgggtgcagtggtcactcactgcagtgggtctcgtcctcgccatgttcacagtcatcctctttgtcacacgtccagctcatggggatgcagcgcccactagggcaggcgaagtaattcagagggcatctggggcgtttcacacctggggggcgaggcaggtgtgagggccctgctcaccgcaggccaccacccaccacacacctgcccccgcccacctgggcagtcgcgctcatcactgtagtccccacagtcattggcgccatcacacacccagctgggtgcgtagcagagtgaggtccgctcgcagggctggaagagcacgcccttcacgcccaggcggaagtagctgctgcagtcggtggcacctggtgggggcaggggtgagggtgatacctggttccccctggatcacccccgactggggcagctgccagccctatggagccttcatgtgtttccaaaagttgaacggtgcccttctggtggggcactgtctgcaccatctgctcactgccccctctcggaaccccacgagagcccaggagcaggagcgggatggggacagggcctcagggagatggaggctgtcagcggggatgagggaaggcagagaggaatgtgggcaggtgcaggagggcctgaaggcgggagatgcagtgagcgatggggaggagcccaggaggtgccagcaaagggcgtcactcactgcagttcatctcatctgaggcgtcctcacaatccacaaactggttgcagcggctggagttcccgatgcaggtcccgtcccggcagcggaactcgcccacaccacaggctgtctctagaacagtgcccgccccgtatcgtcaggccagagttttctctgtgggggccagaaggacgcaggacagagctcctggcccacagcacctgccctggcctgtcacagagtgccttgaaccagacaccacggggcccagggacaaagcttggccagggaggggtggggcaggaactgaggtacagatgggttatgccagtgcgcctcactcactgttgcaagggatctcgtcagagccatccccacagtcgtcggccccgttgcaccacagcatgttggacacacagcgcccattgctgcactgccggaaagtcttcttgcagcggcgggagtctgcaaatggaggagtaggctgcgtgtcagccacaggcacagggaaagggctgcctccctgagacgtcatgcacgtgtccagctggccacccccaaacccaaaggcccagtccaggctaacagtggttctgcccttcatgagctcccaaaactcatggtcaggaagctgggtcctgatcctgctccatcctgcaggggcctgggggaggaggacctgggctctgggcctggaagaggcaggggctgcagggggctccttactgcagtaggatggcttctcatcggacttgtccttgcagtgggggacgccgtcgcaggtcaggctgaagttgatgcactcgccattggcacactcaaactcatcttgtgctcggcaagaggaattcaccgctggggagggaggtggagggagctttctgagccagcgctgtgggccccagtgcccacgcctcctcccccggggagctgaggtcatcatcagcgtcttcttggcaaaaggctttggggggctgggctggagcatgtaggggagatggtcaccatccctggtgtgtgcttgggttccccgccagcccctcccccccgcctctctcacctcggcaggtgaggtcatcctggaggattcggccccctcggcatgagcagttgacatggccctggtgagtgagcagacacaggtcctggcagccaccgttgttgattcggcatggagagagttcacctgagcagggacagggtgggcgcagggctggagagtgttctctgctgtgcatgcacccagagtgcacccacccattcactgacttcatggagctcccaagcctctgctcagtcacggcaggcacagcggcttgcagccagtggggagggcatggggatggctgctgtgggagggccaggtgcatggggttttcggcaggtgtgccgttgaggatgtgtgtgcttttaggcagggcaccgtgggctttgaggagtgtttctgagagattcgagtctgagggccctgagatcacgggtgcagtagtgagccccagggcgcatgggagacacctgggaaagctg

SEQ ID NO: 1884981 - DNA, 4001 bp, Homo sapiens
ttgtatttttagtagagacagggtttcgccatgttggccaggatggtctcgatctgactttgtgatccgcccacctcggcctcccaaagtgctgggattacaggcgtgagctaccacgactggctaccacttgactctttaattagtcaattccaatacctgttctagagaggtacttatacataatgcatttgaggcaatgaattgtattacaaggtagagtccattgaagcccaaacgcctatgtggtatcctattccatggagatacctattcgatgcttccttccccctaagcccttgcttcactttccaaagaaaataactgtcaaaaaggagacagcccgatgcccatcttacatcacaagctgcatggcagacaagaagtgattatcttgaggtcttttgacttctgatcatcctaccaaaagctcccccactaccattactcaattgaacaggcttgaagattctcgtcttttgtccagtaattgaagttccttcttggggattccatgggaaggaaagggttagggtccacaagtatgcagtgctatgattcctaactgcagatacatatgtaacaggaaaaattttaatacctcagtttctctaatctaggttattcatattttctcttcttaggtcagctttagttacttgtgtctttcaaggaatttgtccatttcatctaagttgttgatttactgacataaaatacgttctctatccttttaatgtctgtttttgtttcagacattggtaatttgtgtcttctctactgggactcaaaacgtagtacctaaaatatgacacctcggaatactattttgagctgaaggaattggagaaaaatcatggaagcaggattccttcatcattctcacctgaagcagtttataaacctgggataagttttctgatctttcccttaagcaggtctctcgtgtgagaggtgccctctctacacctggaagagaacattcttatctctaaagacaaagtgttggctgggtgcagtggctcacgcctgtaatcccaggactttgggaggctgaggcgggtggatcacctgaggtcaggagtttgagaccagcctggctaacatggtgaaactgtctctactaaaaatacaaaaattagccagccgtggtggagggcgcctgtagtcccagctactcaggaggctgaggcacgagaatggcatgaacctgggaggaggaggttgcagtgagctgagatcgcgccactgcactcaagcctgggtgacagagcaagactccgtctcaaaaaaaaaaaaaaaaaagtcacaaagaaatctaaacttaggtcttgctaagtttcccccagttattatgagatcataccctttatgtcctatcatatttctccacaactgtctactcttcatcaaacctactacaaaacacactaacacttatctgtttctttgggtcttcatttcaatatgaagactcctgtaccatataaaacatattaaataaatttgatggttttgtctttctccctctttttttcttttcttttcttttctttctttctctttttttttttttttttgtggagacaggctcttgctctgtcatccaggctggagtgcagtgacgcgatcttggctcactgcaacctccaccttccaggctcaggtgatcctcccacttcagcctcccgagtagctgagactacaggcacacactaccacatgcagctaatttttttgttgtttttttagagatgaggttttttttgtttttgtttgttttagaacagctcagcaaaataaaattcctgtttattgttggacaacattgtttcacacatacatcaaacaggccaaaaaaaaataaacagcaacttcacagacaaggaaaaaaaagaaaccttttatctttggcctttttaaccatctcatacaaaccaactacttatagtacagctaagtacatacacaaaaaagttactggaatgctcggaataagatggtttttctgttgtcatttttgcattttttacaagtttttttttctcctttgagattataatgaacatggccacaccacaagtaaagtgagaagtaggacagagaacgctccgaaggctggtttggtcatccgagatcattaaaaatggccgaccctaacaatatgtacaaaaatataaaatgtaaataaaaaatacaagtttcctttttaaagtacttttaagaaaaaaaaagcagggccttggaagttttggttctttttccctcccctgttgcaaattctcatggtttgggttgggtggtggagagcgcgtgtcatctgcgggtggcactgcccacggtgggcgggcgggcccctctactcgaaggtgaccacgtttagattctgagacgggaagtggagggcgaataggtcacggcggccttttttttttagtttaacttttccttttttgctgtctggtcatcctcgtcggtcttctgcttctgggtatcgacatcgtcatcctcatcatcttcagctgcccgcttgcccgtagctgactcagctccctcatcttcatctccgtcctcttcctcaccatcaccttcttcctcctcctcttcctccccaccttcttcctcttcttcatctacctcgttgtcagcctccggctccccattttcctcattagcattcctgttagcaggggcgtctcttccattttccgcctcttccacaacttccttcttctcctttaagtcctcggtggtgatttcggagctggtgtctacggctgcgtctgacatggtggggcacgccggtgacgcgatgcaggggataaaaaagaaagcgagagttcagggactctggcgataaagctgccggagtccgcggcggcggaggaggcgcgcggcggaggcggctgcggcgagcaaggaggctgacgaggcacaatgcaaagatggcttttcagagcagccagtggggagatgaggttttaccatgttgcctaggctggtcttgaactcctgggctcaagcagtctgcccacctcagcctcccaaagtgctgggattacaggtgtgagctactatgcctggccaaaaaatctacttatttatagctccatccccaccccatttggttgtttgtaacaaagttatatctttatccatgttccccgaaacataaactaataattattttaaacacattagaattttaaattatgggccgggcgcggtggctcacgcctgtaatcccagcactttgggaggccgaggcgggtggatcatgaggtcaggagatcgagaccatcctggctaacaaggtgaaaccccgtctctactaaaaatacaaaaaaattagccgggcgcggtggcgggcgcctgtagtcccagctactggggaggctgaggcaggagaatggcgtgaacccgggaagcggagcttgcagtgagccgagattgcgccactgcagtccgcagtccagcctgggcgacagagtgagactctgtctcaaaaaaaaaaaaaaaaaaaaaaaaaaaaagaattttaaattatgtagaaaacaatgtggaggccgggcgcggtggctcatgcctgtaattccagcactttgggaggctgaggtgggcggatcacccaaggtcaggagtttgagaccagcctgaccaacatggtgaaactccatctgtactaaaaatacaaaaattagctgggcgtgatggcgcacgcctgtaatcccagctactcaggaggctgaggcaggagaatcgcttgaacccaggaggtggaggttgcagtgagccgagatcatgccactgcactccagcctgggcgacagagtgagactctgtcaaaagaaaaaaaaaagagctgggcgcgggggctcacgtcggaaattccagcacttttgggaggccgaggcaggcagatcatgaggttaggagattgagaccatcctgggtaacacagtgaaactccgtctctactaaaaatacaaaaaattagccag

SEQ ID NO: 1884982 - DNA, 4001 bp, Homo sapiens
atcatatacatttgtgctaaatttctatggcttttcctatgggcatatacttatggtatgcttatttccttctcttcatggtttatattaattcctgctactgttagtgcttttcaagaattacattcattccattcatttgtattcagtgtatactatgtaccaggttctaagtgcaatgataccgaaagtttcaaaacaaatttcctggcctcctggagatttcatttttaggggaagactacgataaaaaagcaagagtatatttagtatactagatgttgataagtgctatagagaaaattaaagcagggcaagtgtttctatggtgagctagtaaaacaaggcaggtcaggaagtggggagggggctccctatggaaaagctcattgataaaaagtcctgtgtgagcagagactttaagtaagtcaaggagccagatttatccaaacctgggggaagatacttccaggaaaaaggaacaaaaagtaaaaggactccagagactgaagcatgctgggtgtattccaataggaagaaagaggtcagtgtggccggaacgggttaagcgaaggagagattaggaagacgtgaagtcatggggtagcaagggtttctaagtggcattaaaaacttacgctttaacttaggggggatatgggagattcctgaaagggttagagaagaggagggacacgatctgacacatgttttaaaggatccctctcgctgaaggggaacaagaagagatgatcaggagaccagttagaaagctattgagagcctgcaagagaaaggactagaatagtagagatggagagaagtgggtagattctggatgcaatttgaaggtggaatcgactagatttgtgcatggattgggtagggaagataggggaaagaatgtagtaaagaactccaaagtgtttctccctagcaaatagaagaatggatttttcatcatctgagatgaaggaaattgagggaggagcaggtttgtgaggacgagcagatactcagtcttaaacttgctgattttgatatgcctatgagacctacaagcctgtaagtggagagtgggcagttgaatacatgagtttgagttcaggaaaaaggtgtggatcaaagttgtacagttttggacacaagtacatagttgttattaaagccattgactagatgattttatcaagggatcctcgtatagagaagagagatctgcagactgagcattatcgtcaagatgattataggtggcacagagttgggtttttaatgataatttaaataaacttaaaaaagtgttagcttttccccttctctttcaatatagtggtaatttttgtattgctatattaatgatattggtaaaatactggttttctatacaagttagtaacctggagttcctcttaaaataacttgtttaagtaaaaacatgagtgcatttaaactgtcaattgaacagtaaatcatactagtgtcacacagatatttcaatattttgaacatggtttaggaagacatttgagaaacacagaggtatcagaaagaatcctgtcctgaggtcaacagccttagaccttattattaggcaagagcttttaagcttttaagcaagtcttttatttctctatgcccatttctttattcttaaaatacaataataataatttatcctaaaaagtactttctatttatttccctaagaggctcattccaagtgattttcatcagaacaatgtttttcttttttttttctttttttttttgctagaacaactcagcaaaataaaattcctgtttattgttggacaacattgtttcacacatacatcaaacaggccaaaaaataaaaataaacagcaacttcatagacaaaaaaggaaaaaaaagaaaccttttatctttggcctttttaaccatctcatacaaaccaactacttatagtacagctaagtacatacacaaaaaagttactggaatgctcggaataagatggtttttctgttgtcatttttgcattttttacaagttttttttttctcctttgagattataatgaacatggccacaccacaagtaaagtgagaagtaggacagagaacgctccgaaggctggtttggtcatccgagatcattaaaaatggccgaccctaacaatatgtacaaaaatataaaatgtaaataaaaaatacaagtttcctttttaaactacttttaagaaaaaaaaaaagcagggccttggaagttttggttctttttccctcccctgttgcaaattctcatggtttgggttgggtggtggagagcgcgtgtcatctgcgggtggcactgcccacggtgggcgggcgggcccctctactcgaaggtgaccacgtttagattctgagacgggaagtggagggtgaataggtcacggcggccttttttttttagtttaacttttccttttttgccgtctggtcatcctcgtcggtcttctgcttctgggtatcgacatcgttatcctcatcatcttcagctgcccgcttgcccgtagctgactcagctccctcatcttcatctccatcctcttcctcaccatcaccttcttcctccccaccttcttcctcttcttcatctacctcgttgtcagcctccggctccccattttcctcattagcattcccgtgagcaggggcgtctcttccattttccgcctcttccacaacttccttcttctcctttaagtcctcggtggtgatttcggagctggtgtctacggctgcgtctgacatggtggggcacgccggtgacgcgatgcaggggataaaaaagaaagcgacagttcagggactctggcgataaagctgccggagtccgcggcggcggaggcggctgcggcgagcaaggaggctgacgacgcacaatgcaaagacggcttttcagagcagccagtggggcaggacaatgtttttcatcaaatgtccttagatttggaggagggtaagagttgttttttttttctctctctctctcagagaaaagcatgcccccaaaagacattccacaactgcatactctggcaagtcacttaacatgaaatttttctctatatattacacttacctgatgcacagggcagcgtgttgaaagtttcctcctttgctattccttcaggctttatattgacaaaaaaaaaaaaaaaaagtaaagcgatactgaatgtataaaagaaaaattaaacacttgaaagcaaaggagaaaatggtggtgaaaaattggattgtagatctatccacattcttgggaattaaatgtcactgtgagatgcatgttagataatactgtatgaaataataagggctctgagactcacagagagtagacttacgtacctcaactagtaaggccttgactacagtgtccttctgcgcaagtggtgggacgtcagtcaactcattgtcacacacttcctgagaatgcatggcttccgcagtggctgtgaaattcacctttcctggggaataaagttcttaagagttaaacggtgattctatattgaacagtttcttcttttccagtttccccagtgtatccagtggttgtcttcctcttgattaatattaaaggaggagaaaaagtgtgtattggggtcagtgcagaaaacaaatcatccaagcacacgaagtggaatttgctaatagcattactactcacccagtgacttcggagtcacaacccaggacacggttttccgcccatttctacagacacagtgagattcttcattcttctctgttggaacagccaggaaagcggaagagacctccagctgcacaacgacctgtcccccacacccaaccacaagtttatgaagggatgcagaacagcatgaatactgcaaaagatgctctgtgcatcaggtaaatggactgagggacaatgtccatgagtccagaggcgctgagaagctgtgcaaatatggtcagctctatcagacactttgtagtttaggt

SEQ ID NO: 1884983 - DNA, 4001 bp, Homo sapiens; identical to SEQ ID NO: 1884981

SEQ ID NO: 1884984 - DNA, 4001 bp, Homo sapiens; identical to SEQ ID NO: 1884982

SEQ ID NO: 1884985 - DNA, 4001 bp, Homo sapiens; identical to SEQ ID NO: 1884981

SEQ ID NO: 1884986 - DNA, 4001 bp, Homo sapiens; identical to SEQ ID NO: 1884982

SEQ ID NO: 1884987 - DNA, 4001 bp, Homo sapiens; identical to SEQ ID NO: 1884981

SEQ ID NO: 1884988 - DNA, 4001 bp, Homo sapiens; identical to SEQ ID NO: 1884982

SEQ ID NO: 1884989 - DNA, 4001 bp, Homo sapiens
acctaggaacaccatctgcctgcacggatggaatgctaagtaatgcagtcaaacaatcagtatgttatgtatagttttttagctttaagaaatctagaaaaaactgtaaaatatgtaaacaaacaagtttgtgtctaaaaattatagcacaaattagctggaaaaatacatagcttaaataaggaaggttagtgatgggctcatatttgtaagtgtgattgtgattatgtagataatatgctttttcttggaaactgacgggttgctgcattcttggttataggtttaagagagagactcttttatatcgtataatgcaagtattccacgtggaaatcacaggatctgaattacagataaaatgtcagtcaaggagtccatttttggtggtttatttttcaaaagtacccaagagaataaagaaaagaatctaagaaaataaataagagaaatgtatatgttgaaattctacttacattttctcatttatttgtttgaaaaaagtatcactaattcttttacagtacagtttcaaatcagacttatttcctgtctaaacttagcctctgttaattgtgtcatatttctgcaggcatgggaaaggaaatcaatgcccctactcacctttggaagaatttcactaccaagtctccgtggttctatgggatccaataatccttggctcagtattgatttttgtatgacacctgtagaaacagtctctccttcctttctaacaaaatatagcaacaaaaatcgtgtagtttctgaatgaattaagcatacgttattaagcacaacctcatcctgtaaagcaatgtggtttgtatttttttaaagatgttaactttgcttgattttttctgagccattactactgtttaaaggtgatgtgaacatctatttgtaaaaataatttgaacataactttcttaggtttctggcagctaactcttatattgcaaatagcatttattcttctaagaaaacagacaaatggtaaagcctatctgagttcaatttccaattttaaaatatctccaaaatcaaaatctttttgaaaataaaaatatacaatcatgcttttaaaatctaaagctttgatgagatagaggaccttcaagggagtaaactgggtatatcaaatcctaggagagagaatgggttaaatttggggtgcattttatagcattaaaagagttggaaaaacaggcaagaagcatcagcctttctacttttcttgacaaacacaaatgcaaaaacaaaaacaaaacaagtcatgtttccaatattctttacacacctgatttaaacctcaaaggtatttgtttcaccctaagcagacttctttgggcatgtctgattatatttccccgcagccattctgtgctgagtggagtaactacagttggcaacctattccatcactcactccatcatcctgagaatctgcaaaataaaaatgtagcgttaaaaaaaaaacaacaagcaaacaaataaacaaaaaaactttattttacatttgcttttcctagtaaaatcctagaaaagaaaatgcagagcagcgtgtttcccacaatatatgtgacatcttggttaaaagtgacaggaccatgttacactctggcaggtttagtgttaagatctgacagatataaacctgcacgaacaacctccctgtcacagatatttaagctcatgtaaaaactttgatttgatagtcccttgattagcttttgcaacagtgagtgctactgcctttcaagttcattataaattactgaattcttcacagtactgtcaatttaagctcttgtttcactaaaaggcaggcatcttaaccactcatcaaacctgtgcacatttttgaattaaggaattagatcaatccaaactccagttctcaagggagaagttccattgtttatcaggccatgtctacactggctgagcaaagcgctctgttcagaaggagaagcgcctttggcagctagagtccacatagctgacccatggacgctcgggtggagtttcttcacctaattacacagtgcaatgaaattactgaacatttgatgaaaatgacccatgacgacaaaaaagccatgacacgattgttgttctaatctattgacatggtagtcatttataatgtaattcaaagaatctataagaatgagaagatgcttacacttacagcagatgatgcatatgggtatcgaaatacttgataactcaacatttggtattgcccaagtcattcttcctaaacaagacaatggtggcacaattttaaaatgcaatacctcttcccaactggtccaggttaagctcgcaatgctaatcttatattaatagagaaatccacagagtttaaataattaaaaagatgattgtgatcacacacacacacaaacgggttaaaaggtaatcaacattttggaggaaatatttacatttttctgacttgtttagttaagatttagtaacatccatgggtgcattcgattctggtgacagtaccgtgccctcgactcatctggaatgttttagataaaaagtggtttagcagaaatgttctactaacagccatgaaattatagactttcccttccatccattcaaacacactccaccctgtgaaataatagaaacgacactaatcacctttggaattttgccagccttccccataggtgagctgcagagttcgaccaaattgctttggaggaataaaacctgtcttacccctgtgaatgctctcagagggcttcagagtgcatgcatttcgattcatcgaagaaagcagaagcaaaggtttaactgtgtgggaatctatcagaactgttatctatgacatacacttacttctatcaacatcaccccaaaataaattaattaggtcaaactcaaacccattttccctaatcacttggactttgcaaatgggagtagctcattgtttttctttttttgccaatcccaacttaagattttcaagataagtgttcagtcactctgttgcagtttgatagttgtgcaatttatacatcaaatcccctttcgctgggtgcaaacttccaacttcagatggagtcatgacaacatctggctgattagttttttaaattaccattcaaattataaaacaaaagaaatctagttgctctaattgccttgtttagaaaagttcatccaagataagttgaattttgtatcttctttttctatatgaaagccctgagaatgtctaaatataaatataaaattgttgccaaacatattttagtgacatgaagataatgatgacggcggtggaggtggtggtgatgataatgaaatagcaaacatccttatgatacttgactatgtgccaggcactgtcctaaatgctttgtgtatagaaactcatttaatcccccaacaaccctgtaagatagatgctattagcccaatttaacagatgacgaaacaggattacagagacagcaagtaacttgccctggatcccatagttagtaaatggtagagatggatttgaatctgtgcagtctggcgccagtgtctgttttctcttagatggtgccgtgcttggcctagccacagtgttgaaactggcatatcattatgcatagagatttaaattaaaaagtggtgtttttacattggctctttccttcctatatgagtggaattaacatgcctggaactagagctttactctgtaaactactctgtccgtccgccaggctcattcttctatttctcactcattcttctaaatctcattcaggatttcctttacacctttcaaaacttacattttaagatgtttgtaaatgtgaaaactatcacataagaaaggaactgtaagaataaaaatgattaaattgggcctaggaatagagcatgtacctaaatgtaacctcatgggatcaggcctactgaggtcaaatcctgatgctacctattccaagttagacaagttgttttatttcctt

SEQ ID NO: 1884990 - DNA, 4001 bp, Homo sapiens
taactcaaaatagcaatcaattccaaaacaattcatatttatttttctacttcctcctccccaaaataaaatgttattatttattcattcatttattttaaagcaatacgatcttaaaatccagttcaggaataaaaaaagcagagtggtgtttttaggtctactttgaaagtactaacaataaattccctcctaaagcagccatgtcaaatctttaagcatggctcaatttcacatctgctttgtttaaaggaaagcatctttgtgaaggttgcattcccactgtggaactctggaagtggcaggactttagcttggtattaaacgagagaaattctaggagatgttctgaagctgaacactttttttttccttagggaaccaggaacaatgtaactgagaaggcaaaggagtaaatatcttttattctagaagaaaaacaatgctactaccactttgcaatactttttcctacttctcagtatttctcccatttacataagcatagtttttgatagtgtgcaatgcccttctatttagattacaaaccactgctttagaatggtggaagactactctctactcacatcatatctctcttgtgctactttgaactggaaaaagtgttttaattccagactgacttgtttctgtttccctacctcctccttgtcagaggacagaagtgtgccaggaatgtggaatgaaaaagctggaggtaactttcagctttgagatagtgttatattgtctgtccttctaagatactgcccagagctgactgaggtgagagagtgggttgaagagtaactgaggtcaaaggatttcaaccagtaaagaagggagggacccataaactggaatgcaggtataagatgcagcaattaccaggatatgctgccctcttcagggtttttaagggaaaactcaccagttaaaattggctgaacatttaaaagtctaacagtgccaacatggcaaggatatgagcaataggaaagctcacacacttctggttggggtgttatttaatacatctaggaaatttaaaaattgtgcataccctacattccagcaatcccactcttatgtaaatatctagaaatactcacccacatttgcacaaggagctatgttgtattgtctgtgacagcaagagattagaaacaattcaaaaatccattagctgaccaactggggtatttacctaccatggcatgttatacagcaataaaaagtaacaacgttactttaatcaacacagatacatcccaagaatgaaatatggagtcaagttgcagaaggatatatgatacaatttatataaagcttgaaaatgcacaaaatacatacagtaaagtgccatttatatggctgaaaacatacaaaaccaaaactgtgtgtgtcataaaaacatacattggaatgacaaacaaaatgagaaaacagggttgggaatcataaattcaaggtaacagttacctctgaggagagaatgagagaaaggagataaagaggacataggctattttgattatagatgttaggttttatttctttagtgtgataggtacaagagtcttcattatattattatttatacttactattgtagacctcaaatatttcattaaaaaaattgaggtactccgagtcagattcaactaaaatgtatgaagcacttgccatgtagataaagcagtgcttttccacattgggcagtgtaacagccaacactggagaagtctatgcttagaaatgtaattgaatcccattatctggcaacttctgcattgtaccctcagatcctttgttagccagtgtgatcccacctgacctgctgccggatactgtgagcttaccactatgactgatgaattcatggagaaagggtgcagtggaaggagaagaaaagcaaggtagattattaagatttagaaaaaaggaaattaagctcatttggaattctcttttctaaatgaattcaatttccttctttctacacctcacattttttctcaacttaccaatttctcaacaactgtgtgatgggaaatgtgagtagaaatttaaaaattcttatagaatcattagtcccttctacatagagaaaaggcaaaactttctattggtttcgttttgcctaaaataagtaagactcagtggtcaattagtgggatgtgtaagctgaagttagatgttcacttctgaggcacctataggggaagaaggtactaccctctatcagtggttgttaactctggcttcacagtataatcacctgagttttaaaatctactgaccccttggccattcccccagaaattctgaattagctgttctggggtggggcctcaggtgttcatattttacaaatatcacttcccaggtgattctaacgtgcatacagcattgaaaaccactcttatctctcgggctctgatatacctgatattgaacacatttcagggccattggttaccacggttggaagagttactgctggcctttcttgtcaagttcatgacatgatgggagagaccttggacagatgtttgtttccactaattgtctctctactcagacatctttaagacttcttgcccaaactctctgctggagaatattctctgtgccttggctctttcttcattcttttgtgcaaggccaggtgttttggaaacaggcagggctgtgctatgcagtgggggtggtgaagtcacccacaaggtcacaaagataattggtttactgtctaacaggttcgggctcttcaaactcttggccagcctcttgacttacatgttggttaaaagaatcataaatcaattacttttaagcctccccctaaccaaaaccccattggagagattgtcaataacataaagaaaaaccacgaatttgagagctaaaaagttagtgtaaccttccatccagtggacatttttaacaacaccttatgaaatgatcattcgggcaccaagtgaaaaattttcgctaatttccatgcaaaatacttctaggaaattcctatacatctggaccaaatgttagcgctgggactacaaggagcagcagtcactgttccagcccttgatgatggacaagtgattacagggacagacctataaccaagtaattaaataagacatgagacatctaagaagacctgtacatgttctatatacaagtcataaacattagaaagaggacgctttgtgtagatcagctttgcaggagagtttttcacagagggagtaacggtagagtaaggtttttcagctttgtcttcaatatgtgttcccagcattgcctgggaactgattagaaatgcagaacatcgggccccatcttaggcccacagaagtaaagtctttttaacaagattctcaggacatgatatgcaaaagaaaaacagaaaagcacaactttagaggttctccaggttgaagtggggggtgggagtggggggatactatgatgacagttcagggagagcactgacacccacaaaacctcccctgtgtgaatgcatagtgttattactgctggagcatagggtaaatgatgccatttacaagtgatgccatttggagaggcaggcctggaccttgtcatgaaagggcttgcagagcattctaaggaattcgaatttcatcatgaaggtagtgagaagctaattaaaaccaattaaatattttaaacaggagagaggcataatgagatttttgctttaggatgaggccattggtagtaacgtcaaggcaggagccaagggggctgggctttgagaggctgttgtcatcagtagagaagtggtgagggcctaaaccaaggcaggttgcgggaaaggaggcagaggtggagataagagagagatttaggaggaatgagcaacagggcatattactacatgatattccacatttccttaaaaatccttttagaaatacattgtatgcaattggatgaagagaaaccaaccacctggccacctaagc

SEQ ID NO: 1884991 - DNA, 4001 bp, Homo sapiens
cattttgttgaaaatgcggttgcttttttaacattattttagagttgtatcaaaattttcctgttttctgtatattgttgtgtcatttcttggctttttaatattttgactacaatgccctaatgcgaagaagtatggacatataaatattacaagagaaattagttaatagtaaagggttaaaaggtaagtaaaatgtccatgaaaataaaattttctttgaacagtttaaaaatggaatcacaaaaatctaactgcacttgaaatgaaactggaaattttatactaattaaatcctttatttaccttttcatattttatcaatggaaccttttaattgctccttctatatcactcttctccttgcttggctgatctcattacatgactttcgttacagacagtgtgagtgtactagatttgtttgctgctaatccgttattttaagtgttgtcagaaggaaataacttcttggtttgaccaagtaattttgcaaagtccttctctacctgataacacgtgaatgtatagcagtaaaggtgaaaattgcaggccttgttttgttcttcatacccccttcagttgtttatgggttaatgttatttgaaaactcttcctttttttaatgtgtaaaaacaatccaaagagataaatccttgcatagacaccaaaaacagtgtctcagagaccttttcattttttccttagttaataactgtagtggatgtgaaaacaaacgagttgaattttaaaacatagcatttattagtgctatacagtcacattcctttcagccagtagtaaagttaaacagatgagtgatacagtacctgaatggtactgcttctgaggcaacactttggattgaaagtgctgcttttggttaaaggaactatgttgtggaaagcatattccagtgtaaatttgcagatgtgtgttttttttttttgtcacttttcataaggtttggagtaagttgcagtggcttttgatcatagtttagcccatttaatggtccttttacctagaatgttcttaagcagttaatgacaatttggaatacacagataacttgtagcttaagatactattttcatttaattctcctgtggagaatattgctttattttttactagtttcaggtcagttattaaaataaacatggaggttttaatgaatgttgtataatattttatagtgaaggaaaattgtggaaagggcaaagactttctctttcccttatgtatttaactgtgccaatctaaatacatactgttttatacaatgagatgcattacaagacttttctgttggagtgctctcgacattttggttttcatacctgaatgatcattgcattttctgtattttctaaaatggctccaattttgtgttttaagcttcagcttaagaggaagtttatgttctaattcttgactgagaatacagtattgagattctctgttttacagataacaactggtttttattactcattaagttcatttgcatcccgtagccctctgtaaatgtttcccctagttgtatgtacgtaaatgcacgcttatccagtgtatattagacatttttgtgctaaaatatattaagtgggatttttgtagcaaagcattctatttttctgttcttacagtgtgtgtgtgtgtgtgtgtgtgtgtgtatgcgtttttttaaccttaacttcagtttaaacactggtgtatttatttttttaagcaacttgactcttagaagccttagactgattttttcaataaatattcaaccaaaaattataaatttattaagatgtggccttacatatggcattccttgtgttcgtaatgtgagatttttgatttagataaatcaagattcaggattaaagtttcattgtaagttgaaatagaaaatgtattaaaatgtctaggcttctgggaggaagttcttatactcttctttcttggcattagaaagaagcaatatgaatttttgtgaatattctaaatattcaggcaacactgttcagattgatttaggtttgtcttaaccaatgttctttttttagaatttcaggttgtggcattcactgagtatgcagctactatggtttttgtatgggacgtataaatacttgattatatacgacagattttaatgtctttaaagacttcctgctgtattaacatattgtaatggagtcttttaaatactaggttgaatttaattgaagtcacacacatcttgaagtggtaactgcatagtaaatactaccaagagtttttttcacgtgggagtatcctaaaactctgccatgggtgtaaatgttttacattaatttcataattggacagaccctgcatttagcgaaaacattttgttttgaaagtgtgttctttttgtcgcactgttactgcgtaacacttctcaacattctgtaagttaaattattttaaaataactatggtgaattcatgtttatttttttactttgaaaattgtagtactcaggtggtatttaatgggaaaggatcctttgggtataaatcataatgtattttaaggaatgcatctataacattgataactttagccttaaaaaaaaggtctattattccttcctctgcatcccatggtatattagcaaagtagtttacagccctgtacagccttacaaagttgttttacaatttttaatggaaagcccttaacaacaacaacaaaaaattgtatcattttaccaatatccacgaattactgatcacagtttgtaaataatttgtttaatatcagaaggccaaagaaagtcttaaaattttagctattgactctatggtgacttcacaataagatttctgtgcaaaaaggtaaggtgataattgatctaatagacttttttttttttttttttgctgtccatgagaattagacttcatattagcttcaattaaaaagctcattccattttattaaaatgtttgtaattgcaattttgtgtttaatgtttactttgtctttcctttctttagcatttaggtgactgttcggcagtttgatatatggccattgtcggccttaaactgcactagtaacaagcatggtatttatcttgtattgaaaataaaacaaacttttgataagactttgcagtttgtcttttttgtttaatttgttatttggtaaccattgtgtatggttttaagtagttaatgtttattggcaatatgcagtatagcagaaattggactgttgtctgtattctatctttaagccagatagtggtggttttcttgtgtattgacattttggtgctctttaaagcgactgataattgggctaaaattaggattaagaggcctgacagatttccaggctgttacatggtttttaaatggaagattcagaaagcatttgtctagttttagaggatcattaaccttactagacttaagtaaaaatgtttgtagcaaaaatattttactggttagcttggaaacattatggggtacttttgaaacagtaacagacttcagtttcagtgatttcagtagatatttctgtgccaggtattaatatcaggcctcagatttcttacctgcaagcttcagagtattaaaggtaacagttctaaacaagtgaatatgaacatgagaaataatactaccatcactgggatccctttccatgcctccactaaaattgtggttcagatttttgttagatttcctgttactgtttgttgtatgtttccattgatcaatccctatttgtgttgaattagttgagactctcgtccctaccctgtgaggtcatttaactttaagagaagatcattaggaatattttttggccagatgccacactacatatgactcagttcaagacctaatttagtgaaagagagaagctttttttttacaaaagatttatggacagacttttcccagtcttcctagttttgtttcagagccattaccatgaaacaataattattagaaatgat

SEQ ID NO: 1884992 - DNA, 4001 bp, Homo sapiens
aaaaaaaaaagtactagactagagaatcaaaaaagcagtgggaactacaaacttaaaaagagtatcactggaagacccagtaaaggcaatctccccagtggttcatctgatgggccttttatgagttactttcaaccattctctgaatgtaaatgcttaaagttaagatgatggtataactgtaagccattctgtgcccatttcagttcttatagaaagtaatcttttgccctccttgtcataatgcagtatagaaatagacaatttctagcataggtacctcaaccctaactgaacttctattttaatcctgctctaagattcagtgtcaaaacgatcttgacaatacctatctatgtctatcttagtgatccagcatcaggcccaatttctctatgttttaagtatattcctaccactagagaattctgagatggtattagcattatttttttaaaaataattatttaaaatttaaaaatatagacacagggtctcaccacattgcccagactggtcttgaagtcctgagctcaagtgatccgcctacctcagcctcccaaagtgctgggattacaggcgtaagccaccacgtctggcagagatggcattggcattaatcgtgagaaatgggagtgggtgtaggagacacagagtggagggtaaaaagaagaaagatatttggaactgatgggctttaataagtcctgccccttttcatttacttcttccttcaaagcaaaaccaaaatgagctactgaagatttatttacttcttgggatggaagtatcatctgtcccaacttccctttcccatcagagacaggtccccaaaaccgcgaaaaagaaactatattctcaaacaaaacatgcattcaattcaggtgactgtttgatattttcataacattttctttaacatttaatagaaactatatacaataaatttttactatattttacataagatagcaaccacagaaatttacataggttaaaagcaagacggataaggaggacccagtcctgtgggctgttttctcagaggataaaaagccagagttcaccagggaaaggggttaaagactgcccaattaagtagaggtgaagaaaagctaaactgcaggtcttcagatagagataaccgatattagggccatcagtatctcaaagacaccactcacaaagacagctcccacctagctacttaagtggatttctatccatgacttgggaaatcccattacaaagatgtcactttccttttaggtatagtcccaaataatcccagaagctttgatagggattatctctctttctcttccttgccctgagtgggaagaaacccacggtccacgtcctcaaaatttggctttacgtttgactataatactcaatccagaagaaaaacaaggtagtctgggttgcctgtgttttgtgagagatgatcagaaatacttctttgaagaacgagaaatttaaatccaccaaagtaaaatggttccccaaactatcaactaatagaagtgggttctggcttcccatttgcagtagccaatccactctgagacaatggtgcagaggctttctcagaatttcgagatccctgggatctgcacccatctccagccatctgcatctggccctgttaaaagaaataaaggcacttcagttagtaattcattcactgtggtctgaagtatgaatctgacttatcagtggccacttaaactagcaataagaacaatacaacagaaattaattctggacagatgctcttcccatattagctatcctagtcccttggaagagcctattcctgagcctcttccaatgggatggtgagctgtaggttgtttcttccaaatgaaatagccattccctactgaggtcccagaacagccaacagaccacaggaagacagtcctttaggcctctgcttgaaaccaacagccacagtacaactgctggtcttcagtcagggccactggaattctacccaaggctcacggacagaactcaaatcacattactttactggtccttctacaatgagaacaatttcagtgatgaactctccctcagaaggtatgatttccctagattccttgtctcaagcttttatttaaataaatgtatgtcctactctgggatatgaggatcacgggccattaggtgttctaagagcccatctggagaactacagcaacaagggtacacaggagcagagtagggcatttttaaaagtgctttgcttatatggtattcaataagtgagagacatgtggagcatctttatactagtgatgacaccccactcccctccaggagcacatgctatctagcagggaaccctctgcctggccaggtcactacatgagggaaacaggtgggactgttcttcacttgccaaaatatccactgggtcttcagcaatttctttgactaaatgatcttcaagggttagtgaaggatcaaaaagcaaaggtgaaggaggacactgcataccatcacccacaacatccaagtcctagaaaaaagagaaaagcccatcagcaataccaagggaaacagtaataaagttggcatgtttttcagcaaactttaaagcaatactctgctgtctccctcaaccctagcctacctttaataaaaaaaaaattttacaagagcgtccaacaaatgaaacaagatccaaaagcactgagagcttttgctgccaagtgtaaaacatagaccaatacagtagattaaaaaacaaaattctggccaccacacctctaatcccagcactttgggaggccaaggtaggcatatcacttgagcccaggagttcaagaccagcctgggcaacatggtgaaaccccgtctctacaaaaactgcaaaaataagccaggcgcggtggcacacacctgtagtcccagctactctggaggttgaggtgggaggatccctcaagcttgggacgcagaggctgcagtgagccgagactgcacctctgcactctaacctgggtggcagagccagaccctgtctcaaaaaaaaaaaaaattctaggaaaattcacagaaacacaaagtagaaacggagaatagtagggaacaggggaaagggaaaggagagagttactgtttaaaaagtacaaagtttctgtttgggttgatgaaaaagttctggaacagaaaatggtgatagctgtacaacatggtaaatgttcataacaccactgacttgtacacttaaaaacggccaggtgcagtggctcatgcctatgataacaacaccttgggaagccgaagtgggaggatcacttgaggccaggaattcaagaccagcctgggtgacacagcaagactccatctctacctacccacctacttacacacatacatacataggttaaaagagtaaaattttgttatgtatgttttactacaattaaaaaaatattttttaaaaaagcatattctctgaggctacctgtaatgaacatgtaagttcaccagtgattaatttaaatatgaacaatgctacgttaaaattaaatattgctgggtaatacaagattgcctgattaatatcctaacagccacaaagcaagcaaacaagctccaacaagggaaagggagaaggtaggaagaaaggaaggacaacagaaaactcacagttcctctgaatggctaggaaatattattttggttaagtccctatcccgacagagcaacaacctggttttttttgttttgttttttttttttttgagacagagtctcgctctgtcgcccaggctggagtgcagtgacgtgatctcggctcactgcaacctccgcctcctgggttcaagtgattctcctgcctcagcctccccagtagctgggactatgggcgtgtgccaccacgcccagctaattttttgtatttttagtagagacagggtttcaccatgttagccaggatggccttgatctcccgaccagtgattggcccacctcagcctccc

SEQ ID NO: 1884993 - DNA, 4001 bp, Homo sapiens
caccacacctggcttaatttttttatttttgtagagatggggtcttgccatgttgcctaggctggtctcaaactcctgagctaaagtgatcctcatgcttcagcctcctaaagtattgagattacaggcatgagccaccagcccggctactttcttttttcttttttttttttttgagatgggatttccctctgttacccaggctgaagttcagtagcgtgatcttgtcacactgcaacctccgcctccagggctcaagtgatcccaccacctcatcctcctgagtagctgggaccacagatgcacaccaccacacctggctaattttgtatttttcgtagagacagggtttcaccatgttgaccaggccagtctcaaactcctgagtttaagtgatctgctggcctcagcctccccaaatgctgggattacaggcatgagccaccaggcccagccccccagccacttttaatctttaagaaaaccagttctgggctgggtgaagtggctcatgcctgtaatcccagcacttcagaggccgaggtgggtggatcgcctgaggtcaggagttcaagaccagcctggccagcatggtgaaaccccacctctactaaaaatacaaaaatcagccaggcatagtggcgcacacctataatcccagctactcggggggctgagggacgagaatcgcctcaacccaggaggcggaggttgcagtgagctgagatcacgccactgcactctagcctaggtgacggagcgagattcaaaacaaacaaacccaaaaaaacagtctgcatacctatttctgccagcagttgcttttaatcaactctatcagaagaagctgtaaatcagagcagacctcacttcctgcagctattccagtcatctgctctgatataacaacaagatccccgtggataaggtcaaatgctgaaacaattggatagagcagaaagtctaggctttaagccccagttttgctgcttattaactgtgatctctggcaagtgacttaatctctctaagcctcagtttccttatctagaaagaagttacaatctactttcaggattgccaggaagattaaatgtaatcatgtgtaaaaacattttgaaattagttaagtccatacagcaatgcattaattccaacatatacatttcccctcccatatttatgcctgatatcttacaattgttctcagccaaatggttgagagatagtcacattgcctgtacatgttgaatttagtgtaagttattgatattgtcattttaactcagttaaaagtatttgatggtactacatggttttgttttgtttgagacagagtttcgctcttgttgcccaggctggagtgcaatggcacaatctcggctcactgcaatctccgcctcccgggttcaagcattctcctaccccagcctctcaagtagctaagattacaggcatgtgccaccatgcccggctaatttttgtattttttactaaagacagggtttcaccatgttggccaggctggtgttgaactcttgacctcatgtgatccacctgcctcagccttccaaagtgctgggattaaaggcttgagccacagcacacagctattattatatgttttaaatgccacttaaaaatgtcttttaaaagatcatactatgtttggcatttaaggaaaaattattttacatatgcacaagagtgatatgtgagaaaagtttgtaataagcagtgattagtttaatcagcattttttcttagagatgcaaaaatagtggcacagctatagttgatgacatcttagatttcataaataattatttgttattacttttatcattttgtcatttttattacttggattggaagacctctgagaaaaaaattaaagttcttttcaaggaggaacaggttttctccatttaaagactaagtggtccggagatttgtgcaggtacaagctgcacaaatctccagaccacccagaacaacctttttttttttttttgagacagagtcttgctctgttgcccaggctggagtgcagtggcacgatctcagctagctgcaacctccgcttcctgggttcaagtgattctcatccctcggcctcccaagtagctgggattacaggcatgccccaccacacctggctaatttttgcatttttagtagagacagggtttcaccatgttggccaggcttgtctcgaactcctggcctcaagagatacgcctgctttggtctctcaaactgctgagattacaggcatgagccaccatgcctggccctagaacaaccttaacctggcttcctccagacctctgagtcatgcattgaagtcagcaccaccacgtggagaatcaccattatgtgcctctccttgggcctgccttagcagaactcagccccacccctagaaaagggcactgtcctctgcctaaaggtagaatttcagaattcatgaggcatttggagtaggaggtaaaagaagaagaaaaaaagcagcctcaggcctggtgcagtggctcacacctgtaatcccagcactttgggaggccgagctgggcggatcgcttgaacccaggagttcgagaccagactgcgcaacacagtaaaaccctgtctctacgaaaaatacaaaaattagccaggtgtggtgcacgcctgcagtcccagctaccggggaggctgagataggaggattccttgagccagggaggttgaggctgcagcgagctacgatcatgccactgtactctagcctgagctacagagtaagaccctgtagcttgccttgacctccaggactcaagcaattctcctacctcagccttgcaagaagctgggtctaaagacgtctaccatcacacccgactaatttaaaaaaattttttttagtatagggtcacgctatgttgcccaagctggtctcaaactcctgagctcaagtgatcctcctgtctcagcctttcaaagtgttgaaattacaggcatgagccaccatgcccagccaagaaagagtattacataaagggtcttccaatcctatcactttttttttttttttttttttttgagaaggagtcctgctcagtctcctaggctggagtatagtggtgtaatctcggctcactgcaacctctgtctcccgggttcaagtgattctcctgagtagctgggattacaggtgtgcaccgctatgcccggctaatttttgtttttttactagagacgggtttcaccaagtttgccacgctggtctcgaactcctgacctcaagtgatccaccagccttggcctcccaaagtgctgggattacaggtgtaagccaccgtgcccagcccccaatcctatcactgtctaattttaataatcagatattaacaagcatctcagtcgccatgtagtactgctctgcaattgagcagaactctctaatggggtagggtaaaagggctaccaaaaatttctggcacttcgttgaccataactaggaagaaagtgggattagaactgctgtgattcaattgacaagctgaaaatatatttgcaacttatattacagacaaaaaattaatttccctagaatataaataactactaataagcaggaaaatgacaactgaataaataaaaaggcagatataaacatactgttcacggctgggtgcggtgtctcatgcctgtgatcccagcacttcgggagatggaggtgggtggatcacctgaggtcaggagttggaaaccagccccgccaacctggcaaaaccctgtctctactaaacatacaaaaattagccaggcatggtggtaggcacctgaaattccagctactagagagactgaggcacgagaatcgcctgaacccgggaggtggaggttgcagtgagccgagattgcaccactgcactctggcctgggtgacagagccagactccatctcaaaaaaaacaaaaacatacagttcacaaaaagaacatctcatgactctt

SEQ ID NO: 1884994 - DNA, 4001 bp, Homo sapiens
attgacatttccttcagcaatttcttggtttgtactgtctacagatgtattgtgacccattggatggtatttactttggcttatattggttttgacatcagaagcagagagtttgtgcatgacacagctgtcactctggctggtgacatggggtcacctttgactcagacttctcttggatcctgctcatcccacctgtcataaagctcatcttctccatttttggagtgatctttggaacctttctgatgccattacttacattttcatccaacatctcatccttgcacttgggataagtctgcctttcttaccttggtctacaaggcctacatgatttgttttttcccacctctctgatttcaactgcttgccttctcctcttcactgcctttgctcctgccacgtggcccatctgttccctcttcaaggtccttttgtttattgcgtcttctgctttgaatgctctccctctggatctttgtatggctggctccttctgagcttctggatcttgacccaagccaaactttccttccctgatcactttttctagtgatgccccctgctcctcaccatcccattatctaggtttatatttttcaaaatgcttactgccacctaaaatcattgtgcctatttattgacttgtttatttgccatttatctgtctcttgttggaacataagcttcaggagagcaaagcctattcccttcttgttctccattgtgccttgcactgatgttcagcagttaggatttgcccaataaatatttgctgattgaaggccaggagccttgcaatggctttctaactggtatctaattcgctctgcacactcttacaggaaaactcctcttgaagctgaaagtgtttcatcagcctgtcaataagattttgtcagaagctcagccctctcagcgctgccgctgcctggttcatactccctgagtggccctcctttgcctgcggtgctcttccatggctctctgtcatcttccttcgcaacaccgccccaactcttatctccaacctgacccgttattgctggacattgttttgagaatttggtggaatttggtgggaggatgcagggagtgtctgagtctcacgtggcccagctgctccacctcttagctgaggttttatgcacacgaggggcagtgacaaatgggaaagcagaggtcttcttagtgattatccggcaagtgccccacacctgtacaggtctctggggcaagtgacttagtctcaaggcccaagtgggacctcttatttcttccaagtgacactcttaccactggctggccaccaagctgagattgtcatgcagcagcagcagcataagaaaggaccagatgagggcggggaaaaagagagagagagagagacagagagagagagaaaggcagagagagagagagagacagacagagagagacaaagacacacgcacgcgcgcgcgcgcacacgcacacacacacacacacacacacacacacacacagagagagagagagagagattctgtttacttgaaatggcctcttcttccatgaagctctcttagataattactttagatttaagacaagctacttgatctttctcatcatcaattgcctcattggtaaaacaggagataatgccaacccatagggctctagttaaatgtgtgagtgacgattaagtgaggaaaagtctctaaaatacctggcaccattgtgaaaatctgaagtcacttcatctatgctgttcccttctgctgtctgagttctcatcccttctagcagtttgctgtaagttttatatacaacatttagggaaggaaatctatacagagttttcagataaaatacaggaatcctagttacatttgaatttcagataagcaaggaataatttttagcataagtatgtcccaaatattgtatgggatattcttacatacacaattattcattgtttacttgaaattcaaatttaactgggctttctgtgtttttgtttgctaaattttggcaaccctaatccatagacaaggatcagagatgtatagacttaagataactggtattgcttctggtgtatatcctaaccaaaattcacaggatgggatggctcaccaaacacgctttcattttggaacttcatttggaaaggttaacagttttgaaggaggaaaaaaagaaatttgtttattccagagtaagcacatttaaaaaaatcttttttaaaagattgagggtattgcctatctaaaataatataggccagtttcagaggttgatcaataaaggaggaagtgctatagctcactgggaaatcgattttgagtgaaaggaacaaatggatcttaagccaagtctgattcctacctctgggtaccagcctgactttgttgcttggctgtgtctttgatatttatgctatcattttatttccacataatcttgggaggcaggtaggggtatccccattatatggagtcctagaggttaagagattggcccaaagatggccagtggttgcccacattcatggaagatttgctatgcacagggaaagtgctaacatattgcatccaggtagtacttctcacgtgttacatctctatcccaggagacctggagtagttttttttgctactagttatcatttattattatttttatttcagtagttttgagggtacaggtggtttttggttacatggataagttctttagtggtgatttctaagattttggcacacctatcatctgagcagtgtacactgtacccaatatgtagtcttttatccctcaccccctcccaaacttttcccctgagtccccaaaattcatgatattcttatgactttgcatcctcatagcttagctcccacttataagcaagagcatactatatttggttttccattcctgagttatttcacttagaatagtggcctccagctccatccaagttgcagcacaagacattgttttgttcctttttatggctgagtaatattccatggtgtatatagaccacattttctttatccactcgttggttgatggacacttagattggttccatatctttgcaattgcaaattgtgctgctgtaaatgtgtgtgtatgtgtgttttccacataatgacttcttttcctttgggtagatactcagtagtgagattgctggatagaatgatagatctgcttttagttctttaagaaatctctatactgtttcccaggagacctgaactattatcattccttttaacagatgtacaagtggaggctcagggaggccatacataagtaagaattatggtgaaggtgggacctctggtgggcctgactctgaagctcagactcttcattgctaggttgtgtgccttctcatcccaactcttctgactccaagaacagttttccttttgatgtgaatacagagaagagagccaactcagaatgaagggctcagataggactccaggagaagaggagaattcccccatcaaaaagatgtgcagctctagataactcaggttatttttcattttaaatggtgaggtaattctttccttcaaaacaaaatctgttctctttttggtctccatcatatctctctcctactctacctctttcagtatccaaataatttgcctaggagattggtaggactggatcagaaggcttcagcattttatgtcatatgctttggtcttgttttcttttttctttcttttttttttacagtaaacatgcttattctttataatattaatagtaacaatgatactatttaagatttttaaaaagcatacatgagggcacctaagaaaaatctacaagtaatatcatacttaataactgactactgaaagcttttcctctaatatgggagcaagcaagattattcccctttgccacttctggtcaggatttgaggtcctacccatggcaataaggcaaagaaaaaggcatacagttcagaaaggaagaaa

SEQ ID NO: 1884995 - DNA, 4001 bp, Homo sapiens
gaggtccctatagtaattttttctatgccactcatattacattttatcttgagtggtgtagtaatatctactccaaacttaaactctcctcattcttgcagtaggccttcacgtgcgtgcgtgtgtgtgtgtgcgcgcgcccatgcatgcacatgtctgccctgctttcctaaatatacaatatatttcctacgatgatatggccttttgcttctttattctcctcctggctcccccttcctctctccctctcacatcatctttctcccctcttttcccattcatttgttcacaaataactaatgccctactatcagggatatttctaggacctggggttacaggggtaagtgcgagttttaaagaacaaatttgatgatgataaaagaactctggatacaaatgtggtgtcactgattttcactacattctatttttatagcaatacacttacattattctataattttaaaaaagtttctgttacttgcaaagtcctttcctttattgacaattattcctaggctttagtgataaagtcaaattctaatgtttatatgtttaaaacataaatgggcatcacagttacaactagattgataaatgtccccaaacacattgatatgcaaacaaaatgtgggagtggagagtagagaggggatatagttcttttggtactaacagtgggtggttcttaagaaaaaagcatcatttgtctaactggagcagcctagacacaggctaaaatcccattgtgtaaaggaaatagacaaaagataacaaaaataatttttattataattttcattgaaaaaatacagaaaatcaataaaaatgagcagaggtaaatagtcaatattaaaacacttcaagcaaaagtaaatatacagaaaacagtaaaagtgaatgtaagtccatagtcaatattaaacagttcaataaaaaaattaaactattgatccaacctaggcatttaggccacatacggaaaggaggtgcaactagacattcttgaagcagtcttttctttctcaaaggtgctgcttagatccaaggtgctgttttagactaacatctgaaggaaggagagggcagaggagggagagaaaagggaacaggagagaaaatagaaagaggggaaggaagaaaaactaatatttcatgagcttttaaaaaatatgatgttaaatactttgttaggcactgtatgcattacttcatttaatcctcacaacagccctacaaggtaggtattacttctcttcattttaaagataaggaaagaggctcatagagtttatatcatttgccccaggtcacatagttgaagcggcagagagattagaatgcaactccactctaaagtcctcctgctttcctccaacatcaggtgttccccattgtaccacacccttacatggaaaacaactcttggcggatttatggctctcaggaggagttgatctagcccatccaatgtataccttttttggagcttgggagtagagaaatctggaccacatttccaagagggcaagtctgatttgtctatttcttctttgtttcagaagaaagacctcaacaggtggcgaaagaaggcatagaaggattgaatgctgcctacccgactggtgggctattaatagttcccctagagcatgttctttaatagaaaacggagaaaaatgtatgataaacaaaaatgtgcaaacccaaatgtgcatgttaatcaatgattacgaatatgaatccacctagatttctcagctgtcaaatctaaggataaagaaactcaaaggaacaccaggcaggtagcagagctatacactaaatcttgtctccatcacattcacagctccacaggctaacgttctctatactgatggccccttcttagttgatgatttttcacaatgtatttcatggcttccatccctacatgagactttattactatcacataggaataaaaagccataaagcactagagtgaatttatcttggtcggatgcaaaacttattttcttcacatgacttcacaaccatttcaaagctaaccaatcatttcacgctacattaaagaacattttaaactacacataagtgacaggaagcacacttgaattgtgacatcacgaattaacaagattttatccttccacgacattcttagctacaaggaccgggaaacaagaccaagagacactcagcaacattcagccattgaattcaccaaaaacaaaggacactgggaagaattcctggagaaatgctcatcactttgacattgaacttggaaacacatacggaaagacagaagacagacaaatcactgatgcaaactgaaaccagaggaattatttcaagcctcttgctccaacttttccccagaaagctttcttacatacccatgctggcttttagacttttcattttgggtcaggtggggagtcgggatcttagtacctgtttgactatgtaagcgttaagctttctctacacctaaataacaaaaaggaaataaaaaagtatagcatactatgtgctaactgctcacctacagccttttatagagatgcatccccaaccccatctacaaaagcgagaacgatgccagaaacaatactatgcactgaaatctctcagtgatctaaataactcaggtccaaagaccaagaacattcttcatgctgcattaaagtgacattgctcttggtattattaaaacacttataagtggccatgctgaaacccaattctctgtaccactgaaaactcaataccataaatcccaatggttttatctggactttaaaaaataaacttgaggtgcctatctaccaactcccgaaacagcattccagactattaagcactgccctctgctttattttttaaaaatgcattattcaaattcaaataaaagaaacaagaacttgagttcctccttaggagtaaaggctaggcaagctatttccatctagaggtgactaccatgacatcttggtttatgtgaatcacagggaagagactggaaatagttaaacgaaaggaagtgcatacataaattcaattatcatgcagaaaacatgcaaatgatttaagcactgcatctgaaactctagtttatattcattaatctcaggttgcacttttgaaggagaaagacatgctaattgggtccagattaatgcactcccaaacctctccaatttgtttttaggtgagggttaaatgatatgttttaaaataaacacagctgctcatctgcctccaccttctacctcccagactccacctctacctcctcccccagctggctcagctctccccaccagctaccctcccaacccccaccgctcctctaccacatctctccttccattagggaaggggttcaagagccctaccattttccctttgaaaatacactagaagaataacactgtttcttagccagctcaacactttccctttctccaccagccaccaaactccagaaacagagtcaatcacatatcaaatctgctgatgcttaaatggtagcatcaagaatgtggatacatgggaaggcagccttgcatttgctcaggtagcgggttctttctacaagtttggacctgcatcctttggatcagtactgaagggcagttttaaagtgtcgaggcacatgcttgctgaaagccaacattgctgaaggttggcatggcaatcctgtgactgttatgtgggaaactagagactcaggagagaacttgggagttttgttgctgttcttcctctgtggcgcactcagccagcaaaaactggcaccaagcggagggcactcaaaatgcctttcaaaaggatcccttgcttcctttctccctcctccctggcaaaattatctttaaaaaaagaagaatgttattattgattaacagattgattgatttaatgtattaaaacattagtttgggacacacatttcagggagaatcttatcttgtgaggagtgaagc

SEQ ID NO: 1884996 - DNA, 4001 bp, Homo sapiens
gcagtggccatgagaacatgcctcctcctttcatgagcctgagattcctggctgtcaaccctgtttatcttttctcttgggagcaaaggagggttcaaagctgagtggggcctgaagctgtcaattaacatgtgcatttctcttctctgtttcttgttcatctggcgatctggcaccacaggggaaggtaagctgttgttgcttctgtggggtcctgcaggccaccttctccagtacccgcctcctaccctaccccctttcccacctccccgaagacaaaccctcaatcagggtaggagggtcgtagagggaatggcctagagtgtcctgcctctcacatttatgtcccctaataatgtcattatctatcttttttttcctacagtgacagcctcatcaagggtaagaaatgagcctagtcaccaagaactccacccccagaggaagtggatctgcttctccagtttttgaggagccagccaggggtccagcacagccctaccccgccccagtatcatgcgatggtcccccacaccggttccctgaacccctcttggattaaggaagactgaagactagccccttttctggggaattactttcctcctccctgtgttaactggggctgttggggacagtgcgtgatttctcagtgatttcctacagtgttgttccctccctcaaggctgggaggagataaacaccaacccaggaattctcaataaatttttattacttaacctgaagtcaaggcttcacgtgttcatgaactgggtaactggcagcaagcatgcgcacgttcacatgtgcgctcctgggtctgtctttgtgtgtgccagcagggggcgcaaaagaatctggctggggcggctaaggggaagcaaggcctgggctccgaaacaggacccaagctgggaaggctggccctgagttctcgaggcccagctgtgctcttcacacaccctccatttctcccacatcacccatttttttaaggctggacagccatggctttgctgagccagattaaaaatctgatgaccccaacaggagctgcttccttggcagcagggttccttgtggctgtggggagcctgcctgtgcctgttgaggcacttctgtgcccagaagcccagtggatcgcgtggcctgctgtaggccccccagactccatttctcagtcaccaggcgtgaggagctgctagctaacaggcctcccctggggaggtgggcttttcatgcccgcagttccggggccaacagaacaggtgcctgtctgttcagtccacagataagctgacacttatcttcccaagacaggccttcccgaatctcaggcaccagagaaacagagccaccgtttatacctgaatctcccactactgcccatttcccatccctgcggggagacaaggaagatgtggaactcagacaaaacataggtgcaaagtatgtccaggaactgccaaatgcagatagggcagcaggtggatctgaacagagggactgggttaatctgcttcgatttttaagatatttttctctgcttggggttgagtatcatgaaagacaaagcagacgtcgcagccccaatcctgagttgctgggaggctaagatgagataaacaactagacaaaagacaggtcaagtgacttggatcagtcttcctcatgttccccttcacactttatttatttcatgctcccaaggcgggaagacaatggaggtgcctagggaaccagtgtttccacatcttgctgcagctgtaaaggcagccattttgtctccttcccattgttcccctttgcctagtgattcgtcccccatccagaggggtgaaggtcagaggttgttggtcagtagtcctccatggtcttcagggctccctgaaggttactgccgagagaacccacccgggagccatctttaccagacagtgttaggagcttcacaattagaccatccaacactgtactggaagatggacccagggccggccgacagagaactacggtgcgcgctcaccagttgctacaggggaccctggccacaggccaggtgaggtctcttgagagggggcgagccaaccccaagctcaaggtcgactgtgggttctggatccaccaggtgacaaatcgcactgggtgggaggaggggctggggcccattgtgtcccttagtggcagccagccaacaagaaccaccccttgtgcaacgctctcagctcaagacgaggggcttccggggtgcgtgggaagtggggagggggctgcagccagctaagggctggggacctgaggcgatggatgttgctgacacagggacaggggcctccatcattacccggcagtattagagactcccaaccgcacccaaacactgctgggtaagacgagggcccccgcccagcccgcccaccttgggtcaggcagcttcaggcccaggatccctgcggaaaagctgcagatccctggctcccatccccccaccacccgagtccctggggacacttcctggtgagccctgctgcccgccaccagccacaccctgggtcgctgatcacgaggcccaggttgcagtccaagcaggccctccgaagcccctcgaccgtcggcccgccgcctctgagccaccttcccctacccccggcagcctttcccgacccgcgacacacaccgatttacccaccctcatcccccctctgcagtcccaagctcagcccaggacctctcccctggtggcctttacctgtcaccgggcccacctgcccccagagagtgggtgctggggagacgaaggggctttaaggccccagattccacggcctagagcccgccctggcctccgctcttcctccttccttctccgcctgccgggcagccagcgcaggctccttacctgggccccgcctgccaccctgcgcacaggtgtgtcctcctgccataggctgcccccccactgccttaaccccttccctcccagcgccagccacgggcacctcctctaaggcttggccactcctctaggcctcccaccctctcccaggggcctcttttctccaacctgcctagtctcacccctgtctccagaggtacaaaaagcgggggctgtccttgggtcccctccccacagcagatgctgcccccaggactagcccattcctctgtggcctcagaccctgcccacagcggagctgcaggccagagagatccctgaggtcagcgaggggtcagctgggcaggagttgggctgtgccgccccgcagtgcccagcctgtgctgggatcccctgagggaaaggggagggagaaggccccgccaggcctgtgaagggcaggcgggtcccagcaaggtgtcgctagtgtgaagttacccaccgctacccagagaccccagctggcccggagcatcagccttgcccctcgattgaggcctgcagagggaacgatcgcgctccactctccggaccgagctgctcccggacccacctcacagcacagccctcagtggagtccaagtcccaccccaagggcaggtagcccaagggcggttagaggaggtgggacttgcctttgtgcagctgcggcttgtatagaaagggcgttgctgggagaggggacctgggcccgacaggtgattgccccacccgtgccctggagggccacagccccagggagctattgggttgctcaatccctcgctgttctctctcccaggctttgtttgcttccttcttaatacccgcctgcaattatttgatgcttgtgatcggtttgtgaatctgtctccctgaccagcctcctaagttccaggaggtcgggggactgtgaatgcctgtgacgccgggggctctgtaaggatttgctgagtaatgcacgcccagcctctgggctttgggacctgtgctgtctcagcctttccaggagtgggcgccagcacttcctgagggatgactcccaccggctttactccccaggacaccagtgtttcaaataaagaag

SEQ ID NO: 1884997 - DNA, 4001 bp, Homo sapiens
ctcctaggctcaaacaatcctcccacctaggcctcccaaagtgcaagtgtgagccactgcgcccgacctacattccttgactttctaatcaacattacttaccattgatatcccttgtgctgagacaaggctgttgctttgctacctctttcctggccttatttaagaaacccacagtcctcacaggagccaaacacaaaagtatgtgtttgacagatatccaagagtgaggaggaaaaaatcattgccaagaacccagaaactgcagcctctacaaacataaattgcctcatgaggcttcaggaggtttatggttccatgcaaagaatcaaccctgtttgcgggggcagaggagggcagttcagaatggaagtaaaaggaacccagtcttttgacaacaaggtgatgaggaacataagctttccctacttgaattcttgaggactgcaatttttgttttgttcgctggtttgtcccatttgtccagaacaatgcctgacacatactaaactctcaatatttggtgaataattcagagaataaaggaagtttgagaataaagttaaaataccttgacgcagtatgcatctaagggactacttataattagacctccacatataagtggattttctgatgtggccactttgggtgatattactaccaactttatccctcctctgataaacactccttagagatgtccatcctgtatatataacactctggaataaacaaggcatgagtaactcctctctcaaactaaagaactttgttgcctagtggagggaagtcctctagagtctagtcttaaaaggtcacaagtagaagcagctctcctaactcctaattcctcacagaaagatcttcctgtaaagcaggctcagttctataacaacttgggtcctcaattccaaaagggagacaacaatgggaatgagttttcttaatggaagaaaagaagtccaaaaggaacaaaatttagacgaaatcattttttcccacaaccttttcctggaaatctttggctctgttcctctatccacattcacagcaactttagagagctgcccattagtttaagctgggcattaacctggcataggaaactggttcttgcagccatagagtttggcatccctagaacccaaagaaaagcaaagccctaatggcccccagccaactgggagagtcagacaatgtcctttgtggccaacagggtgtgagtgcctacaacagccacaccggcaaagagagaacatatccctgggttctgctcttggttcttttcactggcttcctagaagacattatcaaagaaaccccaaaaatagaaacattggatcttcctgggaagaataaaagacaggctaaggaggacaaggataaagactagatttgacatagagcttactggagctctcaaaagggaaagaaggcattacagaaaaggctggtcatttcaaacttccaaaggaggaagcatactaaataaagctgagaatttaggcaggcgcttaaatgccgcttcaattctccattctgctacagctggagccagcagcttctttacttctcctgccacctcctgactgcagctggttccacttcagcctggggcttttacctctcaggagtggggagggctatgccataaaactagccagtttaaaggccccagaagtcattactgataatgtaatttcattttaagtttttgcaaagggcaagtttataaataactcccagctactgagaaatgggcttccaggacaatggactaggcttgaccttgtaacacattaaatgctgactgttgagaaagaccttatcagcttagggccacactgaaagaatttaaaaggtctattcttccctcccactcccaaaatgggtagctgctagaaagctttcgagacaaagttctgtgatgcactgactttcagagagccacagcctgagtgtataacagaacttcacctcaaatgctaatcgtgcttggaaatgatgtataggcagattgttttgtgggagattgggtgacttagacagattttcatgtatttatgtttttattatcaagaaaacaagaatgctgtcctcaagacaggtgaaacaccacagaacaagcaactaggctgctgcaaatgaatctttgatctcaggggcttctttttttttttttttttttttttttgcgacagtctctctctgtcacccaggctggagtgcagtggagcaaactccgctcactacaacctccacctcccggattcaagtgattcttgtgcctcagcctcccgggtagctgggactacaggcacacacccccatgcccagctaatttttgtatttttagtagagacggggtttcaccaaattggccaggctggtctcgaactcctgacctcatgatctgcctgcctcggcctcccaaagtgctgggattacaggcgtgagccaccgtgcccggcctcaatcaggggcttctaaagcctggtgaaaagcatcaacatctccaagaactctctcccctagcgcatagaggactagagggaaagagtcattcctagtgctgccccctgtgggccttctcggtgacctgcagcttccacaggattacagtcataagcaaaaatatttttcaaaggcagctctggataagagcttttttttttttgagacggagtctcgctctgtcgcccaggctggagtgcagtggcacgatctcagctcactgcaagctccgcctcctggttcaagctctcctgcttcagcctcccgagtagctgggactacacgcacctgccaccatgcccggctaattttttgtatttttagtagggatggggtttcactgtagccaggatggtctcaatctcctgacctcgtgatccgcccgcctcggcctcccaaagtgctgggattacaggcgtgagccaccgcacccggcaaaagctctctatttgtgtgtcttgtaggacaaactagtagagatgggccctgaaaaataagtgaattaagtctgttcacaatgtatatagtaagagaactctttggggtaagatcttagtaagccaccagaagactgggagaatatgtttggggaaggtagagaggatacttggaaactataatgaattatttgattcatttaggggaaaaaaccaagaagcctctatggagggaattacaggatgccatctacagagctgaaagagcacaaataagaatatggaggccaggcgcagtggctcatgcctgtaatcctagcacttttggaagctgaggcaggagatcactagagccaggagttcaagaccaacctgggcaacacagtgagaccctgtctctgcaagaacttaaaaaaaacaaaaattagccaggcatggtggcatgcacctgtagtctcagctactcaggaagctgaggcaggaggatcgcttgagcttgggagttcaaggctgtagtgagctacaattgcgctactgcactccagcctacacaaaagagtgagaccgcctcaaaaaaaaaaagaagctgactgagatcactaaaaagttcttcattgtctacttaaaaataaatccttccagcctggccaacatggtgaaaccctgtctctaccaaaattacaaaacttagccaggcatggtagcagacgcctgtaatcccagctactcaggaggctgaggcaggagaatcgcttatacctgggaggcagaggttgcggtgagctgagatcgcaccactgcactccagcctgggcgacagagcaagacttcagatcaaaaaaaaaaaaaacattccctaaggccataccaaaagggcctgatgtggcattaccctgatgtggcaatgggtcttggtgaattaaaaactgtaacaagattctcttgtctcaatcctgtttataaagtaaaactaagaaggtaaaaactagaaggagaaattcctagataccactcccagctccaaatggctaagtaggtatacttcct

SEQ ID NO: 1884998 - DNA, 4001 bp, Homo sapiens
gtgtaccagctcccacctcactgaggcatctgatgagggtagacaggtgtccttggtcagacgcttttacctttgaggcactggggtgcagacttcccacctccagtcagaacaaaatatagacagtaacaaccccttcctctaaagaaagaaaaggaccctgccattgtatctcagactgggagagggaagggcattttcattagcaattttcagttctggtatttatgtagtggggtcttaatgatatttgattgggtgtttacctatatcgtatcaggctagccctcagctgggtttcgtttactttcacagaatgaatgtattgtggaaatggtaaactaggtagtcgtgactaattagtggcttctaactagtgttctgtgaaatactctgcctaaagtgctcagttcagtaaacatcctgagcactcggttgtgtgagaccatctgaggggcaaggagctgagaggatccctagggagactgtggctttcatgattgtccagtaggcagtagctcaccagccagcacagggggccctcagtcggctagagattcaggatggttttgctccctgatctagtctttgagcatctgctgttgtgtcctactagagcatcacctcctaggaggagattttgtcagtatagttcactactgtgcctttcatgcttagaggatgccagatgcttattgcctaacccaagctttaagccctcatatcctcttggagtgtgtgtgtgtgtgtgtgtgtgtgtgtgtgtgtgtgtgtgtgtaaacctctccctctctggatcagtgagagtgttgttaaggttacaaataagaaatgcctagcacactgcctgactgattgtaagtgctctgtaaatggtggctacacaccccaggcctgctggcattgctgccactgttgcccctctgactcttttgagccagtaggtgaagtgtgtctccactcccttgggtggagtggacagggtgcctttctcaagggcagttgtgagggctgagctggccgggaaggtgtgctcttccttccaggcctccctcccacaggtcttctgcgggccctgcagttggccctgctctgactcttagtttttgcttcattcttgacccactcaggcctggtagaaagagttatctgtgagcacggcgggggttcccaagaatctattatggttttagtgtctaggactctaaagtcgtgacagtgactcgtctcttcagcccctgtttgcagcagagggcgcaaaccagctcaaagcaggcacacagatgtttggtgaattgggagaagttgttcctgtccaggagccataacgtggtatttgtaattttcctcgttggaaggcatggctctgtctgccaagaaagacaaggcatgtagtcaccatgctgctgcctcacagtgacatttttaaagccagaccttctagagaaggaagcaggaaggaaggcgacttgcttttgggcccgtggagtttcagcagttgcgggaagttggctgggctgtgtgtgtgtgttgctgcattggtgcctggtcttctttgatagctcccaggagcatgaggttgtgcttagcagttgtgtcccatcagtcctcttggtctcgatcagttcacacgctcccagggccccacgtatcagaagggccgccgttgcataacactgtccatggaaatcactgcagtcatgagaggagcagtggctttggcctgtagactcagagacctttcaccatgactcagcatgggaagcggaggctcagagaacttcagcctgtcttgtccagggccaccaagggagcaactgagccatgtcttctgttatatttagagttgggggctgaggaggggcgcctatctgcattctctgccggtcctgggtccacctgttgcagggacccaattctaagggacctgaatcaattcaatctactgcctcagcctttcagaggcttctcattgctttaggctgaaggctgtgctgctgaacatggccttcagggtcccatggggtctgactcctgtcatttcctctgttgcaggcccacttgacttcttgcagttcttcagatgtattgtcttcccgacaggccctgcctcaggctgtccctttgcagggcgggctgtctcttctctggttacttctgttcgttcttcagagaagccttccctgttcctcccattcctcactgccgtgcttctccttcacagcccttaccactgcctgtagttactgtatttctttgtgtactcatctgtggtctagctcccttgcaaggctgggagctccatggggcagggaccctgtctgtcttgtctctggtttaccccagtgcctcacacggcctggtacatagtgggtgtccagcatcgacttgaggaagagtgatgagggaaggctccagaccctttcaggggcagagttgctctactgctcctgctcctgctgcttggggctcatcatcctctgccctgcacacccgtggcagggggggtctgcccacacccacctgcctttgtgccacactcccttccctagcaggacgatggttcctctcagcactgtcctttttgtttggcctcctggtgggaggtgaagccagctggacttcctgggtcgagtggggacttggagaacttttctgtctagctagaggattgtaaacacaccagtcagcgctgtgtctagctaaaggattgtaaatgcaccaatcagcactctgtaaaaacgcaccaatcagtgctctgtgtccagctaaaggattgtaaacacaccaatcagtactctgtaaaatggatcaatcagcactctgtaaaatggaccaatcagcgctctgtaaaatggaccaatgagcaggatgtgggcagggacaaatgagggaataaaagctggccaccccacccagcagcggcaacctgctcgggtccccttccatgctgtggaacctttgttctttcgctcttcatcataaatcttactgctgctcactctttgggtccgtgccacctttaagagctgcaacactcaccgcaaaggtctgcagcttcattcttgaagttggcgagactaagaacccaccagaaggaaccaattctggacactgggaaggatgttaccttcggacacagtgttgttcacttttttgactgggaaccgacagcagataatacacctttgtatgtaaatgtatactgtcagtatgtacataaaactgaaagaaaaatgtcactgctacatatagtaaagctaagtactattttctcttttaatactaaaaaaaatgcttgtcccctcaaaattgacttcttatcttcttaatttgatatcctggcccacagtgggtcaccactcaagtttagagaagcccattctgcaggactgcctggctgtgcagctggtgctccctccctccctgctgcattttcctctccccctcactgtgggatggggctgaggttgttcccttgggtaagaggctgtccctccctgccttcagcagtttgaagggttctcaggaagacaggcaggcaaggcctgtgagtcctctgccacaggtgccgtagggtgcagttcaaggctgaacccagcatgtcacagcctccctgggtgcaccaggaagaaatggcttattctttgcggtgtgggttttgggagaggctagtgatggttttgctctgaagacgagttttgacttaaagggcttgagcgatggagagggactggccaaagggaaatgtaagttcaaggacacccatgcagaggcaaggaagtcagaacagggtgtgtctcacaagtggcatgggttctcatgccaggtgcatagggtgcttaagggggtgaggatagaagaggagctgaggaggccagggagcccagggtgaaggggtgggggtgtctgccctttgggcagtagggaaccagtggagctgtacctgtctgaaagttctacaacaagagtattgtttcttagatgtttggtttatttga

SEQ ID NO: 1884999 - DNA, 4001 bp, Homo sapiens
taaataattaccatcgccttagccatgatccacggccttgtgccgggggtggactctgaccaccagactggtcctcaccttggccctatgagacctcgctccatttctctgcatttggggaggagacacctcaacccctggctctctgacctcccacacataagcccaacagctctgaaacggaaatgggggcacagagacccaaagcacagaagtcgttcattagtgaatttcggcccatcagggactctatctccaagccaaatgctcctgagcacccagtccctgcctgggacacgctttgccccaactgactgtgtgcctggggcagcctgaagactcaaaggctgctaggagctcccaaactaggggaatcccttgcctgcttcccaccagctggcctgactctctggaaacttccccatttccctgggagccatagagaggtttgaatacttctctccaagagaagaaattttttctctcacaaagggatgggggacagacagaccaacaatccagctagggagacaggaaattctattcccattttctcctccagcttccttgggagtcaaaacaaatatgttcgcataagagaggggaaaaataaatgtgtatgcgtataaatacatacagggtatttaagagagcctaggggagacagaaacagagccctacactcatacaaggtcacatatatccctcccagcagatgactgtgagaatatagaactctgtatatattttgttacagggacataattttgtttccctgtctagacgtttataatgttttaataatcataataatttcaaagtaagagaaccaagaacctgaccttcttttggcttctcttccccagtatctctgagaacaggggtgtatctcctcagtctccataacccctcccccatttattcccccccccccaactccgcccgcaggcaggcaaagaaacctcttttgagaactttctctgtagcaaccagggccagaattgaagaaccaagggggaaaggatgagaggaagctttgcaaagtttcacactgctcagattttcctctaccccattctcctcccctcctccccctggcatcagccaacaacctttccaccaacatagcaatggtgggcacgggcagcctctgttcacccagatgtttccacatagtgcaaagacaggcagctgcctgacagtcacagccacagaaactgaggccttcaggccacagacgactaaacagagaccagagtcaggtttttgccctgatgtttcccagttgcgtgcgtgtgcgtgtgtgaggggttctacttggactttgatggctttcctctaacctaccaacaccccaaacatgtccttcccctggagatggagctatagaaggggaaggggaaagggctgggctggcgctcagagttccccaactcttggaacctccaggtaccccacttttctaaggagaatcttgagccccagtcgactggaggtggtaggtgggagaggctaaccattccagagaccgtcttctctttctgtgctcctctttctgctaataattctgccccaccctgctgcccaactgagctggcccgccaggccacctcttactcaaactcctgaatttccttggaattggctggaccctctttgtctgtctccatcagctgggcccaggagacaatagctgcaggaaagactcctctcccttaatcacagggattgggataggttgagaggacggcataaagcagggttctccagacttgttctgcaaccccactcacagcttgtcctccttggtctgcacccactttgccctatctgggagggggcagtggggcagtcccactggggagggtaggagtgggagaggtgggttggggccctcgacgaaaaccgactgatgtaactcaggcagtttcttgttgccgagttcaaaactcaatcccaacaacatgaaactacctaagccacagatcagctgagcgagcagggcgggagattcagctttgcatctatctggaggagaagggaagggggttggggaaggaagaaattcagccccgtccccctttccgcccccacaacctccctaaggactagagagtagactttgggttgctgggtgggtaaggggtctgactgccttcattagtttctggtctaagcaaattgctcaggaaaaatctggtgaaatgggaccactggcggccaaatacctgccccacccccagcaccgcagtggagctattcccctgcatctggccctggccctgggggaagctggatcttccttccactctggagctgggtcccctgtcttgtccatctggctctcctgcactctcctgctagactccctctgatcctctccctctcagctcggtttaggcttctcagcgaatgtgggtagctgaatcatagccctgtgctctggagccacttccaatcaggccacttgcctggcaaaacgttacagccagggagcacagggaacaagaggctggacgaggctcacatccaaaccagcgaaaagcaggaaaacctaagcttcaagcttcaaccctctgtactcctcctcccccaccaacagacgaccagactgagcaacacctagaccagagtgtcgacttcgaggagacccaaagtgcccgaaaagataaagaagccaaaaaccatcaatttatccctttaactgtggaacccccatggcaatgggcccgggagggaaggagagggagctcccagtcgctgccctccgctgccagcggccactaggaaagcctgggttctcggcaagcacggatgccctaaacaccttcctccaggctctgtccgctgcacgccggacacctggggacaccgctcatccccactccgccgccaagagaagaacaagaaaccgcttctcttaccttgtcgctgcctcctcctcctgctgctcctggcgtttctgttagctgctgtcgaggttgggggggctgagctcctcatgcccctccagcggttaagtttattcctttccttggatgggtggggggctcttggggtgacccccagcagcagtggggtgcgcccagcccagcaccccaggcaatcagatccgtctgctcctcaagattgcagcttgctctctgcctctttccctcctccagtcacctttaaatgcatcttttactgcagcaccacattatatttgcagatcataaaatccacctctcgcgcgcaccaagaccgtcctgacattactgttttatgaccttgacttattgtggtcacctggataatatttaaatcaacgttatggtctctcacttacattaaacccgccaagagacgttctagaaaggctctaggagatgagtcaaacacaaaacacacacatccacacactcagcctcttcgggggaggggtgttgctaaaaatcactaaaaacaaaaaaccatccatttgaggattatgattctggaaatttattaggtttttttttctccattaaggaagctacatgcaaaagatacaacatacagaatatctttaaataacacaactcccagacagggacaggacaatatttgggggggggggcattctgtctttgctttgctatgttctatttttaatttttttgttcctctggatgaaatttctgagatgttactagatgggggatgtgggggtgctaggaggggtgggagaaaagcagaaagcagtacaaatacgagacttcaagcagattcttagagcgactgggaggtaaagacatggagagggtttggtggaggctctgggtgctacgacaaacacacgaacactagccgaactttccaaaacgtctattagtctaaggaggaaatgcagcaaggaaggaacgattctgcctgtgctctgcgagattacagaccctctctggttaatttttttcctttttttcccctacaagcggatggattcgatcttaactttgcatggagaacagaatgctgtgtgt

SEQ ID NO: 1885000 - DNA, 4001 bp, Homo sapiens
aagggtaagaaatgagcctagtcaccaagaactccacccccagaggaagtggatctgcttctccagtttttgaggagccagccaggggtccagcacagccctaccccgccccagtatcatgcgatggtcccccacaccggttccctgaacccctcttggattaaggaagactgaagactagccccttttctggggaattactttcctcctccctgtgttaactggggctgttggggacagtgcgtgatttctcagtgatttcctacagtgttgttccctccctcaaggctgggaggagataaacaccaacccaggaattctcaataaatttttattacttaacctgaagtcaaggcttcacgtgttcatgaactgggtaactggcagcaagcatgcgcacgttcacatgtgcgctcctgggtctgtctttgtgtgtgccagcagggggcgcaaaagaatctggctggggcggctaaggggaagcaaggcctgggctccgaaacaggacccaagctgggaaggctggccctgagttctcgaggcccagctgtgctcttcacacaccctccatttctcccacatcacccatttttttaaggctggacagccatggctttgctgagccagattaaaaatctgatgaccccaacaggagctgcttccttggcagcagggttccttgtggctgtggggagcctgcctgtgcctgttgaggcacttctgtgcccagaagcccagtggatcgcgtggcctgctgtaggccccccagactccatttctcagtcaccaggcgtgaggagctgctagctaacaggcctcccctggggaggtgggcttttcatgcccgcagttccggggccaacagaacaggtgcctgtctgttcagtccacagataagctgacacttatcttcccaagacaggccttcccgaatctcaggcaccagagaaacagagccaccgtttatacctgaatctcccactactgcccatttcccatccctgcggggagacaaggaagatgtggaactcagacaaaacataggtgcaaagtatgtccaggaactgccaaatgcagatagggcagcaggtggatctgaacagagggactgggttaatctgcttcgatttttaagatatttttctctgcttggggttgagtatcatgaaagacaaagcagacgtcgcagccccaatcctgagttgctgggaggctaagatgagataaacaactagacaaaagacaggtcaagtgacttggatcagtcttcctcatgttccccttcacactttatttatttcatgctcccaaggcgggaagacaatggaggtgcctagggaaccagtgtttccacatcttgctgcagctgtaaaggcagccattttgtctccttcccattgttcccctttgcctagtgattcgtcccccatccagaggggtgaaggtcagaggttgttggtcagtagtcctccatggtcttcagggctccctgaaggttactgccgagagaacccacccgggagccatctttaccagacagtgttaggagcttcacaattagaccatccaacactgtactggaagatggacccagggccggccgacagagaactacggtgcgcgctcaccagttgctacaggggaccctggccacaggccaggtgaggtctcttgagagggggcgagccaaccccaagctcaaggtcgactgtgggttctggatccaccaggtgacaaatcgcactgggtgggaggaggggctggggcccattgtgtcccttagtggcagccagccaacaagaaccaccccttgtgcaacgctctcagctcaagacgaggggcttccggggtgcgtgggaagtggggagggggctgcagccagctaagggctggggacctgaggcgatggatgttgctgacacagggacaggggcctccatcattacccggcagtattagagactcccaaccgcacccaaacactgctgggtaagacgagggcccccgcccagcccgcccaccttgggtcaggcagcttcaggcccaggatccctgcggaaaagctgcagatccctggctcccatccccccaccacccgagtccctggggacacttcctggtgagccctgctgcccgccaccagccacaccctgggtcgctgatcacgaggcccaggttgcagtccaagcaggccctccgaagcccctcgaccgtcggcccgccgcctctgagccaccttcccctacccccggcagcctttcccgacccgcgacacacaccgatttacccaccctcatcccccctctgcagtcccaagctcagcccaggacctctcccctggtggcctttacctgtcaccgggcccacctgcccccagagagtgggtgctggggagacgaaggggctttaaggccccagattccacggcctagagcccgccctggcctccgctcttcctccttccttctccgcctgccgggcagccagcgcaggctccttacctgggccccgcctgccaccctgcgcacaggtgtgtcctcctgccataggctgcccccccactgccttaaccccttccctcccagcgccagccacgggcacctcctctaaggcttggccactcctctaggcctcccaccctctcccaggggcctcttttctccaacctgcctagtctcacccctgtctccagaggtacaaaaagcgggggctgtccttgggtcccctccccacagcagatgctgcccccaggactagcccattcctctgtggcctcagaccctgcccacagcggagctgcaggccagagagatccctgaggtcagcgaggggtcagctgggcaggagttgggctgtgccgccccgcagtgcccagcctgtgctgggatcccctgagggaaaggggagggagaaggccccgccaggcctgtgaagggcaggcgggtcccagcaaggtgtcgctagtgtgaagttacccaccgctacccagagaccccagctggcccggagcatcagccttgcccctcgattgaggcctgcagagggaacgatcgcgctccactctccggaccgagctgctcccggacccacctcacagcacagccctcagtggagtccaagtcccaccccaagggcaggtagcccaagggcggttagaggaggtgggacttgcctttgtgcagctgcggcttgtatagaaagggcgttgctgggagaggggacctgggcccgacaggtgattgccccacccgtgccctggagggccacagccccagggagctattgggttgctcaatccctcgctgttctctctcccaggctttgtttgcttccttcttaatacccgcctgcaattatttgatgcttgtgatcggtttgtgaatctgtctccctgaccagcctcctaagttccaggaggtcgggggactgtgaatgcctgtgacgccgggggctctgtaaggatttgctgagtaatgcacgcccagcctctgggctttgggacctgtgctgtctcagcctttccaggagtgggcgccagcacttcctgagggatgactcccaccggctttactccccaggacaccagtgtttcaaataaagaagaaaccccactcctgacatgggggaaggaagaggggacaaaaaacaaagcactcttcacgtcagccagctcttcaaactctgcccaagaggataagggcagcagcggcctggatgaggggaggagctgggcgtgcccgggtgctctgaggagcctgtccctgttcccgccagaggggacgcagccgggctggcctcaggtctgcgcttccggctgttaactactcttcttagttcagatctggaactcagcatcaggggagtgtgatcagggcccccctgagggtggccccagctgcaactccagggtaaggagtgtgggctctggggtcagacagcctgggttcgaatcccagcctcactgttccatagccctgtgaccttgggcaagtgaccaagtt

SEQ ID NO: 1885001 - DNA, 4001 bp, Homo sapiens
cgtccacgctttgaggatttgtcttttccctgcaaccccagcgccgccgacattcattacaggcccaggactgtaactttgtcagaaacaaaccaggcccaacactctgtgtttagaaagagaattttaaaacacagtcaaaagaacggaaatcagttatctgtcctcttcccgggcagggagaaaacctccttccccacaggtttgagactatggctaggtggtgaggaaggcaggctcagcaccccagccttggggagacatagaaaaggcctatcccaggcactcagccggaggcaagcatagcctttgggccacaagacctgatggccactggatgctggtctggaaacaagttctcatcttcccagaaatgtgatcttttgtctgcagcagctggctggagaaggatttcagaaaggtgtgtgcctggagtacccaaaggcatacccttcctttatccttggcataggccttacaacactgaggaaaggccatggtttggcaatggagtcttcaatagtcttcatccctacacaactcagtggctcttagggtgacaggagaggagacaagctaacttgggaagagtcttggtctttcagcttctcccccactgaaacactatacactggggccacagttcatggcaaaacacacacacaaacacacactctctcacagtcaaacacacatctcaacaagttggcggcaggtagctctgggtatcattggtctggcattcgcccactcggcatctaagctgtcctaaagctctttccagttacttcccgctgtttccgggccgtgtggtgaggcactccagcttctactctgtcacgctgatcgtaaaggcacagtgtgggaaagtcccctactgggatggccgtcgcttggaagcagggcaggctaaggggcccgcagctgcccaaggctggtgtagacgtcctctgctccgctcagctcctcaaagattgggatcaggttcagcaactcagtgtctgccatgtcatcaaaccaggactgcacaggcacctggtggggggaagatgtggtgtcaatctcccgactgctgcttccccctccctcgccccagagccctagagggtggctgggtcttcctggaggggtgtacttctctggtggagcccacagttccagtctgcttcctctcccaatccctaccgtggagacgcatcaggagcactcactgcattctcggggtggaatatgtaagaagcaggcgagttgtccaggatgagggtctttctcaggtccctccccaggcggctgaggtccttgacgtagcagccctggtggaacacgcaagactcacggaataggcgggcccggaacaccccacaccggtccagcaggtctgtcacagggtcggcatactaggaggagagaagatgccttagtttggatacactcctggtcctcctgtataaccctagggaccaaaagggagctgctggaccacccccgtggccaccacacccactcctggttcttccctctcacccctaggtaccttggccaggctggcagtgaagagaacacattcaaagagttcccccatgcgtctcaggaactcatccacataaggcctcttgagcacatacacctgaggaagagcagagcagcctgttggaggcatccctgtgatgaaggtttgcagtactgggtaccttcaccagttacacagcagcaaggagctctcaacccctgcagcccagcctcctgggctacctggctggaagcctgcggccccctgagaccccacagacccggagaactggctgtacccctcaccaggcttccaatggatcagtggtcccaacctcaacctggctcaggaagaagcgcacacaccatgtcccaggagccatctctgtttccggcggcggaccatcagctgcctccagaaacaagtaatcaagaataggcctcacagatggaaacagcctatcctggattacttgaatccagccacagcctctatgggagctttctgtccttggctccgacaggacagtctgtccaggtcatgattaggtaatgaattgcaccagggagaagtgactttttcccctcaatgaccatagactagacagacaccctgccgagtcttgctctgcacccgatcttgtgcttgcttctgccagccaccactaacacctttgtccacccttacgatcttgcacattttgggaagtcctttggccacctgaccccccatcggtctgcattctattgcttccatgactctagcctacacagctgctactagaaccatttccaaaaaggtcctttttcttttctttatttacttattttttttagagatggggtcttgctatgtgaggccaggctggttgtgaacttgtgggctcaggcattcctcctgccttggcctcccagagtgttgggatgacaggtgtaagccacggcacctgactcccaaagctcctttacctgcattactcccgagctcaaagagagtcggcctgctgtgactctccctcctagagtaggcctgaactggccaccaactcaccagaccactcagagctctgcaggaaccctctgttctaggcagccacaacttaacttctgttagcctgccattccttcgacctccaacaagccccttcctcatcccagctttcatcaagtctggcatcctttcacccaccttgggcaggtagtgctccctcattttaatctcatccttttaaaaattattcatacccttccttgttagccaggagttcacagtgtatatctgtttgaaaatatgccttcatcttttctacaagggtttagcacatccctataccctcagctagactgtcaaagggctgctggaccaagcctagtcctgaccggggcctggcgctgggcatggcaggccttctgggcaagcaagctgagtaaatggtctttcactagcagtgtcacatgatccttaacctgggactgcctgggctgcaggctggagcctggtctgtttagatttgagtgctctttacattgacagacacacactgagcacttcctcaggcagaatccaatggagggccccagggaaggcagtcagagaaggcttcacagaggaggagatgtctgggctggggaggaagaaagtcactagctattcacagtgggggtggcagggggagcatgggcaagagggcattccgggcagagaaaatggttactactgatttccctgcctgttacaggcaaagagatacctggttaaggtatcttaacaggtatagatacctttcttaaggaacagagaaatgtaataaatcatttaacagtgctggccacgtgaggggatggtggttaacaaacgatagctattattattattaaataaaatgtaaactattcttttaaacagcttggttgcaaagagaaaacaagggagacagctgggtgggatatggggctgaaactctttttttaaggtgagaaagccttgagtgaaagataccaataaaaaggggaggctggagttatagaaaagggatcaactgacagaacccaagccctgagatgggtggaggaccccagtacaggtgaggcagaaggcagaccccccaccctctgggctgggtgtggtctggctggcagctcacctggtgagtggtcccctcaatctctataggcactatgaagtcagcattgttgattggctggaaggcagaaaagttaatgctgtcagcatggtggcaaagaaacatgaggcccccaccatacccctaggtgggtggggagaaacaggtcttaaagactcctggaagtgcctctggccacctcattaaggggttctcaccctagttcaagatgtgataccccattctggttttccctactccttagcacctccactctgacaaattctacctgggctgagagttttggggcctgagtttcctgaggagacaagcaggggcaagggccaaaggtgatccaaccactctttt

SEQ ID NO: 1885002 - DNA, 4001 bp, Homo sapiens
ggtgtggtggtgggcgcctgtagtcccagctactcgggaggttgaggcaggagaatcgcttgaacctgggaggcagaggttgcagtaagccaagattacgccactgcactccagccttggcaaaagagcgagactccatttcaaaaaaaaaaaaaaagaaaaacatagaactgtgtgctcagtgatccaatgaaggggattcccacacagtgatcctccattttccccaggctgccagtgctgcactgatttcacaagctctgaagctctttaatgaagacaaaaggagaggcaaaattgcccagttcctgacttctccagcacactgaggcaagattcctgggaggagagctatgagcaatgatgaggtcatctgaatgaacgccatgcaggcacagcccctcactgagggaaacaaaaaccaagacatagtttaggaatacaagcgtgggtgtcaaaaccctggagttgtgctttccagtgggcctgagacagagacaaagtgacatgatgtttagagagcaagaaagagatcgaaagggaagagggcaagcagtctcaggcttccatggtaggaaataaataatgtccagaagggtctggctctgaagtggaccaaatggctctcctgtcccatgtttatgaggtcatggaccattaagccagccaacctacagatgtcttcataagactttacgagattagactggggagaccctataactcagcaagaaaggaaaacaagaggggagaattgcaggtaagagatggtagaaacaagtgctccgctccagaggcctcacatatcagtgggaggatatctgggtttggtgaccccttcatcttcctcacttctctcttctgtgagtttctgcctatctccattagattcagggctacatcaggcttatattattcgataatttcttgattatccacatactttcctcctcctaacttccaactgacctcacaccatgttcctgacctgcaagccttccatcctcagagaagtttctttggtatttgtgaagcaaatcagaaagataaaatacaaagtttacaaattcacatattttcaaacctgatttagactgcatttgcttgatgtggtattccataagttctaatagccatgagatgactcttccagggatccctaggttgctgaagcctaatatttattctctgaaccattaggagcagagaagagcatggaaaccaggaaaggtacacactgaaccagttaaggaaataagagtaggaaacaggatacgcattatcttatttcctcaggcttgcgccaacctgtggttatttgcagaaagtcagagaccaataatccttagaaaagaagcccatgttctccaagtcttgttgctctttcagaaattgagctgacactccagggcccaaattaaagaaggggcataagacccagatctttaaaccaccactcagaatccatatttgaaaagcaaccatttattagaaccaatacaagagtatgaaaagggggaaaagaggagggtagaagagggggagagaatgaggtctgcatcagatgtcagttatggaaacacataaatgcttactttttaaacatttacatttaaaaggtgaacatatatatagaccacttatactttaaaaaaaaaatcaaaagcagacatgtttggctgaaataaaaccaagaaacacagctaaaactcccccataaacctaaaagtccatggagaattcaatttctcatttccattcagaaatctggctacaaagtgatttgtttgctatttgggacagtacagagtgctgaaagaaacccagctcttgagtctcttagatcccatcctgtaggaagtggtgggaaagccagcggaccatgggcaagtcaactcctggctacttggcagggagtcagactgtgctctctccattccccaggactccacagaaccatctggtactgctagtgctgggtgaacagtgagagcagagtccacaaaacacagagaaccagaatgtgaccgcaaggagccaggaccttgtgctttttcatggattacaaatctagggccaaggagagggaaagcagaaagagccctattgggaagaggagctggctgcgcccctaaactgagatggaaagagtaaggctcttgagcccacacctggccaagtagaaatagtgtccaaagttttctcaaaccagagggaaaaaaggtcaaggttaggttcagactgcagacactaagagatgacagatgttgaatacggtgaatgggatgaagctttaaggatcaatgcccaattctgagtgttatacacatttctaggaaaaataattccaatgtagcttttgggggtggggggtggaaataaggtggtcacatttattcaatcagctggtccctatgaggaaggagaggcccaggtacagataccacaaaggggtacagtgacccagctgtcctgggattggttggggagtggtaagcaatgacataaatcaaaaccattgagggttgctttgatcctgagacagtctgagtctgcttcaaacccatggggaaaggaactttaatccccaacctgcagagagaaatacgcagtagcatccctgcctcacgattccctaatccaatgctcttgaatctgaaatggcctccctctgtgaatgcaagacacagaaaatcccaagtgccttccccaacaacatcctaagtaagtctggactagtaagattccaacattcatgaaaacactgtcaacatctgaactagcagctttgatgaggggtggggggcagaaaatttgccgagtcactaagtagttccagtcttggagacagctcagtgaggaccaaagcctgtgtgtcaggcttaaactctggctcaagacatcctccacagaggaccctgaagtattctattaactttgatttacaatgcctcacaacaacacccctgtgaggtaggtcagtattattaaccccatttgacagatggggaactgaggcattgaaagaagtgacttgcccaaggtcaaccattatcaatcagttgaggaggtgggcacacagagtcagcatccactcgattcttgttccatttcccagagcattttacctctcagagtgtacttgggagcagagggaagttggcaggatacacctcattccacaaactagattaattcaataactgaagggtattaactgagggcctattatttatctagtataatgtgaggaatcttggaaaaatgaactgcttctgaaagtcatgttatagatgttttgaaaataaaattacatctttaacattaaggacatgaattattttgtaaagaaatattcactttatcttaggaggtgaaggactaagtcacactgatttctcagagttttatactgagtaacctgaattcctaaaatccagaaagcaagatcacattccaacagaaacaatgaataagaaccttttccccagtggtggttcttggtagcgctcttataaagctgcaagttggtggcgtgggaatcctagcaccacaaaacaccctcttactacatcacatccctccccacaatacccagagggctgcatttttccaacctttctgcctcagctcaacttcaagagttacagcatcttcaaaaacacctcaagggtaaggatacaaatggtgacccctgcttttctattcagggagaggggatgaaaatattctctgtaactaatcatatagactcttgaattctttcctcctgtgagagatgtaactctttaacaaaaaaaaggtagaagaaaaaacagttatgtcttttctccccctttggatttactttggattctggtagaaatcattatgtctcttatcctaaactgaggaggtgaggggtgagggtgacacgagacaaacaccaaactcaccaccagccctcgtttagaatccaatcctaaagctaccggaaaccagaacactgacttgagccttaa

SEQ ID NO: 1885003 - DNA, 4001 bp, Homo sapiens
caaacgtccaccaacagatgaatggataaaaaaatgtggtaaatacatgcagtggaatattattcagccttaaaatggcaggaaatcctatcacattctacaatatggatgaaccttgaggacattatgttaagtgaaatatgtcagctacaaaaggacaaatcctgtatgattccatttatatgaggtatctaaagtagtgaaattcatagagaaaagtagaatgatggttgccaaggctgtggggaaggggaaaatgggagttgtttaatgggtatagagtcccagatttgcaagatgaaaaaattctgaagatctgtttcacaccaatgtgactggacttaatctcattgaactatacacataaaaatggttaagatagtaaaatttatatgtgtttttaaaaatcacaatttaaaagatgcaaaaaaagagagtactttgcccatccccccaaagactataatctcaagtcttcaggtagggtaggaaatgtactaccctaatatataaaacacaattaatcaaaaagtaaaaatgaaaatacctctgaaagaatattctcaaatgatattttttaaaaatcacagtttaacactcaactaagtgtctggattgaatgtagacttcaaaaacttactacgtaaacaagctataactttttaactcttcacaaattcctattttcagtgttcataatgaacaaggtttaaaaaagtggaaaggctcccaaaatactgagaacatatatgtatataaatcaaggatgggttcactcatttcaagctatgtcaagaagtctatgggatgaagcatgtctgttgtgatggatatagtacagaactaactccacggctgagttcttcagagtgagcctctgtaggctcatagtcctattttaaaggaataacctattgacccaatttgctggtgttataagcttggaggaatagcacaatttcaagttcctttcacaggtggagtttctgattagtctgtggttatttgaaacatggtctacacctactgcagaagccagcattattaaaagcatacattttcattgtgcaccataacttttggatttggggtcgtttcatactttttcagaaatactgtcttctaaattaaacagaaaaacatctatgtgaatatagcgatgcaacagttgtgatatgagaccatgtgatggatcaactaggtcagaatatttgtaaaatccagagtggcaaggaataaaaatagagaaacttactaaaaatcttctacaaaatagtgatgtaaaatgtgacgtattaaccaatttctactgtgtcattctagcttgttttcattaaccatagcagaacttctaaaagtgagctctaaaatgtggcaaatttgataataaattaaggaaaaagtcattagtctccaaaaacaagaattgaaaatcatttggcactgaagccagatggcaaagactaaatgctcttcagaaattatgaacaattattcagttacatgagactgacataacagtgtcaagtagaaaaacatttaagaaaacagaaaccattaaatttgggggagagtttaatttggaggaagaagttgattttggggttttttagggctaagttgcttcagctaaaaatatagaactgataataaacaagaatagctctcttcactggcaataatatctgtatggaatttctattgcgagaaattactataatgccaaaggctgggaagactttgttacccaatgtcatccctctaattttagaaggattaaccaaccaatttttgctaaaatgtaggcacacataccaaaaaatgtgaatcttggtgaatataggatgtctggtaggcctcaggttatcttcagtcttcacactcttgatgttccaggaatgatgcgcgagcttaggttggttctaggataggcccaggggcctggtttgatctgggatccctgggaccatacctagaacaaacccaaacaaaaccaaactccttgggagtgctttcagctcaggtagacttctgggcttttcacccatatggacctccacgactgtaccaggaccatataccaacctttaagggatgggagtgacatttctggagccttctgtacgttgtcagctgatagtactgtgcctgagtaagcattatttaagtcatggtatgaacagaaggtaacagattggtgcaataaaagtgcagaaaatactttgatttagaaatgaagttaatttccttaagaatttacttaaggaaggggaaaaggatatgctttgtttaggatattataaaagagtaaacttataaaagacatgctttagttttagaaaaattcttcaataatattcatttgtaggtagctaagctttaggaaatgatataaaactgaaaaacataaagcctaaaacagtaaaattatcctttaagaaaatcttaggatataaataggagaggaaatatatatatccatagccatatctcacagaatatactgattttaaaggataatgcagtcaagagaatatgcagcttaaatactgtactattgcaataatatgttgctaaatgaagttcaatacatagagataaaactaatttcattgctgacaagctaaaatacattaaaatatataccataaaaaatactatatgcactttaatttatcacacatttcattttccttctttttttttttttttttttttttgagacagagtttcactcttgttgcccaggctggagtgcattggcacaatctcggctcaccaaaacctccgactcccaggttcaagcgattctcctgcctcagcctcctgagtagctgggattacaggcatgaaccaccatatccggctaattttgtatttttagtagagacggggtttctccatgttggtcaggcggttcttgaactcccgacctcaggtgatccgcccacctgggcctcccaaactgctgggattacaggtgtgaaccaccacgcccagcccattttcatttatttatttttgagacaaggtctctcgttctgttgcccaggctggagtgcagtggtgcaatcatggctcactgcagctgtggcctcctgggctcaagtgatcctcctgcctcagcctactgagcagctgggactacaggtgtgtgccaccacatccagctaatttttaagtttttctgtagagaccaagtcttgctgtttcttgcctaagctggtcttgaactcctggcctcaagagatcctcctgcctcagcctctcaaagtgctaggattgtaggtgtgagccactacgtcctagcttatcacacattttagaatatctataaaatcagttcctccttattcatgctaaacttttacatgtgtgaatccttgaatcaattaatcctctttttggtttacagcaattacactgaatagaatcactttcctctcacaactacactcagaagttttcttcttttatcactgacctggctttggtatcttgactatctcttctataatggcagtctcaactcaagaaactggtttggaccacctatcttttttttttttttttgagatgaagtcttactctgtcacccaggctggagtgcaatggcgcaatctcggctcactgtaacctccgcctcccgggttcaagtgattctcctgcctcagcctactgagtagctagaattataggcaggtaccaccaccacgcccggctaatttttgtatttttagtagagacggggtttcaccatgttggtcaggctggtctcgaactcctgacctcgtgatccacctgcctcggcctcccaaagtgctgggattacaggcgtgagccaccgcgcccagcctggaccacttatcttttatgattattataccacagatcccttccattagcatggataactgaatgccgactatgaggcatggtcataaaataaacagactgatttgacagttactttgtaatgaaaacatgagtcaatatatggt

SEQ ID NO: 1885004 - DNA, 4001 bp, Homo sapiens
agggtgctacttcagtaaatataggggacaaagagagacaaagggacttggacactaggaagaaagggaggcaaggggaggtacagagaaaaccaatgttcactcattcttgcaagatgcatttcactgcttattatgtgttgaatatcccattacaacctgaagatatggaaggtaataaggaaaggcccatgtcttcaagaaatgacagagcagagagaaagacagaggaatgtacaactaaatatggtctgaaaagtacaatattctacaaggatcaagaaggaaataggagaaatttttaaggttttttttttttaattggtgcttaaaactgaaatctatgactggactggtctctgatcactgagcagaattttatgtggggctcttatttttcttctttcttcaggttgtaccccacccttttttctttctttttttttttttttttgaaggacttaaaaggcacatcagtaacattggagggcaagtctaagaagtcgggtaaggaatgaaagcatacccaggggagggggtggaaggtagcaggctgttacagacaggacgccctggacatcacagtttcaaggcggtcattatttattttccatgtgaccctacacgtctcagttttctcatctgtaaaatggggatggaactgccttcccctcaagtaggtctgaggctgagagggaatgatgctgatgaaaggtcttagtgaatagctatagctataccaaatatttattttgggactgggtgtgttgactcacacttgtaatcccataactttgggagactgaggcaggaggactgcttgaggccaggagttcgaggctgcggtgagttgtgattgtgccactgcactccagcctgggcaacagagcaagaccctgtctcaaacataatataaatttatttctagagctagctccatacagaatttcaaagaaccttggggcacttgagtactggcatctatttgtatacaaaacaggatgaaacaggataaatcatttctttctcaattttttaattttttttttttgctgggggacaaagaagcttgaacttcttatctatctacctatctatctatctattatttatttatttagggctcacaccaagcattggttcctcagatacaagtcaaagatgaggaaaatggaggcattaaaatatttgaaatctgactacaaaatggctgtgttctaaacgtctttgttccttgaaaattcatgtgttgaaatcctcctcttcagaatggaggtcttaggaggtggtacctttgggaggtgatgaggtcacgggggtggagcctcatgaatgggattagggcccttataaaagggtctagggagattcctctcccctccactgtgagaggacatagggagaagccctgtctatgaaccaggaagccggctctcaccagatagtgaatctgctggtgtcctgatcttggatctctgggctctggaactgcaagaaacaaattcctgttgtttagatgcttcccagtctctggtattttgttagagcaactagaacagactaagacaggtgccaatcataaaatatcaaatttcttcccatgctcagagtgccaccagccatttctccaatggcttgcattttctactctttccagaattagagagggagaggaagtcagctgaagcctgagtcctgttagggccaccttgctgtgtgagtcactgaagtgtggttttgctgctgttgagcattgttggctggtttctgcagatttggtaagccccagtctcattcaaaagccccaaaagtgagacgcgtgtctggtctccttgctcctgttggtctgctaggcttgttctactaggacacctttggacaccttcccatgggcggttcacagaggaagatgctgagctaggggtgtcaggacgcctctagtgaactggaagtagatcccattccttccatttctcaagatgcctcctcatccccagtccccaaagtgaatgactgaagtttctactgctctgcaaaacccaagataggtcaccattttattccattctgattcccccagcagacacaaccacctgattccccttcggaaatattctgcaccaaatgaaatccgagtgaggtcattaattatgaaaattcacaatgcgtaattataataattactctgatcacataaacattataccaccatgaataatttaataggaattgtgcttttgaaaagcatggcaattaaaataaaacccagggaggtgacagagacgatgcgggaaatatatgctccagtttgttcagaggaggctgtgcagtctccagaatgctcactctttgccataaagaatcactctcgaccttaggaggttgggagacaaagaaggcaatgagagacctgagagtttacaaatgggctccactcctgagaagtggagatcaagagttcaaagagaggctgtttttcccctaaataaaacaagttcaatcatctttatctttatcccccagcaaaataaaataaaataaaaaatcctgattgaagaagaaatgattcatcctgtctggacaccaattctcaagtgccccgaggttctttgaaattctgtaaggaggtagctctagaaataaatacaagttttctggcctcccgatgggtggtgtgtacaactaagcaaaacaatcagggtgaagggattacattttgcactaaaaagaagaaataagaccaatttaccctgtgacttttattaaccatgacaaaatcttttttaagtaccttactaagtttgtgaacaagcagcaatttctgcaatgaaacggccccctgagattagggaattaagttatttggaatggttggaaaggagagtttatactgtggagaggtgcaaaatgagaccagagggagtttggacccagtttttaaagaggatcctctgtcctcactgacagcaatccaggagacactacaggttcagatttgcacactccttaccgttcacaaaaagctgaactattatcttgctgtccggctttcaaattttttgaaaatcaaggtctactgtaagaatcacattttacaacacaagttggtgctcgtgcttgcatatacacacacacacatacacatacctacaccaacacacagaaaacacagacctaccatgtgaaatgtgctctattaggaatagaatttctatgctattctgtttatgaaagaaaactgctgacagcaacagtctatcaagttaattccactgtgtcatgatccacagttcttattgtacacttaacagacacttatgaagtgcctcatctaggtactagggtacctaggtactaagtacacttatgaagtacctcatctaggaatttaggtacctaggtactaagtacacttaacagacacttatgaatacctcatctaggaacttaggtacctaggtactaagtacacttaacagacacttatgaatacctcatctaggtactagggtacctaggtactaagtacacttaatagatatttacaaagtacctgctgtgtgcccagcactcatctaggtaccagggtttcagtactggcaacagagacaaaatctatgcccacgaggagcttacattctactggaacaagttagaaaaaaccattgacaaacccatttcttacaactgctgggtgaggaagttgggcagggattgtcaaaaacaggttcaggtggggaagtgtgggcctgtctcccttgtacacagcaggaatctcagggaggccggctttgtttccaaggctttcctctaagttttgcctttcattctgtttgaccacgattcttttgactgcaagaaacagaaagcaaacttgaatgtgcataagaaaaaagtgatattttgtcagaattcagccagaaaaacaaaacaaaacaaaatgctgtagttactggaacagaagggcttaaacataggaattgattacgtagtgaggcaag

SEQ ID NO: 1885005 - DNA, 4001 bp, Homo sapiens
tttttagtagagatggggttttgccacgttggccaggctggtctcaaactcctgaccttaggtgatccgcccgccttggcctcccaaattgttgggactataggcatgagccaccgcgcccagccttacagcatggatttctaaacagagtggctatttgttgctgggacaggtaactgagaggatagatttcattccccagagaagtttaagaaaagaagagcatttagatgtttttagaatttagtagagtctagagccagggagaaaaccagacattctctggagattcatttcagctagagggttctgtgtgtcccatctccctttcagggattaatcagcctctaaaaacagcaagggcacaagattcagtacagaggacctggcttcccaaccaactagttaagtgattcaggcagtttcctcagcaataaaacagaaataatactctctctacctcaaattaaatcatatggatgtgaaagccttttgtaaaatataaacttttaaaatattgaggctgggcatggtggctcatgcctgtaatcccagcactttgggaggctgaggtagcaggattacttgggcccagaagtttgaggttgcagtgagctaggatcgagccactgtactccagactgggtgacagagcaagaccctgtattaaaaaagaaaagggtaatggtatatcttacatagatatagataagtgtataagatatagcttgcttatatcatggcaagatcaatgaaaatatgctttttaaaaaagtaaagtttattatgtaagctcttgggaatcatctcaactgaagccaaccacaaatgcaaggggtctaaccttgatgatctggatttgtttggtcttttgtatacccagaaatccaccatccttctctatgttggtcttggtctttcctgagaaggccagtacctgaaaagtgagcattccaccttccaccccgccatcacatgggagtcttttttttttttttttaaatccccagtctgtttaccactttgtcctaagaatcaaagacttaggaaacttttttttttttttttttttgagacagggtctcactctgtcacccaggctggagtgcagtggcgtgatctcagctcacggcaacctctgcctcccaggctcaagcgattttcctgcctcagcttcctgagtagctggaattacaggcacgcgccaccacacccggctaatttttgtatttttttttagtagagacgaggtttcaccatgctggccaggctggtccttatctcctgacctcaagtgatccaccagcctcggcctcccaaagtgctgggattacaggcgtgagccactgctcccggccaaggaaacttcaagaaggcaaaggcaaggaggcccacccctgggccctcagaggacatggacagggagcggactctgaaaggagctctgggaatggactctgccccctctagcccccagggcctggccgcctacacccagctgcttctcctcactggcctctgccccaggacatggcagccacatcagggacgtggagctgggaagcgtccccccttctcacagaaggtctgtgacagtggagaagattcccaggatctcaggctagaagttggaaggcattttctgagggccacatgattccaccagctggagttttctgttcccattgtacagtccttgatttctgggacacaagatgttcttttaggctttcctgaataacaaagatcacacatacacttgtttatctggggagatgccttcccgttctaaacaactgacttacaaattctctttctgagaacaatgcccattcataagttgggaacattctgtatgagtgacttctggctgggaaggcacagttctcaggagggggaggagttctcaggagacccctgtaaagtgggcctgtgcttagacactcaggtccctgtgtttgctagaaacacttgggcacacacaggtgcctgttccaagccttcctcccaaggaacacacctgcgcatgtgagtcacatgtcccgccaacgtgccacctaaccttcaccctgagctggggagtattgagtaactgtgtcgtcagcaaagtcaccccactgcttgggtaacaccttcagatagtatccaggccaaaacatgttaagaaaaaaaattcactcacagccagaacacttattcctgtttatcttttaacaatgcaagggtagggaaattgtttggaaatcaaaacgtggaagttcgttcatcctcccaactcgtggagttctaaggcagagactggctaagcttttgtgggacctaaaagttatataatcagggtggggcagtttaaataattacaaatacggaattatgaacagggccttagaaggcgagggagaggccctgaaacttgagcttcattcacttaatggaaaatctaactctgattctaggggaagaatctagaagattccatgaaaatacaatgttatagagctttaaatgactttccctaaaatacttttaatacttcttgccttagtggatcctggcttttctttgacagtgtcattcagttgaaaaccctctgggtaaaggctcttcgcctcctggcagccccatgcgggcgggaggtgctgctctcagggtcttcacaccccactgttgcagccctccgcccacccgtctctccagccggaccatcctctctgcattttggtccctgtcctccgcccacccgtctctccagccggaccatcctctctgcattttggtccctgtcctccgcccacccgtctctccagccggaccatcctctctgcattttggtccctgtcctccgcccacccgtctctccagccggaccatcctctctgcattttggtccctgtcctccgcccacccgtctctccagccggaccatcctctctgcattttggtccctgtcctccgcccacccgtctctccagccggaccatcctctctgcattttggtccctgtcctccgcccacccgtctctccagccggaccatcctctctgcattttggtccctgtcctccgcccacccgtctctccagccggaccatcctctctgcattttggtccctgtcctccgcccaccctggggcccttctgcaaagcactgaggttcggggcgcatggacgtcttcctcccagcccctcatccgccagcgagctgagccgcgcccgggcccctgtcaccgcgccaccgctccttcgggacctgaagcctccgtgctcagcgatccccctgcagcccactgcgacccccacccttgctgcgccctccgcctcagcacggccctcccggagctatgtgccctccctgacttcctcttcgcccctcccctgcctggctctcccactgccagtcaccccaaccccgccccagcagcagcctcgagttccctctcccctcgaaggcctcgcggcggactcggagcggggcagggaggaggcgggaggcggcggggggcggggggcggggggaggcgggaggcggcgggaggcggggggcggggccgcagctccgccctcgggaaatggctccgcctccctcgccgggagctgccttcaggggccgtatgcagcgactccccaccccgcgggccatgccagcggacgggcacctccgcgggcgcagagcgagtcacacgtgcatcctctcgcccttcccccgctgcaccgcccgctgtccagccctctcctgttttctcccactgcagagctggctaaagaacactgcagacttgggccaatttgcccctgcccagattcctgattcccggcctcgcggccccaccgctgtcttcctctcccctcccggacttcctgtcgcccccagccccagccctctgtggccgcggcctgctctgcctgagctgcgcctccggaggttccgccgccccttcgcctccccctccccacttcccgcctcccccctcacttcccgcctccccctccccacttcccgcc

SEQ ID NO: 1885006 - DNA, 4001 bp, Homo sapiens
tgcttacctctttatttttatacaatgaattgatgataagtttcatcattctgttaacttcggcttggaaggcaaacttttccgacttctctctaagttctcttatttgtgatgcatttaatccatccaactgaatagcttcttcctctctaaggaaatcagttaggtaagcaaatattgcatggcatagttcccttcaaaactagaggaattatgatgaaagcacaggggcctctgaatattgtcttgggggttaaaatggaaacctttataaaatataactgatataccgtctcattatgttagcacagcagtaggctacctttaacattacactggaaatactcggttcttaaaattgccagaaaaaaaaaaatcccaactttcctctactaaaaagcaaagtcatactcatttatgctccacagtgaggacttcaaaactgtcaataagtcccaagaggccaaattttaaaatattgttcaactgacagaaatcccatttttaaacttactcggtgtacacagttaatgaatacaaatccaactgaaagtatcttctataaagtcttacaaagtttatggtgctagtattctgcaatatagttttcaaaggaattcactcagttttcatcactcctagggacaagttaggaggtatgtatgcacacaactcaccgggtatttaaatacagggtgttagactttatctggacctttggagaagagatacataagaagtgaccgtaactcacaaggttcacacggcttatctgtatacgtaagttcaaatgaacacaaacctctgtactacttcatcatccgtccttgatccttctctacttttacccagatcctcttctactgtaccatccacatcaacttcatcgtcagctctgaccgaccctgaagatttaacacgggcaaactcttcaacatcacacttctccaaggaggatgatcaaatagggaagggtaggggttgcaaaattcagttggtaactaagggaggtggggatgaaagagtgcattccctggtttaaataccaaaggtaaagccaagacagaacatctatttaagttcagatgctgaagtctccagtagatcctgaaatacggaggcagtcaccacttctaaacagtgtgtctccgatcatttataaataacgttaagcagactgataccaggcctcttctacacccacacgtgttgcgcgcaggccgagccaaggcctcccaactgatcaagccaaaacttcggccttcgttagcacaggtcagaatgcaaataggatttatgcaacctctggcgaggggaactgaaattgagcccagaggcatgagaagggggagaaatgttaagaaccgaactccagcaaaactgaatcaaacacgctgacactgccattccgctggccccaggcctcacgctcccgaggccagcatctaagaagggacacgggcttgcgaggagtcggagtctggggaattaggggacgggaaagctgggatggccgaaggttgcggtggccgaaaaagtcctccgggcggggaggggggagggactcgcacagctcccgggggagccagagcctcagagaggccccaccccgaggtcgctgagacctccgggcgagatactattagatctgtagggcagttagatgatgttgctctctttttttatttccagaggaagaagagaataaacgtaattcccttgccctctttcgaggaatggtgacgtcccttggcccaccgcaggccccgggatcccccctcccacgttcaacgcccccaggaccttcgagaagcggccgcgtgtgtggaggggggacgtctgctcctccagaatcactcaccgaaggtcagcaggacgcagcagaggcccagcacccacagggccctcatggcgtgcggccggtgagtctcaagtccccttcgatcgcaggagccgcctccaccccccacccctgggttcggatcctcacacctccagccgcgcggtccgcccactacaccgcaagcaggtcgggccgcttttcacccccacttcccgcgggcgggggacgggaaacatgaacccaccaatcgcgccgcaccacgcacccacggcacccaatgaggattcgtgagggggggcggaagtccaccaatcggagctgtccaggtgcggtgaccgatgcccgaagcgtggctccttccgattggtcagggtttgcagcttttctccaatcaaatggctccgcgggcccctcacacgtgggaccgcccctttgcctgggcggccttggcctctaagggaaaacgtccaatgaatgtaagcagagaacacatccatccttttagagaggtcgcggcggaactacttccggatcctagagagcgtttattccgtgaccggggaaacggtagccatggcaacgtgttcttcaccctttcccatctatgcctggggtttcgttggaagtgattccagcacgactttcgcggccagctttctcgtgtggcggcgcttctcggaaagaagaaacacacgagagaggttgcaaatcccctagaaccctttcagatggcgggggggcgggggggtggcggtggtgagaaactacagctcccggcatgcaacgtcctaggggttcactgcattgaatgctgggggtcgtagtctttggtctctgaggaccagctgcgtagttttggccctttctttcacgttcccccagcgtgtctttgccagagccctgccctgcgtcttagatgttacatctcgttctgattacagtagagatatgtgcctattccaggagtctccattgtacacagcttttagaagcgggcctagaaagccttcatgcctcgggcaaggccgcccggttctggggggtcggtctgagtctgggggctccgcctccggctcaagagcacgagtttccgaatccgcctacaagtgcgtcacttgggcagccggagcgttcacctcctctgtgcctttccgcggccggaatccccaggccttccttatctggtttacagaagaacgtggttgggaccttcccgaccaccttagggaaatcgcgagcagcgctgaggccttcgactccccaataaagtacaaaggcggcggtgacctgacggtcgtagaaccctttctgtgaatcaggtggagagcgtggtcgtaaaagcgggtctagcacagaaaaggaaaacccttagtttaacgagtgcaggaggatgcacctgcagatatttgaaagcaaaacctgtggtgctgcacatgagaacgggattgcagctttgtaacttcatagaaataccctgtctgtgctcagaaggacatataaaacaccaggtgtctttcctgtgagggaagtccctcatgctaaacttgtgcctttggaaatattttctacgtctctttaacctactctatacgttaccccctcgcatacccgcgcccgtctctgacatagacaccccacttccttattgcttcctccaacaaaattgaactttgaatatcttttcagataatcgtccgaattcctgaagacaagttttttagtgacagtctgtcacagtcttttacaacttcccgtatttagtgtgcggatcttggctctgtggttggcgctcacgtgttgtggtggtgccttatttacatctgcccaatttacctacatttgttattagtaagcaaagagtagcttacaaagaatgctttatgtatgcttctgtgctttcatctttttttaaaagagcatactagagtgtgaattacattcagagatttcagttgcatttttgtatattttaactcctttattttttgttttgagagaaaactgagtttcttcacttttttttctgcatttcacagctcaacttcttgaccttttcctccaattctgaataagtaagcaaccagttctgaaactgcaaatgccaccttaactagtgagtggtggggagttggtgctgcacctggagagaactgagaca

SEQ ID NO: 1885007 - DNA, 4001 bp, Homo sapiens
gtcatccagccttgtacagtggtgcgatcacagctcacggcagcctcaatttcccaggctctggtgatcctcctgcttcagcctcctgagtagctaagactgactacgggcatgtgccaccatgcccaactaatttttaaaaatttttttgttaagacagggtctcattatgctgcccagactggtctcaaaactcccgggctcaagcaatctccccaccttggcctccccaaatgctgggattataggtgtgaaccgcagcacccagccaacattttcaaatgataatgattattataatgctatagcaaacaaaagacccccattgatagtaacagcataaactcaaaccttaataaaacagcacatcatgagctgtaatgagcactaaattattttcctgtgaaatggaaaaaaatgttactgtttttcacattcaaaaattaaatcaataaagatggggagagccctaaaactgaatacaaatggaaataaactttatatgatattaataaaaagtaatctcagtttttaattccagtttacagagtatcttaactgtctatactcactggaacgtattctaaggacaaaaagaattgcaaaacatttgaactttaatgagtttgttattggaactagtagtggaactgacgtatgaattcccaaaactatttagtatttactgtgaaacaacaaataaatatattgatgatatttggatgcagggttctcactctgagaaaaggaagctacaaaaagggaatgagggaaagagtggaaagaactcttgaaactgagagtatcactaaaatgctggcttgaaagtatcactaaaaattctttatgtaggccaggcatggtgactcatgcctgtaatcccagcactttgagaggccgaggcaggtggatcacctgaggtcaggagttagagaccagcctgggcaacatggcaaaacctcatctctactaaaaatacaaaaactaactgggagagcggcatctgcctgtaatcccacctactcaggaggccgagggaggagaatcgcttgaaactggaaagtggaggttgtagtgattgcgccattgcactccagcctgggcaacagagcaagactccatctcaaaaaaaaaaaaaaaagtacgtaaaactgtgtgtgcgtgtgtgtgtgtgtgtgcacgcgcgtgtgcataaaaacgctgtctagttctcgtcatagaaataaactagaagcagtgaaccccaatagcaatgagcacactaacacctagatcttggttttgaaattcattccccagaaaggaaccagtgctcttgaaaaaatgtctgatttcagttcactgaaaaaataccaagtatgtggagcatttatgctgttccagaaagcgccctaaaactgatgaggacatgttaaaggacagaaaccagcttaaaggagctagccaaatttggcataatttgagcatccaaatgaaaattatgataatggcttataataaagtgaactttttaaaaaagagtccatggtgatactcagatagcgatattttaaaaaatacatatatatatatatatatatatatatatatatatatatatatatattcaaattggaatatattcaaatatgtatgaatgggttgggacatctcttattttacaaaataatagcagctgataaatgataaaagacagaatttttaaaaatcatcatttgggacacgtcaatgtaataactaattcaggcgctgaactaacaatgaatgctaaaaccagtgggtgaagggccattgggaaataggatattcatagactcaagcattatcctatagcttacttattacagagggaaaaaggcacctttataaagaaatctggtagatatgtccttaatcatatatgaaatctgaaatcaccaataatgggacacaacaacattaatcacattagtgtcccattattggtgatttcagatttcattatttaattatgggacacaacaacattagtgactcctgatttaactcactaaaaaggacaacatgtctatatttaacttcaatataagcaatcagcttacatttagcaatcagctaaatccagattgtgggacattctaccaaaaagcaagctagtgtcttcaacaataaaaacaaagtaaaaggttaaggaagcgttctagattaaagaagggtaaacacacatgacaactaaaggtcatgtcagatccctgacggcattctagtattttgaaaaaggtataaaagacataattgagataagtggaaaactttgaatactgatttttttttcctgagacggagtctcgctctgtcatccagactggagtgcagtggtgctatcttggctcactgcaacctctgcctctcgggttcaagcaattctcatacctcagtctcccaggtagctgggattacagatgctcaccaccatgcccgactaatttttgtatttttagtagagatggggtttcaccatgttggtcaggctgatcttgaactcctgacctcaagtgatctgcccgtctcggcctcccaaagtgctgggattacaggtgtgagccaccacatccggcctgaatatggactttattagataatatcattgtatcaatgctaaatttcttgagtttgaaattttcttgagtattatggttttgcagagacctgtccttgttctatcctgatgtgttacatgtcacaagtctgtactttccttttacatggttcaacaaatgagagataaaacaaatgagataaatggttaaaaattgataatccaggtaaagatctttatgggtgtcatattaatctttcaatttttctgtaggtgtataatttaattttttttaagttaggggagaaaaacaacgcatatgcagggatgtccaatcttctggcttccctgggccacactggaagaagaattgtcttgggccacacataaaatacactaatgttggccaggtgcagtggctcacgcctgtaatctcagcactttgggaggccgaggtgggcagatcacttaaggtcaggagtttgagaccagcctggccaacagggagaaatcccgtctgtactaaaatacaaaaattagccgggtgtggtggcaggcgcctgtaatcccagctactcgggaagctgaggcaggagaatcactcgaacccagggggcagaggttgcagtgagccaagatagtgccactgaactccagcctgggctatagagtgagattccatctcaaacaaaaacaaaacaaaacaaaaaaaacactaacaatagctgatgagctttaaaaaaaaactcaaaaaatctcataacgttttaagaaagtttacgggtttgcgacgcattcaaagtcatcgtgggccatgggttggagaagcttggcatataggatcctaaggactcaacatggaggaaaacagtgaaaagaaaaagtagcatgtggtcagattgttccttgtatatcacttgtgttactgttattaccatgatgatgctggtttcttttttcttctttttctttttctgtaaatttagtttgtatggtcgtaggacactctcacagtaactggatacccaaaggataacagaaatagtctgaaaggaaaaattgcaaattcaccaataaggattacactaaaaatatctatcaggaaattagaggcaatggattcaacaaattctaacgcagttcttctatgtaaatcccttcaatttctcatgtgaatctccactctactttctgcaatcactctactgatccaggccttcatcatctcctgctcagaatactacaatggcctaactcttcagcatttcttctggctctcctagctcaaaatccatcctccacttcactccaattttctgtcacttccctgaagaagtggggactgatttaacatccttttcactcagagaagagtccaaattcctaggcatggaatccaaaggttctttacaatatgcctctc

SEQ ID NO: 1885008 - DNA, 4001 bp, Homo sapiens
aatcctggctattcccgaggctgaggcaaggggatcacttgagcctaacagtttgagaccagcctggacaacacagtgagaccctgtctctttttagaaaaagaagaagaacaacaaaaaaccaaaatcaaggtctctgtaccgtctcctagagattagctgtaaaatgaaatgtatatacataggcagtttatcataacgatgaagagcagatgttggtatctcttaggatctaattatctaattaggatactggttctgacactttgtgtgtgtgactgagtgagaaaactactgagcctgttttcttatctttaaacaatatcttctaggaatatatttctaggaacatgtatgatgactattttatgtgtataccatgaacattttctcataaagacacatttggagatcttttaaatgggactactttttaatgatcagattctgaaaatgttcatttttacagatgtacattcaggcaaaattaccatttgccaacttaattttcaatggctatagcacatctgctaaagaccttcaaaagcaaattgtgaagacaaggaaggactactatatgggatatttcctactcaatgacttcagaatccagtaattacacatattctaccttatctcatactttcaattagaaaattccaaacaagggtcaagtttcaaaaattgcctttatagatatttattccttgctttaaatcttttctggaaagaaatggcttattatttaaaagtccggttcaagggaggccactttctctttaactagcttttagtatacagaaccattttggagttcccatgaatgttcctaagagtgtaggtaagcctagaaaggttcaaaccagtaacattaattcaaccaacttgtcaaagtatgcttcatcgggtgttcatgaccttcttggtgtcagtgtcttttctgtcaaggaggttatataagtcaataaatataacatgcccagaatgtattcagtggctaacaatcactgggaatggcaaaaatggaactttaaaatttacactgctgttttcactgtgataaattatcatatgaggcacttaaatgaacaaacaaaacttggagtaatgaatcaatggctttcccagacaactgccatcttttggcatattaacaaattctgaaaaatactataatggaagaaaaacagataggaaggaaaagggatttttaccttttggtattaatccatatggcaaagagcagaataaaaaaggtacacacacaaaaagatataaggaagtatggattttattagagacttcttaagcttagaaggaacaacaataatacatatatatataaatctatagttgggttgttgtaaaatcctttaacataattgacaaaaattccatatgattaaataccgaaaataaagtactgtgttaaaaaattatagatatttgcacactcatgtttacagcagcattattcacaatagccaagagatggaggcaacccaaacgtccaccaacagatgaatggataaaaaaatgtggtaaatacatgcagtggaatattattcagccttaaaatggcaggaaatcctatcacattctacaatatggatgaaccttgaggacattatgttaagtgaaatatgtcagctacaaaaggacaaatcctgtatgattccatttatatgaggtatctaaagtagtgaaattcatagagaaaagtagaatgatggttgccaaggctgtggggaaggggaaaatgggagttgtttaatgggtatagagtcccagatttgcaagatgaaaaaattctgaagatctgtttcacaccaatgtgactggacttaatctcattgaactatacacataaaaatggttaagatagtaaaatttatatgtgtttttaaaaatcacaatttaaaagatgcaaaaaaagagagtactttgcccatccccccaaagactataatctcaagtcttcaggtagggtaggaaatgtactaccctaatatataaaacacaattaatcaaaaagtaaaaatgaaaatacctctgaaagaatattctcaaatgatattttttaaaaatcacagtttaacactcaactaagtgtctggattgaatgtagacttcaaaaacttactacgtaaacaagctataactttttaactcttcacaaattcctattttcagtgttcataatgaacaaggtttaaaaaagtggaaaggctcccaaaatactgagaacatatatgtatataaatcaaggatgggttcactcatttcaagctatgtcaagaagtctatgggatgaagcatgtctgttgtgatggatatagtacagaactaactccacggctgagttcttcagagtgagcctctgtaggctcatagtcctattttaaaggaataacctattgacccaatttgctggtgttataagcttggaggaatagcacaatttcaagttcctttcacaggtggagtttctgattagtctgtggttatttgaaacatggtctacacctactgcagaagccagcattattaaaagcatacattttcattgtgcaccataacttttggatttggggtcgtttcatactttttcagaaatactgtcttctaaattaaacagaaaaacatctatgtgaatatagcgatgcaacagttgtgatatgagaccatgtgatggatcaactaggtcagaatatttgtaaaatccagagtggcaaggaataaaaatagagaaacttactaaaaatcttctacaaaatagtgatgtaaaatgtgacgtattaaccaatttctactgtgtcattctagcttgttttcattaaccatagcagaacttctaaaagtgagctctaaaatgtggcaaatttgataataaattaaggaaaaagtcattagtctccaaaaacaagaattgaaaatcatttggcactgaagccagatggcaaagactaaatgctcttcagaaattatgaacaattattcagttacatgagactgacataacagtgtcaagtagaaaaacatttaagaaaacagaaaccattaaatttgggggagagtttaatttggaggaagaagttgattttggggttttttagggctaagttgcttcagctaaaaatatagaactgataataaacaagaatagctctcttcactggcaataatatctgtatggaatttctattgcgagaaattactataatgccaaaggctgggaagactttgttacccaatgtcatccctctaattttagaaggattaaccaaccaatttttgctaaaatgtaggcacacataccaaaaaatgtgaatcttggtgaatataggatgtctggtaggcctcaggttatcttcagtcttcacactcttgatgttccaggaatgatgcgcgagcttaggttggttctaggataggcccaggggcctggtttgatctgggatccctgggaccatacctagaacaaacccaaacaaaaccaaactccttgggagtgctttcagctcaggtagacttctgggcttttcacccatatggacctccacgactgtaccaggaccatataccaacctttaagggatgggagtgacatttctggagccttctgtacgttgtcagctgatagtactgtgcctgagtaagcattatttaagtcatggtatgaacagaaggtaacagattggtgcaataaaagtgcagaaaatactttgatttagaaatgaagttaatttccttaagaatttacttaaggaaggggaaaaggatatgctttgtttaggatattataaaagagtaaacttataaaagacatgctttagttttagaaaaattcttcaataatattcatttgtaggtagctaagctttaggaaatgatataaaactgaaaaacataaagcctaaaacagtaaaattatcctttaagaaaatcttaggatataaataggagaggaaatatatatatccatagccatatctcacaga

SEQ ID NO: 1885009 - DNA, 4001 bp, Homo sapiens
atcgagaccatcctggccaacatgatgaaaccccatctctactaaaaatacaaaaattagccaagtgtagtggcacatgcctgtagtcccagctacttgggaggctgaggcaggagaatcgcttgaaccctggaggcagaggctgcagtgagccgagatcacgccactgcactccagcctgacaacacagctagactcaatctcaaaaaaaaaaaaaaaaaaaaaagaagaagaagaaaaaggggacagcactggccaggcacagtggctcacactgtaatcccagcactttgggaggccaacgtgggtggatcacctgaggtcaggagttcgagaccagcctggccaacatggtgaacctttgtatctactaaaaatacaaaaattagctgggcatggtgtcaggtgcctgtagtcccagctactaaggaggctgaggcaggagaattgcttgaacctgggaggcagagattgaagtgagctgagattttgccaccgcactccagcctgggtgacagagcgagaatccgtctcaataaaagaaaaaagaaaagaaaggggacagcaataatatgtcagcttcatttgggttgttggaaggatccagaaggtttagagtgcttagcacgtgtaaggaacaaggatgagaaggttatggcacagactcgaggccagactgcgcaggtctgaccctgaatttaccttcaccagctgcctggctttgggtgagccttttaacctctctgtgcctcagtttcctcatttgtaaaataagataataaaatttacctcttaggatgttataaggcagaagttctgaaactttttggcctcagagcccctttacactaaaacaatatttaaagagtttttgtttgtttgtttgtttttgtttttttttgtttgtttttttgagacagagtctcactctgttgcccaggctggagtgaagaggcatgaccttggctcactgcaacctccgtctcctgagttcaaggaattctcgtgcctcagcctccctagtagctcgtattacaggcacgggccacacaccggctaatttttatatttttagtagagacaggatttcaccatgttgggcaggctggtctcaaactcccgatctgaggtgatccgcccacctcagcctcccaaagtgctaggattacaggcgtaagccactgtgtctagccttgaaagagcttttgttaggtgagttatatctgctcatatctactgtaaatagaaatttataatcccagctaactcaggaggctgaagtgggaggaccgcttgagcccaggagtttgaggctgcagtgagctacgatcgcaccactgcactaccttgggcaacagaactagaccctgaaaagaaagaaagaaagaaagagagagagagggagggagggagggagggagggagggagggagggagagagaaagagagagaaaggaaagaaagaaagaaagaaagaaagaaagaaagaaagaaagagaaaggaaaggaaaggaaaggaagaaagaaaggggaggggaggggagggaagggaagaagaagaaaaagaaaagaaaagaaaagaaatttaaactgatgctttaaaaaatattaattaaaaaatagtccgggaggatggcttatgcctgtaatcccagcactttgggaggctgaggcaggcagattgcctgaggtcaggagttcgagatcagtctggctaacatggtgaaaccccctctctactaaaaatacaaaaaaatcggccaggcatggtggcatgcgcctgtaatcctagctacttgggggctgaggcagggaaattgcttgaacctgggaggtcgaagctgcagcgagctgagatcgagccactgcactctagcctggcgacagagggagactctgtctccaaaaaaaaaaaaaaaaattagtaaacacattacacgttaacataaatttttttaactttttatttttttagaaacagtctacctacattgctcaggctagactagaactcttgaactcaagggatcctcccactggagtagctggaactacaggctcacgccaccgtgctagataacgtatgagtttttttgttgtttttgagacagggtctccctatgtcacccaggttggagtgcagtggtgtaatcacagctcactgcaacctctgctccctgggactcaagtcatccttccacctcagtctcccgagtagctgggactacaggcacttgccaccagagtcgggtaatttttatttaattaattaattaatttatttatttatttattttgagacagagtctcgctttgtcacccaggctggagtgcagtggcacgatctcgatctcagctcactgcaacctctgcctcccgggttcaagtgatcctcctgcctcagcctcctgagtagctgggattacaggcgcctgccaccacgcctggctaatttttttttttttttgtatttttagtagagatgaggtttcaccatgttggccaggctgatcttgaactcctgacctcaactgatctgccccccttggcctcccaaagtgctgggattacaggcataagtcactgcaaccagacttttttttaaatagagacggggttttgccatgctgcccaggctggtctcgaaatcttgggctcaagtgatcctccagccctggcctcccaaagtgctaggattacaagcatgagccactgtggccaggagtatttatttttattttttatttttctgagacagagtttcgctctgtcgcccagtttggagcatagtggtgtgatctcaactcactgcaacctctgcctcccaggctcaagggatcttcccacctcagcctcccaaatacctgggactacaggctctcaccaccacgtctggctaatttttttattttacttttttttttttcttttttttttttgagacggagtttcgctcttgttgcccaagctggagtgcagtggcacgatcttggctcactgcaacctctgcctcccaggctcaaatgattctcgcgcctcagcctcttgagtagctgggattacaggcacatgccaccatgtctggctaatttttgtatttttagtagaggcgtggtttcaccatgttggccaggctggtctcgaactcctgagctctagaaattttcccacctcggcctcccaaagtgctgggattacaggcgtgagccaccccgcctggccttaatttttttttttttactatttatttatttatttattgtattatattattattttgagatggagtcttgctctgtcacccagcctgcagtgcagtggcgcgatttcggcttgctgcaacctccgcctcccgggtttaagcaactctctgcctcagcctcctgagtagctgggattacaggcatgcgccaccatgcccggctaatttttgtatttttagtagagacggggtttcaccaccttggctaggctggtcttgaactcctgacctcgtccacctcagtctcccaaagtgctgggattacaggcgtgagccaccgcgcccggccaacttttagatttttaatcaatacgtgccacgttggggtgcgctttatggctacaagggcattaagatttcttccctcaaggagccaagatctgacggtggaaacctacctgcaaccacacggtgaaaactcaggatgctaagagcaatcctgatggggcaagcaggggactgtgagtttgcaagggggtccttaactcctgcgtggggggcggggagggtggatggggttctgggttcaggaaacgttctcccgggagtgggagggggtctgatggacaagtggatttggccagcccaaatggacagggggccttgggacaagagaactcgtggtgctggaatgccaagcgggcttcgctctactgtgaagtggcgttcatgtcacaaggagccagtgatggatgtggctcggggaggcgcgccctggggctccggggatccagcattc

SEQ ID NO: 1885010 - DNA, 4001 bp, Homo sapiens
gattgcttgaggtcagaagttcgagaccaccctggccaacatggttaaaccctgtctctactaaaaatacaaaaattagccagctgtggtggtgcatgcctgtagtcccagctatttgggaggctgaggcaggagaattgcttgaacccgggaggcggaggttgcagtgagttgagatcataccactgcactccagcccgagcgacagagtgaaactctgtttcaacaacaacaacaacaacaaaaaagtataaacagctaaaagagacagtttttggtaaaccagcacattgatcacgctctgaatggccttcaatgaactgatttaaagagcctgtgaaacccacccaagactacaaagctagtacgtaaaatggttgaaattcaaactcatatagtctgggtctagaagctgagtgtttagcctctaggtgtagaggtgtcatcaaaggagggggaagtaggaaagaaggaagggtcaaaagatgcaatggagaaaggacacatttccaagggtcccatcatagagtctcttcctggctgcctctagcctcagttccacaaggtggcagggcctgcctccttctccccatccaaatgcctctggctacattcaaagcccagcagggagcagtcattggtttccccatcacacacagtctcaggcttgcctaccagaggacataataaatatctccaggtatgtaattttgcccacaataaaaacaacctttttcaatattgtgcaggcatcttagttttttattgtgaatcttctcattccagaatgcgatttgggatctgcctaggaaagtacatttcctgaaagaagaccaaattttcctacaaagaagagaaaactcttgggagatttaaaataacaatttgtccagcctgaactccccttttcatgttggacctgaggaatactgtaaaccagggtcagcaaactttttctgtaaagaattagataatacatgttttaggttttgtgggcccattcaacctgtcatgactactcaactctgccacataactctgctatcgtattgtgacagagtaaatatgtatgggtatgcccatggattccaatgaagctttatggacactgaaatattaatttcacaggattttcatgtgtcaggaaatttttgatttctttcaaccacttaaaaatgtaaaaactattcttagctctcaggccatacaaaaaacaactggcaggctgggtttgactcctcacagcttgccaacccctggtggaaatcaacccacttagaggaaatctgaagggtagaaacaactaaaaaattgaaaattcctgttaatgttagcaatgtcaaaaatccaggagaccccagctactcaggagaccaaggcaggaagattgcttgagcccaggagttccaggccagcctgggcaacatagaagaccccatctctaaaaaaaacaaaacagaaaaagaaaaatccaggagcttgttttgttttgtttttgttttgagacagagtctcgctctgttgcccaggctggagtgcagcggcgtgatctcggctcactgaaacctctgcctcccgggttcaagcaattatcctgcctcagcctcctgagtagctgggattacgggcatgcacaccacgcccggctaatttttgtattttcagtagagacagggtttcaccatgttggccaggctggtctccaactcctgacctcaggtgatccgcccacctcggcctcccaaagtgctgggattacaggggtgagccaccgcgccctgccgaggagcttaagcgatcagttagtcaaagggagaaaagagggtatcagtagatgacagaaaaattttttagagaacaaatttttagacatccgtcaacttagagaaagtagaaaactgtctataataaactgaaatatttgggactgatcttgatgtctgccaaggttttggcagacatcaagatcagtcccaaatatttcagtttattataaacaaagactaataagtcgtctctactattggaggaaaaaaaaaaaaaagaccgaaatgcaaaaattcctgaaaatgagtaaatagggcaaagataaaatactataaatgtctctctcagttcacaagaccttatcctgggcagtcaacgtccagttagaaataacgtctgaaaattcagtaagagaaaaggaagtcttcttctgtaatactcagtaaataatgtttaaaattaacatagcaataatattatctgggaatatgatagtaaatagcccctccaaaaaactgaaaaagttgaaagcagttttcctggagacaggaagtggtgaggcagataaattatgtttttccttattggtatataacactttaaactgtgtacatgtgtgactttaatagaagtgtttaaagattaaatttaagaaaataaaaagtgtgagcaagaactccatttctatggcaacccgcgcggcagccgcctctttgttctggagcggcggccacgccccctccagtgtgaaaggctgcgtttccggcccgtggggctccaatcaaaatgggacgcctgctggcggtaacgacaggccggggccccgccccccgaagtagggcgtgtggcgtcacttccggcttccttcagtccgctggtcccgagcacgagctgtgaggggattcacttgtgtgcggaactcctcggaaccatggtgagcctgactcccctgcctcttgccctacccctgctccgccgtgctcttgccaccccactgcttcctctgtcctgctagggtcgtaggctccgtttctgtctccccggccctccgcacatggtgcgagccatgcgcggggcgtgcggcctgcgccaggccagccggtggagctcaccacgagggggaggggtggaccgcaaagccagcgtctccttgtgcctaggtctttgcatagtcccggcagcccaggtccgcgcctcacccggagcgaagaaatttctagtgtgggacccgctccgccctccttctaggggcggagcctggagcgacggggtctgagccatcagagggtggaggggccgcagccttccgagggtggaagatggaggccgcgttccctcgcccgcccggcaggcgtcaccttgatggcctgcaacccctccctgcctcattcttagttcaagatcgtctttagtctcgctgtacgtaactgtcaatctcgctggtgtataatttatactcccgggggccttgtaaatccgaaaagccatgtcgctctcctacaagtccctctctcccacttaaatgctttctccgatgatggaagcttcatttgattgaaaacattgttgtaaatgagttttctcttagatgtccacttgtaagactagtggaaggcacctcagtgtatgtgttagagtattggtacttaaacggaatgcctcttggttttccttttcaggcgtccctttcccttgcacctgttaacatctttaaggcaggagctgatgaagagagagcagagacagctcgtctggtaagccttgttctaagcattgttttaaagataaaactggaggccaggcgcggtggcttactcctgtaatcccagtactttgggaggccgaggtaggcggatgaactgaggtcaggagttcgagaccagcctggccaacatggtaaaaccccgtttctactagaaatacaaaaattagccgggcgtggtgatgggcacctgtaatcccagctactcgggaggctgaggcaggaggatcgcttgaacccaggaggcggaggttgcagtgagctgagatcgcgccattgcactccagcctgggcgacagagcgacactctgcctcaaaaaaaaaaaaaagtaaataaagataaaactgtacttgaagactgtaaagttgattctgataatctccttggtttttactccagacttcttttattggtgccatcgccattggagacttggtaaagagcaccttgggacccaaaggcatggtaaga

SEQ ID NO: 1885011 - DNA, 4001 bp, Homo sapiens
atcaactttacagtcttcaagtacagttttatctttatttacttttttttttttttgaggcagagtgtcgctctgtcgcccaggctggagtgcaatggcgcgatctcagctcactgcaacctccgcctcctgggttcaagcgatcctcctgcctcagcctcccgagtagctgggattacaggtgcccatcaccacgcccggctaatttttgtatttctagtagaaacggggttttaccatgttggccaggctggtctcgaactcctgacctcagttcatccgcctacctcggcctcccaaagtactgggattacaggagtaagccaccgcgcctggcctccagttttatctttaaaacaatgcttagaacaaggcttaccagacgagctgtctctgctctctcttcatcagctcctgccttaaagatgttaacaggtgcaagggaaagggacgcctgaaaaggaaaaccaagaggcattccgtttaagtaccaatactctaacacatacactgaggtgccttccactagtcttacaagtggacatctaagagaaaactcatttacaacaatgttttcaatcaaatgaagcttccatcatcggagaaagcatttaagtgggagagagggacttgtaggagagcgacatggcttttcggatttacaaggcccccgggagtataaattatacaccagcgagattgacagttacgtacagcgagactaaagacgatcttgaactaagaatgaggcagggaggggttgcaggccatcaaggtgacgcctgccgggcgggcgagggaacgcggcctccatcttccaccctcggaaggctgcggcccctccaccctctgatggctcagaccccgtcgctccaggctccgcccctagaaggagggcggagcgggtcccacactagaaatttcttcgctccgggtgaggcgcggacctgggctgccgggactatgcaaagacctaggcacaaggagacgctggctttgcggtccacccctccccctcgtggtgagctccaccggctggcctggcgcaggccgcacgccccgcgcatggctcgcaccatgtgcggagggccggggagacagaaacggagcctacgaccctagcaggacagaggaagcagtggggtggcaagagcacggcggagcaggggtagggcaagaggcaggggagtcaggctcaccatggttccgaggagttccgcacacaagtgaatcccctcacagctcgtgctcgggaccagcggactgaaggaagccggaagtgacgccacacgccctacttcggggggcggggccccggcctgtcgttaccgccagcaggcgtcccattttgattggagccccacgggccggaaacgcagcctttcacactggagggggcgtggccgccgctccagaacaaagaggcggctgccgcgcgggttgccatagaaatggagttcttgctcacactttttattttcttaaatttaatctttaaacacttctattaaagtcacacatgtacacagtttaaagtgttatataccaataaggaaaaacataatttatctgcctcaccacttcctgtctccaggaaaactgctttcaactttttcagttttttggaggggctatttactatcatattcccagataatattattgctatgttaattttaaacattatttactgagtattacagaagaagacttccttttctcttactgaattttcagacgttatttctaactggacgttgactgcccaggataaggtcttgtgaactgagagagacatttatagtattttatctttgccctatttactcattttcaggaatttttgcatttcggtcttttttttttttttcctccaatagtagagacgacttattagtctttgtttataataaactgaaatatttgggactgatcttgatgtctgccaaaaccttggcagacatcaagatcagtcccaaatatttcagtttattatagacagttttctactttctctaagttgacggatgtctaaaaatttgttctctaaaaaatttttctgtcatctactgataccctcttttctccctttgactaactgatcgcttaagctcctcggcagggcgcggtggctcacccctgtaatcccagcactttgggaggccgaggtgggcggatcacctgaggtcaggagttggagaccagcctggccaacatggtgaaaccctgtctctactgaaaatacaaaaattagccgggcgtggtgtgcatgcccgtaatcccagctactcaggaggctgaggcaggataattgcttgaacccgggaggcagaggtttcagtgagccgagatcacgccgctgcactccagcctgggcaacagagcgagactctgtctcaaaacaaaaacaaaacaaaacaagctcctggatttttctttttctgttttgttttttttagagatggggtcttctatgttgcccaggctggcctggaactcctgggctcaagcaatcttcctgccttggtctcctgagtagctggggtctcctggatttttgacattgctaacattaacaggaattttcaattttttagttgtttctacccttcagatttcctctaagtgggttgatttccaccaggggttggcaagctgtgaggagtcaaacccagcctgccagttgttttttgtatggcctgagagctaagaatagtttttacatttttaagtggttgaaagaaatcaaaaatttcctgacacatgaaaatcctgtgaaattaatatttcagtgtccataaagcttcattggaatccatgggcatacccatacatatttactctgtcacaatacgatagcagagttatgtggcagagttgagtagtcatgacaggttgaatgggcccacaaaacctaaaacatgtattatctaattctttacagaaaaagtttgctgaccctggtttacagtattcctcaggtccaacatgaaaaggggagttcaggctggacaaattgttattttaaatctcccaagagttttctcttctttgtaggaaaatttggtcttctttcaggaaatgtactttcctaggcagatcccaaatcgcattctggaatgagaagattcacaataaaaaactaagatgcctgcacaatattgaaaaaggttgtttttattgtgggcaaaattacatacctggagatatttattatgtcctctggtaggcaagcctgagactgtgtgtgatggggaaaccaatgactgctccctgctgggctttgaatgtagccagaggcatttggatggggagaaggaggcaggccctgccaccttgtggaactgaggctagaggcagccaggaagagactctatgatgggacccttggaaatgtgtcctttctccattgcatcttttgacccttccttctttcctacttccccctcctttgatgacacctctacacctagaggctaaacactcagcttctagacccagactatatgagtttgaatttcaaccattttacgtactagctttgtagtcttgggtgggtttcacaggctctttaaatcagttcattgaaggccattcagagcgtgatcaatgtgctggtttaccaaaaactgtctcttttagctgtttatacttttttgttgttgttgttgttgttgaaacagagtttcactctgtcgctcgggctggagtgcagtggtatgatctcaactcactgcaacctccgcctcccgggttcaagcaattctcctgcctcagcctcccaaatagctgggactacaggcatgcaccaccacagctggctaatttttgtatttttagtagagacagggtttaaccatgttggccagggtggtctcgaacttctgacctcaagcaatctgcccacctcagtctcccaaagtgctgggattacaggcatgagccaccacacctatatatatattttttaattgagacagggtcttactctgtcacccagg

SEQ ID NO: 1885012 - DNA, 4001 bp, Homo sapiens
gaaatgggacatgtcacagcttacagatgtttgggactgatagagaccaagcaaataggcagtcccaaatgttgacccgatatcctcccaccaatcaggccttcaggagctttacaaaacattcagcacgcttgtattcacaactgacttttcaggagcctcgaaacagtgaggtgaaaatagggttcagcctaacctgtcattcatgccattatcaaacttaagttttccaacttcccattccttccctcacccagtccctcccacagggacaattcagagccattaaaaccattcccaaatctctctctccttactggagaccctataagcaaattcactgaagaatactgagggatttggggttgatttgatttgagaataatctgaacctatatcatagccattcccgtgttggcctctcctactccagctcctcaaagcaagagcccctcccgacgcccagcctgtagaaggtggttgtagaactaaagtgaattaaacttggcatatgaaggtcaagggagtaaatctaagaattacgtgaatgtgcttggtatagcttgggaaaagatgcagcttcatccaagagccgtgagatttactgacatggaagccttccagtggggactctaatactcagctttgaagaatatagtgtatacattaaaatatttaccggccaggagaagaactgggtcaccaaatggagtcccccaaaccaatggccccagcagccaacccattccctcttttagagaattctggcccatctgcagaaacatgcccagacagcatgcctacttccgaaagtataagatccctgtccaagtacaaatcagttgtcaacctgacaggttagtgcaccatcaggcacatctaagacaaaaagggccctttagagaccacctagtccaatgactttcacagaaggaaagagaatgaatctacgtggttagggaaagtatcctcaaaactgattctgactgagcaagagaaatggcaggacgcaaagtgctataatctggatgtttgtgtccccactaaaattcatgttaaaatattaacccccaagataatcattttagagggtggggactttggaaggtgatttggtcatgggggtagagccctcttaaatggaattagtgcccttataaaagacgtcccaaaaaagaccacttaccccctccaccatgtgaggacatagcaagaagggactgtctatgaaccagaaagcagggcctcaccagacaccaaatctgccaatgctttggtcttggacttcccagcctccagaactgtgaggaataaatttctgttgtgtataagccacccagtttatggtattttgttgtagcaccctgaacagattaagacacaaacctcaaacataatcctcctggccagtggggtatgctgcccacccactgagagcatgagagacgggaagggagaagagagaaagggagagtaagggagagaaggggaagggaggagaggagatgggaggggagaggaggggagaagaggggaggggaggggaggaggtgccaggtattaaaagattaaaccacctcatccctaaccccattttgcaggtaaagaaatggacgtgcaggatagaaggtgatctgtccaaggacacactgctggctataggccgagttgcagctaaaatgaagatctcctgattcctggcctcatccctttctctttttgcatgtgatttacatacaaatatatatagaaaaccgagacaagttttattttaaaagtactatccttactatgtgtgacaaactaacattttctattgttcttttatgaactactagtcacaactcattaaatccattttacaacacacccgtgggtcatggtgcatgctttgaaaacgtctgactcagatatctggaaagagtcaagtcaaggccagaagtcccacaggtgtgctttccagccctgctgtgggacctctggccttgacttgactcttcctttaagttcaatttgagggtgcttatgaatggaatatgttaaacattgataaagagaactcatggcttccacagctaaaatttccctcccacaatgttcaccatcacagtggatgccaccatcatgcccctagctgtgaccaaacagtgaggaattttcttaaattcccttttctgtctgctatgccccacccatcagcatgtctctgtcctcaccgccctggtacaagccatcatcgccttccccttgggctatgacaaaaacctcttaactggtatccctgctgccaccctggcctccctactctattctctaccagcggccagaataatcttctagaaacgtaaatcagatcataacagccttcctgctccaaagacctgccaccatcttagaacaaaatccaaagtctttccacggcccagaggccccccatgatatagccccgcctgcctctgcccctcctccaccatactggtcatcttgctctttctccaaaaaaccaagcatgagcctcagggcctttgcactcactgctctgtcagcctggagtccctctcccaacaccaacaactgttctcttctttactctgccctctgaccgcatcatcaggtccccagagagagcttccctggacacactgtctcccatggcctcacttcctctctctcctgttcctcccattctttgctatattcttttttttttttaagacagggtctcgttctctcacccaggctggagtaaagtggtgcgatattggctcactgcaacccccacctcccatgttcgagcaattcttgtgcctcagcctcccaagtagctgggattacaggcgtgtgccaccatgtccagctaatttttggcatttttaagtacacagggtttcaccatgttggccaggctggtcttgaactcctggcttcaagtgatctgcccgcctcagtctcccaaagtgctgggattacaggcatgagccactgcgccccgcctgccatatgcttcttcaaggcattgattctctcctgtctttttatcttaaatgctttattggctgttgtctgttgccaccacgagaccctaagtttcatgagcaaaaggacttggactgtcttgtctatcacaatatcctcggttcctaaaaggggcctaaattcagggctgaatgaataaatgaatgaatggaagtgcctttcccaaaagacaggaaactaaaccgttttgaaatacagtcaccccagtccaaggtcttctaaactttcctgataagagtcatccgaggtacttatttaaaaaacatatattcccagcccttctgaatcagattctcctacaaaggggcctgggaagcttcaagcttgatgagcaccccaggggatttgtatcttggaagagtctggggatgctggatcagctagacatgaggaacaggtgcgcacatagacagcgcacgtgcaggccatctggagaagaggagggggagaaactgtgccagatggggccaacgaggccaggggcctgggtgtaggtacttacaagggtcatgcggcacctaatagccaagggacgggccagctagggtgaggcatcttcatttatttatttatttatttatttaattttgagacagagtctcgctttgttgcccaggctggagtgcagtggcgccatcttggctcactgcagcctcctcctcccggattcaagcaattctcctgcctcagcctcccgagtagctgggattacaggcatgtgccaccacgcccagctaatttttgtattttcgtagagacggggtttcaccatgttgaccacgctggtcttgaactcctgacctcaggtgatccgcctgcctcagcctcccaaagtgctgggaactttaagtcatcccagaaaaggatttgaggccaaaccgaaaaagcattcatttgattctgtagtcaaaccagaacccttgaataagttcttcaaggcaagaaataatacaactgcagttttg

SEQ ID NO: 1885013 - DNA, 4001 bp, Homo sapiens
gcttttccacttttctcttttcttggtgtttaacgctgtgcttccacactcgattttatgagttcttgtaatttccccagtcttattactagcccctgtctaagaaagccctccaagtggaagagatgattgacttatcattcatgtattccattcccccaagtataaagggatatctatcatagttatttatggcacttatgtgtgtgcattgtcctaccctcaccaccctccttacaccgtctaaattctacattcttacataccattttgtgcaaacattgccaataattgtgcccttctttcactttattatcctctccttgcaaaactctcatcaagtttagttgtattcgctggtactctgaacctggacatggctcactgtctcagtttaaagtcataaacattagtttcgagaccgacgttgctaaaaaccaaattctagtttcattattgacacttttctttctctcataacatatatctgatcagctatcaaattattttactttaatttcaaaacatatcaaatttggctttcaatatccaaaatgatcccctgattcaatccactctcatcttttgatgggatgatctttaaagctccttaactagtctctctgcttcatctctttaaccccattagcagattttaagtccagacgtcagttataatttttaagcctaagtagacttatgtcccttcttttttgaaatattcatatggccttcatctcacaaattaaaaaaggtgaaagtttctgcaagagcctaaaggtaacatgtaacctggagcccaatacttttttgaacaaatatgcaaatactctaactttctttccttctttccaaccactcactttcacattgctcctcaaacaagccaagcatgctcttgcctcagagtctttgtacttgcctgctcttcctggggtacctgatacccttgagtaatgcttgccaatctttggtcaaatgtcactttctcaaagagtccttctaagatcactcaaattaagatagtaaccctttttctgattcctaatcatcaattcccatattactcctgagttttcctcttgcttgtagtattttaaagtttctatcattagtatctatagttacttatatatagtatctatatatactatagagagagacattggaatagaggtaaacttatttattctgtctattgtatgtctctcctgtcagtggaataaaagtttcatgatagcaagaatctttacatgtccggagcacagcaaatactcaataaataattatgaattaattaatcaaggtataactactgatagggctcttataaaatattcttaaagctttttacaagttctaacaatctaagacacaattgacattatattagtgacttgttaaagattccttgcaaggacaaatgcaaagattgaagtatatatgaatgactgaagaggtagaaaatgcaaataatgtttgaaatatgaaaaaatacatgttaataaaataattcaaagtgcagacattttataagcagatgatatgtaatactttcaagaccaatataaagctaagtggaaaacaacaacatagtctgaatttggtgaaaaatacgggccaaaatactgatgggttacaattggtccatcatggctttggcttgtcatgatcctaggatattagctgagaaggcagcttgtgatttcttcaggaagctactctaacttacgagatgtatgtgtatgcctgtgtatgtatgtgtgtttaaacaaggagtgggcaatttattgcaaagtgaaatggataattttgcacttttgttattaggttaagaggccaaatctagtccactttttagaaatacctcctctcgtttcatgttgtttaagctttcttcttaatgttttggcaggggtacggaaaggctgtagtcaaatttgtcatagtttgatattaaaatatgggtgcattaaccttacaatgaccttttccctgaacttattcctagaaaaaaagatgctgcatcttttgtaagtaacttcaaggcaagatatcatacagcattcaaatataagcttttatccagttaatcatcaagcattacctactttcatcaatgttcaggagcttaattccaggattacttattccaaaaaaaagctaaatacaaaaatcagaagcacagacccaaacaatagaacttttataccatgataattagaaaaggaacctattacccaggattataattagtgactaacatattaaatgacctttaacatttaccttaagccctggatttctggaaaaccagcaaggttatgaatgccatattagtgatctttaatctttattactgctgtggacagaattttaatgatttttaaataggcagtggtcactaacatatccctattaaaataaaaaaaaactcataaaaaattaaatggattaagacttcaaatgtaccatcatcaaaagtattatctaattatggagttcagtgaacaggccaagtgaaatggttggtaatattagttacttgccacatgggaatgcccaggatttatgcacaaatagattctgcttctgttgcaacacagtaattaagaatttgtcagggaaatttgaccctctagggtagaaattactttgtaaaataagaatggcagagcactagtctccttgctgcacataatttaacttgattatttatacatcaaagagagtctgcagtgactgcagtataatatttaagtagagggatattaaagaaagaagcacctagtgaaatcttttttccaaatctccgtgagaaaatagaagaaattttcataaagcatttcattttgcatataaattggagcctagattgtgcctgtgaatttactgctgtcaaatttaatttttctttaattcttcagacccagatgtgaaaggctctgtgtgcaggctgcaattttcaatgcttacaggtagctcccggatcgataatgtgtctttatgagaaattaccattaatgttattgagtatgcattttgttttgtaggataataaggtaatatgaaatgccaattcattcattagaagagagctaagtgcttaaatgaaatgggtgacaggtctgaaaaagagatgtagtaatgggcaggaaggcaagaatggatttttaatgacctaatatgtaaaagttaaccatgtttttgcattttctctttatacatgatgtaatctataatataaagaagtttatttaaattggagaatgtgtcttggctaaaaaccctctgcaaaagtgaataaatagatatcaactaggtttcagaacatttttctaatgagttagttttactgagaacacagcacctaaatcaattaaaaacaaacattgccatatgaaatcaatgctataaaaatcatcagttaatattagaatgtcacaaacaagaccaaatttgatatatatttaagatctctgtttttgaagtatggtgataagaaaaactaatcctgaacttaatgcaagggcacaatgcaagaacagaacatttgggaaactatgttcaaagtcattggagattagactaaaaaatgactttaaaaaatcagttaaactgaatgtgaatgttagcatcgctattaataactttttattttgccacttaggaaaacaagtttcacaccttcttcagtaaaatagttctgattcagccctgtgctgttaagctgaggggcattctaattatctagaaagttggatggactcgttaatttgatgcctgtgattttataaagcaccagtaggcactctacaagaaaagctttgagtaactcagttcaacaaggcttttggaaaaaatacaaacaaacatatctatgctattacataatttgaactcaaattacttgcttctgacatcttatttaactatatgtaattctgaaaccaatttaaactcattggtgggctgaacacagttttatgaacaaaatgtta

SEQ ID NO: 1885014 - DNA, 4001 bp, Homo sapiens
agatcacacacttcaacatgggtaacagagtgagaccctgtctcaaaaaaagaaaacaaaagtagattaatgattgcctgaggtggggtggggggaatgttgaggggagataagaggaatggggagtgatttttagtgggtaaggggtttcttcttggagtgatgaaaatgttctaaaattggttttggtaatgattacacaaccctgtaaatatagtaaaaataacttaattgtctactgtaactgggtgaactggttgtatgtgagtaatatcttaccacaactgttaaaaaaaaagtgtcaatacaaaataaggacaaaaaattttaacaacagaggtaaattattatgtgacaatactaagcaaaaaagatgaaagcaaaattatttatctgtatatgttcagctatgtgtaaagtatatgcatagaagtaattctgagagcaaatatgccaaactacttataatggttctttctctttacacttttgtattccatctaaaattaccatagtgagtaggaacattttaaccaaaaataaaaattttaaaacaaaaataacaaagcacttttccttttattactttggttaatagcaaattagtctgtttcatctgtctatattcatttgcgagttttcttctagtcttctctgtctttatcttctacctcttttacttgataagaggagtcccaagactagtactcaattttgcatttctttctcatttttcacacagcatctgctaaggtaaaactgttactaacttattggatggttgacttcagcatattgattttgaagattttggactctatatatgcatttaaggatagtatttctatctctataaagtggaatctggaaccagatccaacaatagaccacttagaaaatatactttgttctattatattgaattccaagtgttctcatttatacaatttgtaccaaatgttagattggaagacaaaaagaagtttgggagcacagatgattcttcaaccaatttctctattttaaagacatagttgaggcaattagatatcaaataatctgagagacaaaaaattagatttaaaataatcataatggtaacaatagctaatattattgagtatctactgtatgtcaggcatggttccaagcactttatgttcagtcctcattgaattatcccaataatcctaagagataagtgctattgttatcctccttttgttgttgctgttgttatagggtctggctctgtcacccaggctggagtgcagtggtgcaatctcagctcattgcaacctccgcctcctgggctcaagtgatcctcccacctcagccttttgagtaactgggactacaggcgtgtgccaacatactagtctaatttttctattttttgtagagacagggttttgtgatgttgcccacgctggtctcaaactcctggacttaagcgatccaccacgtcagtcttccagactgctaggattacagacatgagccaccatgaccagcctgttatcctctttttatagattatgaaatagaggcttacaaatgttatgcccacttaatttaaatttacaaagctaataaatatcagacaaagattcagatccaggtttgtctgactccagagacagaactttaaaccataaagcttagagacctggatttgtggaaaaaataaaataaaccataaagctatatatcttcattttcccataacacgtttttgaaatcatacagttcaatcaattctcttcctcctggaataaagctgattaaagagttagagaagttgatgagttataatgagttacaaaacaaggagtattttctctccctttttttgcaaatgaaaaatgaggtatttggaagagatgctttttttaagcttcatgactttggtgatttgggaatagaaatagtaattctacctcattccaataccttaagtaaactcagccacctcgctgagccacactggtccctcctgaagtgaccccaggatctgcatcacagtttcagaattcctcatcagtatccaccatgcttagagctctgctctcctgatgccaacatccccactttttttggttcttagcaaactctttctctttgtggagcattttccttggtgactaaatttagactccggcacacaacagaatctgtcctctggccttatatgctaatacttttgataaatgatgcctcagtagactcccaactctggtccctatggatcccaccttcaccaaactgctaccccttcatccccagcctcacacacacacacaggagggaggagggtcggacaagagggaaaataccataaccatggaagcaggtaacgtgcttctctctggcaatacctggccatgtcacatttctagaaacttgggcactcatcggcataaatcttacaaagaggggcctaaaagcattgtcagcctctggggtgggagtccagggatatcacaaaacacaaagttgtcttcaaaaatccagtcatactgtgcatatttatctgagaaaaaaatctcaaggaagaaattcttaaacttctctgcctcacccatttcaaggtctgatcatgtatttttcaggaggaatagtcaaaagtaaggcaatttcaaatgaagacaccaggaaaaaaatgtgaagtgattgtaaccagcgaaaataaaatttaggatttgttggcagtgtttgttgaagaagaaggaagaaaaggagtaggaagagagagaaggaaggaacgagggaaggagacgaggaaggaaagaattaataagtctggtggggaagaaatgaatcctttgtcaaaaatatttcagatgctgaaattctgttattgtttctagctaactagaacgttctccctttccctttcggctggattattttcttctcattcttcaaatctcacttcctccttcagacttcatcaattcgtgcttcccttcactgatatccattcagtgatatttatagtccatttatatgtatggcctttgatttttgtttaaatttcagcaattgctcactgcccatcctgactggcctcctccagcacagctcctaacacccctcaccctgctcacaaacactcgtcgagtccaaaccagcctggcaggtaaggccttccataatttggcttcaactcatgcttccaaacaaccttattttcagctcttcacttcttatgaataaccatacagcagtgaccttaacattttgatggcaaacagtaatgctcaccacgttcaggtcacaagcacatgtcttgctattaggagagttgtaaaggaaacagcagaagcagtccctccccagaaaaatgcacagtctaatggaggtgaaattaacttcagcaataaacttaagattcatattgaagaggcacttgcactgactcagaaactttctgcagagaatctgaagaagagcaggagcagcaagacagaaagcactcaagaggtgacttcggaggctcagtcaccaaacaataggcaatgttgttctctaagccttgtaccaaaactgatagggtaaagggtcttccaaatacaactttatttattaacaatcctcctttattctggtccacctgaggctacacaaatgtaccctcttcttaaagaaactgatttggatagacagggaataggagatttcaatcctgctgaactaggttgcttctcttatgaaatcagcctgcaatagactttcaaaaggaattccaagtaggctttgaaaataatgggaggagtaagtggcccatcaagccaacatttgcttgagccagaggacttgctcaccgaagacattgctggatttcttatctgactagtcagtcaagaaaatttactttgatgaccataaatggacattttttacaatgatcattatttacagatgcaagtgctgtgtgaaatatagtacttaaactcaactataatttaacactacctatttccataatgagtgttcaa

SEQ ID NO: 1885015 - DNA, 4001 bp, Homo sapiens
gcaaattcagactaaaagtcagatattttaattacattcctcttgttctaactataccatctacaaactgggaagaggctagaacttggagagtggaagaaactaccttggtaaggtattctcaaaatctttgtgtcatcatctcatacctccctgcacacacacagccaataaagaacttagaccaatgaaaaatctatttagaaaaaaaaaggaactcctctattcatgaatcacttatatattatgcaggtggcaaaaagagagagaaaatgttatgtgaatttaatctccaaaaagatgataggtggtgaataatggcagttagttagcttgagaacaaatgttgattatcatagttatcagaatacatacatggtatagaatccaaccttgagataagaaatctgtcactatagtgtatgggtcaggactctgttggctccattgtagccagcgtccaacagggcctctggtagtctttccctcttggtattcatatccttgtatattcccctcccatatggaatcaagattgacctagtaaacaacagaatactaaagatgtgatggtatgtcattttcaaggttaagtcataaaagacatttacatcttccaccttggtctcctggatcgcttaacttagggaaagccatccgccatatcgtgagagcacaagccaggctggggagaggtttctgtgtgaagaactgaaaccccctaccaagagtcagtacaggcttatcaccacatggctaagctaccttggaagcagatcttctagccccagtcaagcctttaagtggctgtagctccagcaaacatctgaatgaacattatgagaaatcccaagtcaaaaccacccagccaagcagcttcgaatccctgacccacagaaactgagagataataaatgtatatttttgtcttaacccactaatttattacacagagatagataacaatacaggcaacgagtgacaactcctatttgaactagctttaaacaaactgggacctcttaacctatgtaagtaaggaaagtctcaggagacatggccttagggagagtggaactagatactccgaaggggccaggctcctttttctttctctctcatctctgcttctctctgcacataagttgcattctcttagtcttcttccacctgacagaaaacatggccaccaacgccatcaggcattacctctgactttctcccatcccaagttctaaaagcatggaaagtactccagttggcctaaaaatggatcacttgctcatcctagaccaatcagtggaggcctagctggtggaatcagtaaaaatatctatttccatccaaaccgcattattagggtgaggaaaagaacatttcttagaaacaacatggggtgggcagtttccttggaagagaaacaagcagtccactgctcactgtatgttcacataggagaatgaagacacatacgtatgcatgcacaaggggtttctctatgctaatcctggggtgacagtaaacatcattttcatgaatcattttgtcacctggccctaaggaaaaggctctctctagccaggaaaacacatcagccagatttccaatgagaagtaaatcttatctttcaaagagaaaggaaaaaaaatagcctaaagcagccccaaagtagaaaatacctctgagatttctttcctgagaacctagggtctagatgatgagagaggaataacaataataatgataatagatgccatctatcatgcacatgtcaggtacattaagctactggatatcattttgactcatatcacacaactgataaatgccagagcctagatgactcctgagtctgtctgctgccaaagtctaaacacttaatcactatgcaaaataccagagaaggaattacagaagcccaagcctcaaccaagaccatggttagctcctaagctaaagaaaagcagagcaagctgtcctcagctcagaagctattttctgtaaatttcatgtcaaccaagatctcatttcagcattcccctgagagccaggtggaagaactgaactccagctcactcctgctgctcttgtctatgaaacagagcaagacccaaagcaaaagttttcagaattttgttataacaaaatctctatttttcattgtcttcagaaataagttttgcaaatcaattccagctttgggtggttctcagaggcagttacataaaaagaaagcccatgtgactcattcctgctgagagtgggccactttgctctcttggaaaaagggaatttaagtgttcatcaaggcaggcatgacatcatcactgacaagtcaggccaaccttcagatgaggaccatgtctgttgtttgttaagtgtgtcttggggaagttaatacttcatgtcaaggtttctttatctgaaaaaaaaacgtgcctctatctcatatttcacaaggtgattgtgaagaccgaatgagacaacacatgtggaaacacctagcaaagtacttaatgctatggtttgaatgtctgtccccttcaaaccttccattgaaatttgatcccatgttggaggtggggcctaatgaggggtgtttgggtccccattgtagatccctcatgaatagagtaatgcccttccttgggggtgagtgaattcccagtctatgagttcctgctagagttggttttaaaaagagcctggcacctactccagtcttgtttttttttttatcaccatgtgatctctgcacacactggattccctcgctttctgccatgggtggaagcagcctgaggacttcaccagatgcccaaccttgaactttttcaaacatcagaaataaagtgaaatgactgaaataaaccttttttctttataaattacccagtcccaggtattcccttataacaacacaaaatggactgaaacacttgataaacatttgtgacatttgtctttcatcatcatggctttgttttgctctatgttacagtgcatgcggcttttctcctcaaggaggttctaagttccacttggcagcatcactgtcttattcccactgtgtgtcccacacatcactcatgagcaggtagggcttgatgtgctgatagtgggttgtgctggactccacagaaagcaaattttcaaaacctacaagcaacatgttttctggcatgccacaatatgccatcatctcactagacaataataatatacatgaacacttgaaaatttgaacagacagatatctaacctaattgactcagtggctataagagacaagtctatggatacatataaacattttaatcctacttggcaaaaagtgtgtcaatgggtgtaaggagttagttatagcctccactctcatctgggcaactatgccctttctccaacccctgttgacaaggcaaccccaaggtggccacactgcaaactaaatgatctcttcaagtttatgcagttgcacatttggctggaccagagacagcaaaatatgatgcaactaggaatcagatgaagatttagaccaatcagatcctttcccttgagagcatgaacttcgaaataccaaggaacaaggcagcgccagatgggcattcaaactgaaagaataccattggaagacaaattagagtagcgggtgaaggctagagtcagtcagcctggatccctgtgttagctttgtcagttcctgcctatgtgatcttgggaaaggtactttctccaagtgttctcatctgtaatatggagatgataacaggacttccctcatgaagttagtatgaggattaaagagtaaatgtatatgaaaagtacttggatggctgacacatagttagagctatataaacaatggctgtcattatcaggtagactccaagatcaagtaaagcccacaccatgtgcagaaaacaatgagaaagtagaaactatgagaatgcctaggaagctctgaggtcaatactgagagaagaatagggtatgtgcat

SEQ ID NO: 1885016 - DNA, 4001 bp, Homo sapiens
atggtggacaatgtgtctgagtgttctgccctggggatggaggtggtgacaccaacacacccatcgaggccctgtccacgtcttcgcttctccaagtggaagaccgcgtccttggaccccaatcctttcgggtacacatccacccttcccttggggtcacagccccaacactgaacatggctgtctagtgagacacctcccttactgatgctaagaacaggaggatgttaattcaggacaagggtggctgggatgggaggcagatctagttcagccccagtgttgggtctctgcttcctcctgcataagtggagtgacaatgcctaccctcatgggttatcgtaagcttacgtgacaagcgtgatatgtactgtcaacagtgtggctctgttcaatcttaaataaagtcacccttgctcatggcatcacaaggtgtctggctggggtgccttttgggtcatgggcctcagggaccggaaccagctcttggaatgacatcatgctatgacctcggcagaggggggtttagggctctaggtgaggaaatggcactcactgcaccaggacccccaggccatctgctgtctacctgttccatgggcacctactctggctaggctggtgtgggtgtgaaggccactatgatgtctgagacaccctgctcctgggagcttccagcccagtgagggaggctgagctgtggccctgggttctgggcctccttgagtagaggaaacaaaggcctgggagcccagaggcccagatgagcagcagggaacctgtccccaggggctactcagacctgtggagtgtgggctactctttatcaaatgcgaactaggtcaggaatgtctgggggcagtgcctagggcttcttcatccaacaacacacactgcttgtctctgcagatgctcagtaagtattcatggatgttcaagataacccatggctggcgggtagtggggaagctggacatgggctttggtgtcaccttcccagaacaaaacagaaacgcagactcccaggcagacatgcaaagagaggaggcagacaggcaggtgacaggagacagaggggttgggtagcccagccactgcccacctggcatgggtgtgctcaccggtgtcgtggatgaacctctcgatcttggactgcatgccccagtagcggaactccaccttgcagagcttgtatgcgcacatgatggggaagacctgcttcttgtactcctcgatccagttctcggacaggggcccccgctgggtcttggttgactggaacagcttggggtcctcttctgtcttatactcgttgtggggcacagggtctttgacaatgtcgatgaagtctgtgggtaaacccttagagtggccacttctgccctgacctcaacccccacccacatctctccatgttcctccacccccaaatcctcccaggactctgggccttgccctgccagagggaccctgggagtgaggatcatgttctgggcagctctgacctcaaaatccctgacagtggggcctgcagtttccttggtgcattcattcattcagataagggtcttgctatgttgcccaggctcaagcactcctcccacctcagcctctcaaagtgctgagattacaggtatgagccaacgagcctggccccttgttgccttttcaagtcatttcagcaaaacccatgttctgagtgcaccctacctcttggcaaagcagataaataaggcaatgaggaaacactggggagatgaatttccatgaagaatacagggtgggaggaacagaagagaaggctaggaaaagcttcccacaaagacggtgtttcagccagaggggtggaatcaagaggtcaagaatgtcccagcagcaccggcccttgaacaagaggtggggggttctggggaaggaaccaccagggtgtctgcgtgaggagaaggatggcagcagtcacagagcaatggggatgccctggacatgccggccacttctctccaagctaggagaccggacagttccctgagagccaagtggacccaggtatagatctgaggctgagagggatgcaggcaggctggcctgttggaaaagccttcctggacagagaccggaagagatgtctgaagaggcctacagggggtgtctggccaagcttgctccaggctaggcctgagagcaggggcagatgccacagaggtaggagtgcagaaaacaggcttaggggctgacaggacctggtgagggtgacaagaagatgggtgatggctctgggcaggacgtaggccaggccacttatgatcacaggcttcccctccacagcagcatctcagagccctcctgtgtgctcactcccgaggcacatgtgtgttgggcaggactggggcactcactgggtgagaaagagccccagtaaagggtttgtggctcacagaacccttttttgcggtcggttctgctctagccaggcccttggctgcctcattttctccaatgtgtgggcccctctgtatccaggctgcagactgcagacacagacatcagctccaccaaaatcagcagggtcaggagcaagtctgaggaccacagaatgccaggagggatgagcactcttcctggagcagaccatatgccctgcccatgtgagccggcaaagaccctgcatgggaaatgtcacagagacttaggacccatggcagctggcctcagagggagcctgcagagctctggcagtgtcagggctgcctgctatgggaagagctatgtacaccccaaccccaattcctacgctgacgtactgaacacagtgcctcagaatgtgatcttatctagagataaggttttcaaagaggtaatcaagttaaaagtaaggccattaaggtgggtcctaacccagtatgactggtgtttttataagaagaggagacaaagaggtagacagacacagaggggagtgaccatgtgacgaacgaggcagagattggagggatgcttctacaagtcaaggagcaccaaggactgccggcaagcagacactgaaggggcctgaacagagtcttccccagggggaagaacccaccatgctgtgatctcagacttctggcctccagagccccgagagaataactgtgtgttgtgcaagccactcatgctatgacgctttgtttcgcagacccaggaaatcccagcagaggtgggggggttgggcctggagcagctcctgggccatggacacccacccccaacccgcatgccctgcctgagatgcctccacagtgacttgggccttgtacccagaggctgcaggagggtggctgctgagctgcactggcccacatatgtgttttgtttcactggcatacatttatttacaaagatttttaattggttgctaacatttagtattgggagatttctcatgaacatccttatcactggcttctcttgaaaatgaagatttaacaaatggggcccatcccctacatgtcactgtcatctggaggtagtgggtagggcacccaccatcaagaggacatagaccccattatgtgccgggggcacttgtgcatggctgtcagctagagatggatgcccgagcccatatgtacttctggggagtagggatcccgcaaagggatggagggaagcagctctgggtggaaaaggcacttggacttggtgtatatatcaggagaatggggctgagaaggcctgccctgcctcccccatgggccccatgcttgctccaactctgacctgcctgcccaggacagggccaggtctggagtctaccaggtgtggggaaaaggggcaggacaagagggacctgtgggtaggaaacccagagtacagccctgtggggctctgcccttcctggttaccgattgtcagctggttcttttccacaggagagaggttgaacacgtcggggttttctccagcatcagttttataaaaggtttcaatgtcgatggagaatttctccacgaaaggacagg

SEQ ID NO: 1885017 - DNA, 4001 bp, Homo sapiens
agaatcacatagctgagcagtgacagagcaggactttgaatcctcatctgccctaattccaatgctgtgattttgctatttctgtctctcagggagagagagagaggaattactattttccaagaccttcatagaaggaagttttacacgcagcagacattttcagatttcaccacatttgttctgtttttccgcatttagatggcaccataaaaccaagatgctcaaagtgaacagaaaattaaaccagcagaggtttctacgtctggctgggctcctgatagctgtggcaagctcttattctgcatcaagctgactgggtcggcccaggccaaaagtcggccacctggaaagcagacgtcggcagcctgctccacacagacttactgctttctcggaggtctgcctgcatcttaaagcttcttatcagcaccaaattgaattaggtcattcaactgtctgattaacatcgccagacaacacacatcctaagccacagagattcactcatggctccattgattccatcagggaaataaaagatactttatctgtggctttggacaagggttccattgccttttgttttcaaagttggtgctttgatgtcagccttcaagtcattgtaggtgtggtcttagcctttctgcatctcatggtcaatctatcttattttctcaatttacattaacagtgatcaaaacacctggccacagatcgagacaagaacacagtgaaatcatgccagtccaccaagaactctcattcatcacatattctgctccagggacccatccctttggatctggctttggggctatagaacattaggtggcttctgttctcataggtaaaggaggaactccaagactccgactgctttgaggctattttccccaatactgtgggatgaagcaaagcctccagcgggataaagatgtgggctctgtctaaagaccaaggttcttattttatgacacgaacaaaaccaatgtcgaaagtccacactccagtgaaaaaggaatttcttgttgggtccatttgtgtgaggctactttatgaaataaaaatcagattaaactcctttttactcagatggcctgggagcatgagagaattacatcacctgtctgacctcaataagctctgtgtgggcaaatggatagagcaagatgatgcaatttgttgtgtgaatcagtgttttgaatgcagatgtgccatgggagagcagaggagacaagaggatgtgggctgacactggagccctggagaaggagtttcccctgaccatgtgcgccatcactgagaacagcagtcaggagacacaaaagacacacaggtctggaagctgctcccaccacctactccatccttggtcaagaaaatctgtgtgagcttggggtagattaaatcacctagggaaagtcaaaagagccaggctggcttatcagaaaggattgtgcctgggagattaacaaaacacttcactacctgtagcttaagcaaatcagagtttatttgaagcatattataagaaggcaagagatagaaattgcagactttgtgaagtggttcaattttatcccattgacctcaattctatgtttctgcccccatcattggcacctggctgtctgatggttgcacaatgggagctgtgcctccaggtatcattgtctatgctccaggcagaaggaagaaggaggtgcaaaaaacaacatgcagaatgagacaaaaaaggtaggcagagttctaagacagcctcccaagttttcctatccttattttagatattgtctataggatgagatacctgcctgtgattatattatgctccctggtaaatgattttttttttgagacaaggtccggctctatcacccaggctggggtgcagtggcgcaatctcaggtcactgtaacctctgcctccgaggctcaagccatcttccttcagcctccagagtggctgggactataagcatgcaccactgagcctgagaaatgttgcagatgtcattaaggttactaatcagttgactgtgttcatcataagggagattatctgagtgcacctagtctaatcacgagagccctttcgaagcagagcaccttctctggcagcagaagaggtttgaagcacaagaaagagtggactgattccttgctgaccttgacgatggaggcactcgtgcaaggagtgcaggtggtctccaggagctgagagtgagaggcttgggtgacagccagcaaggagagagggatctctgagagtgggtggcctgggtgacatagccagcaaggagagagggacctcgggcctccagccccacagaactgaaccggatttaccaaccctctgagtgatcctggaagcggattctttcccatggcctccagataggagtccagcctagctggcacctggatgtcagccttgtgacaccctcagcaggaaacctagttaagcctgcctggacttgtgaccttcagaactaggagctgacaagtggctgctgtttgaaggagccatgcttatggtgtttgttatggcaacaatagaaaatgaacacactttcttcctacgcagtttggagttttatctgagatggaaggcacctccccagcagactcctcccaaagtctgactagactaattggctgaatcacagacccacaaatgaaaacaaatgagtggcacaaccaccagtgtttcagcaggcttgccttattcaggcagtacaaacccagggaggcaggagcctggggcagggaggaagagagtctttgctgaactggcaggtgttgcaccatctggactgatgactccgccttctaaatctagcttccgagaggttgtgggaaggagagagtctcagagggtccatggtgaaggggaaaggaagaagaatttaccccggtccccacctcccactcatcaaaggttcaccccttgtgtgttacccctggaacttcccaatgtgcatatgtgagtgttaagcagtcttaactcctgcagtgtcttgaacctcaggccaacaggggtgccctggtgcaggtgtcaggggacacccctgatgacccttctgaaagatgtgccagctcatgcccacatggcacagccagaggttccacccaggagaagccagcagagcctacactgagctggtcacccaggtggaatgcagtgagtggtcaaagcgctagggaaaagggatacccagggatgtggggcagaacgcaaagattatctgacacatgcagctggtgtcgtccgtgcccccagaatgtacaggctgggatgccgagagctgggaagacaggaggatggtggctcagggggccttggactgtgtttgccagagagcgagttggctgggcctcataggcaaggtccaccagcactggggttagctctcacaggtgcaggccagttacctggaagaagatgcagagtgcaaaaaaggaactgggtagggcggggatcaggaaataaccctgtgtgggttccgggcgtccacctgggcctggctatggggtggaggctgctcatccacggagctctgccttggcctcactctgcctcctttttctcatggtagtaaatttagttgactaaaaaatatatatcttacgtattaattatgaagaaaatcaagttctatagaaaaatacaaagaagaaagcagtaagctccccctttcctctttcctgccaccagcaggtaattcctttcagcttctctgtgagcccccagacctctctctgtgaatatactcagtgtcaccctgggcatgtgtgggtcagacttggccaccagggtccatcctcctccttcatgggcctcctttccttatgggcaatggcctctccctcactgtgtgtggtcttgatgtgcaagcacaagagatgcccagttctggtcccgtttgaatgactcctccatgggagccaatgagggaagcacttccactctctatgcctcagagtcacaggtgagca

SEQ ID NO: 1885018 - DNA, 4001 bp, Homo sapiens
acatttgatctagagcattagggagatgaaggagtttttaaggcagaagccggtagaagggagtaggaaattccagacccaggaacagtgcgtcctgaagtacagagaagggtaaggtacgttccccaagtgctgagacatctggtggaactacagggaagaggcaggcgggctgggggcaaggaggctgaggggactgatttttccagtgcatgagtcaagatccctcaggggcttctgggggagtcaacgaggctgctgaatgtcaggcattccattcctctgagtgggtttcgcagcctctgctggagagaaagattggagaaggaacacgggccttggcatggcacagaccagatctggatcccaactctgcaggcggtagatggtgtgttatcctgcaaattccttaatttacagaagagcagaagtttctttatcttcagaggagcaggagtttctttatctgcaaactggaggtcacaggcggggcgcagtggctcacacctctaaatcccagcactttgggaggccgaggcgggaggatggcttgaaaggagttcaagaccagccaggcaatacagcaagacccccatctctacaagaaaatttaaaaattagccaggcatgatggtgtgggcctgtggtctcagctacttgggaggctgaggtgggaggatcgcttgagcctgggaggttgaggctgcagtgagctatgatcatgccacaggcaaagagcaagacctcgactcaaaaaaaaaaaaaaatagagggcacagtcatgcctactgttaaggattggtgacatgggcaggggctgtaaaagttatcttctttcctctccaacctctggtctctgtcaatctctttatgtaggtctctttgtgtaggggacagaaaccaataattagggtgctgacagcaccagccctctgcgggctgagtaagtaggcgattgttgcagtttctgaaagtctgtctctagctatttggcccaagttaccacatttctcgttagcagcacgagccgtttctctgggtttagcattgccctcgctccacagtggtcttttaaaatgcaaatctgcccctttgagtctccagtgcctcagggtaaactacttttatcagtgttttccatctgccctggaatggggaggtaatgggagtcgcataccttgggctgggagggcggcaatgacggggcccgctcgttagtccccagagagatggcaaggaagctcctgggattggaatggaaaggaaaaaggaaaagagtgtcgacggcattgaattcccccatgcacggtgttgtgtggggtcctttggatgccccgaattacctgggtctacgtgtgcaggcaggatggggcggggctggcatgcaagctctaaggagacacaggtactgacctcctgggactcacagtctggctggaaactaagcgtaaacagataagcaagatacgatggggcaaggaaatgctggaatcataatggttacctgttttctgagcattcagtatgaacaaggtctcatgctaagaaccttatcacctgttatctctacccttgagtaaccacttgacagttgaggaaactgaggcccagaggggctaaaaatgactggcccaaggtcagaaagcaaacaaggggcatagattccataagccaagttctcaactgctgtgttggccgggggtgctgtggctcactcctgtaatcccagcactttgggaggctgaggcaggcggatcatttgaggccaggagttcgaggccagcatgggcaaaatggcgaaatcctgtctctactaataatacaaaaattatctgggtgtggtgatgcacgtctgtaatcccagctactcaggcaggagactcacttgaacccaggaggcggaggttgcagtgagccgagattgtgccactgcactccggcctgggcgacggagcaagactctgtctcaaaaacaaaaacaacaccccccacccccaccaaaaaaaataaaacaaaatcaactgctgtcttttgtagtgtcagaagcgtgtgaaccaggacaactctatcttaaataggaactgggtaaaatgaggctgagacctactgggctacattcccagacggttaaggcattctaagtcacgggtgagacagaaggtcagcacagaatacaggtgataaagaccttgctgataaaacaggctgcaataaaggagccagccaaaacccatcaaaaccaagatggcgacgagtgacctctggtcgtcctcactgctacactcccaccagcaccatgacagtttacaaatgccatggcaacgtcgggaaattaccctatctggtctaaaaaggggaggcatgaataatccatcccttgtttagcatatcatcaagaaataaccataaaaatgggcaaccagcagctctcagctgctctgtctgtggagtagccattcttttttattccttgataaacttgctttcactttgcactgcggactctccctgaattctttcttgcgcaatccaagaaccctctcttggggtctggatcgggaccccttttctgtaacagtaggacccaccctggaagatcagcctgtttgtctatgttcaagcctggggtttgccccctctcctgggcttggggtccggctctgcctttgcttctcattgcagcatcttggacaagaccgaacccttctaagcctctattgtctcattcatgaagatgaaataaaagagagaattgcaaatttgaaatagtacaatataaaaaatgtatgaaatggccggacgcaatggctcattcctgtaatctcagcactttgggacgccaaggcgggaggatcaccagaggtcaggagtttgagaccagcctggccaacgtggtgaaaccccgtctctactaaaaatataaaaattagccgggcgtagtggcgggcacctgtaatcccagctacttgggaggctgaggcaggagaatcgcttgagcctggaaggcggaggttacagtgagccaagatcataccattgcactccagcctagatgacaaaagtgagactccatctcaaaaaaaaaaaaaaaaagaaaaagaaaggaaaagagaaaaggccaggtgcagtggctcatgcctgtaatcccagcacttagggaggccgaggtgggcggatcacctgaggtcaggagttcaagaccagcctgaccaacatggaaaaactctatctcaactaaaaaaaaaaaacaaaacgaaacaaaacaaaattagccgggtgtggtggtgcatgcctgtattcccagctactcaggaggctgaagcaggagaatggcttgaacccgggaggcagagcttgcggtgagccaagattgcaccattgcactccagcctgggcaacaaaagtgaaactccatctcagaaaaaaaagaaaaaaaatgtatgaaatgaagtctccctttgggtgcaaaatgtagaataatgtaaacctctccaaaaagacaaaaaaaaaaaaaaaaaaaagcatcaataattgcatcatttcggagctgcatgggccaaatgaagccgagccatggtgcactattgccttgtgttagcgatactttagttgataaatgaaactttcccagggttatccttgggttattttgaggttttaattatgcaaagatcttcaagaatgcatccctttttaaaatgtgacctcccttattactgtatatgtgtatgtttaaaaagatgtaacacatataaattatgggtccccatatggctccttctacggacttagttgcattcaaagatccacagtctagctatcaaatactaattaaatccataccgtatgtagtccaaaccccgcagcaacactgaatacaagctgtgccctcctttttcccaatcccaactccaaaactcccagacgactctcccctccctcctttctcccagctccttgttatagagatgaaataagtttctctaaaaagtcctcctgtc

SEQ ID NO: 1885019 - DNA, 4001 bp, Homo sapiens
caaggtaatcacaagcaaaacctttaccaaatgtgttgccttcttcccagcatctgatatcagtttcctctctgtcatcagctgactgctaagccagtattttaattttttttcaacagcttaccactactggcctcagcattttttttttttccagtcaggataagttttttcacattgcagtagcaactttcgcctggaatctcagtggccttaatacaataaagctgtgggtctgatgtgagtcaggtgagttccctgggcaactgccctgtgtgatgaagtggctcagttattgaaaagatttctgtcgctggttctgtcatctcaagtcatgggctccgaaattgaccaacaaaggaaaagatcacagggaaaattcacacctgcttttctaagctttgatcctgaagtgagacatatcactgctactcaaagtccattgaccaggattggttttaccactccacctaactagacaggaccggaagttatctcttccatcgtcctcagcatgttgagagagcagagctgtaagatcaaaacagcctggacagtggggcccctaaagtgaggacccctgtcctggagagtggcccaattgcacaggaatttacatgagtgagaaacaaaattttgttgaaataataccctgggatttgaaaatttaattattcttgcaacagtccatcctatcctgattaatatgggaacccgaaagataggagtgaatgaaacaatatagtttcttttccctgaagcaattgtaattccaatcaaaatatcaataggatttttttggagactgacaaaatgttgtaaaggtcttgtagaataatagaggagtgagaatagccaatacaactgtaaatgaaataatgaagaaatagttttatccaatattaagatattttataggtagagaaattataagaaataagaaagctgttaatggagaataaagaccccagaaacagacccaaatacctttaagaacttaaagtattaatattaatataaggccatgtgcagtggctcaggcctgtaatcccagcactttgggaggctgaggtgggtgtatcacttaagctcaggagttcgagaccagcctgagcaacattgcaaaaccctgtctctacaaaaaatataaaaattacctgggtgtgctggtgcatgcccgtagtcacagctgcttgggaggctgaggtgggaggattacttgagccctggaggtcaagtctgcagtaagccatgattgtgccactgcactccagcctgggtgacagagtaagactttgtctcaaaaaaataaaataaaataaaatataaataaggtggtattttaaagttaatgggagaatatgaataattcagaaatgttgtgatgaacatgccattgggggaaaaagtgcagaagtatcttatgcccaaacaaattctatgtggatcaataacttgaatgtaaaatatgaaaccataacaatactggaaaaatcattgatctttttctcataatttttaactggggaaaagtgacagacataaaagataagattgataaatttacttatataaaagttaaaactttttcaagactagaataccgtaaagtcaagagataaaccacaggatagaaaaaaaaagtctgcaatttatataacaggaagagggttaatttcttttatatacaaagcaattaaaaaatcagcaacagaaaactgaacaattcaatagaaaaataagtttgcaacaaaaacaaagcaaacagccaataaacacataacatttttagctatctaaaaaaatcaaggaatgtaagttaaaacaagatactgtttttcactttgtatattttgcaaaaatactggagcttgcacccaccccacccaaccccattctatggttttactttctgaggtttcagttacctctggtcagccacagtctggaattttccattttgtattttcagactgcagatgaccagggtaactaaaacttcagaaaacaaagtattaaatggaaaattccagaaacaaacaacttatacattttaaattgtgcagcatggtataatcccatggataaaggagaactactgtaaaatgttgatcttactcaagagtgtgggaaacaggaccactcatgtattattaatgaaatgtaaattgctacaactttttggaaagcaatttggcaataactattaaaatttaacaagcacattctcttaaactcagcaattctcctttcaggaatttttcccaaggaaacgctttcaccaggcggcaaatatatactgtataggagtagcatgatactattatttgtaatagtaaaaaaaaaaaaaaaaatttaaatgcccatcaagagaggattaaataaactatagtggctctgtaaaatgggatattacatagctgttccaaagaaccaatgcatttctatgtcttgatatgaaaagtatccaaactaaactgttttaagtaggaaaaaaaggtagaatacaatatcattataagtgaaaattcctagaatcacgtttatacatatatttatatacatgtatgtatatacatacaaatatctgagaaaaaagaaataatagctatgattatcttcagctataattacattaaatatggatttgtaagtaaggaggtaggcgtttacatttcatacccatttgtaagttttacagcttatgaatgtgttgctttatggttaaaaacaagattttaaactattaatcctttcatgcaaatattaattctccatttctaccattcaatctatatctcaaaaaatttgcatatacaaaaaaaacggaccaaagttgtggatgttcagaacatgttataaatgagtaaacgaagtcaccaatcatcatgagaggggagcacaatctttagaaagtcaagccctgtttccacagcaaggaaaaattccccaggtttaagtggtaatggttctctatcaacattccaaaaagaaattcagtaataatagtagtagtagctgacatttactgagtagtgactaagttggattcagcagtcagcccttttacacgcatcttttctcttttttttttctggcagagtcttgctttgttgcccaggctggagcacggtggcataatctcggctcactgcaacctcagcctcctgggttcaagtgattctattacctcagcctcccgagtagttgggattacaggtgtgcaccaccacgcccagctaatttttgtattttagtagagacagcatttcaccatgttggccaggctgctctcaaactcctgacctcaagtgatccacccaccttggcctcccaaagtgctgggattataggcatgagccacgccaggccaggaatcttctcattgaatcccacagactccatgtagcaggggcaccagggccagtcccattctaccaacgaggaaactaaggatcagagagtgaaattaagaaatcacacaagagactcagggcttgagtttcaaagcacttgtaatatgcttcactgctgactccaccccttactatgtgtcctcagtaaagtggctctgccagaggcgtttgaaccagaggactccatcttgaatagggactgggtaaaataaggctgagacctgctgggctgcattaccaagaggttaaggcattctaagccacaggaagagataggaggtcggcacaagatacacaaggtcgtaaagaccttgctgataaaacaggttgcagtaaagaagccagacaaaacccacccaaaccaagatgacaatgagagtgacctgtggtcatcctcactgctacactgccaccagcgccatgacagtttacaaatgccatggcaaagtcaggaagttaccctatagcatctaaaaagggagcaaccctctgttcctagaactgcctacttctttcctggaaaactcatgaataatccaccctttgtttagcatataatcaagaaataaccataaaaacaggcaa

SEQ ID NO: 1885020 - DNA, 4001 bp, Homo sapiens
cagaagtgcatcctctaatatttgcagaggccagaaatccaaaatcaagtcatcagggttggttccttctggagattctgaaggagaagctattcatgcctggctcctagcttctgacagttaccagtaaatcttagtgtcctctgacttgtagacacttcactccgatctctgcctctgtcttcacatcacctacttctctgtgtctctgtgtttttatgtctcaaatatctctctcctttctattactgggacaccaatcttggatttagggtccacctacatccacaatgatcttatctcaagatccttaattacatctgcaaagatcgtatttccaaataaggacactttcacaggtaccaatggttagcacttgaacaagtctttgagggagacacaatttaatccacttcagtggttttccatccccttcttccacaagcagttcttctctcagatctagtgctaaccagatgcaggcttgcacaaggactcaaatcaccttcccaagcagagattcgcttgcttatctccatgatatcccaaactacgcatgactcttttacccagttgcttcttcctgttatagacttcagaccctgaaccattttaactcctttatattccgttagtcaccagtatttttaagtgctttctaatattaggcatgattctttccttggagccagacccaatttttattttttaaaaggaagcaatgagacagaaatcttggaacactatgagagcattcagagagtttctctactgctctttcttaactatttaattggaaaaatattaatatacagatagtgcctgacctggtttcagccatgtgactatgacatttcttcttttctcagatgtgtgaggacctatagatgcttcctgccaccttttgtggaaaggggcagctacagacactgggaaactatggttcaagggaagaaagatgccctaaccccactcccaactcactaggggtagaagcagttgatggagtaagatccagcataacataattccattatctcacttgaggtgggtttaacaggcaggttggctctgttctctgtagcaactctatatttagcaagctggcacaatttttagacagatttctcacaagaacttggcaaacattccatgtttcctttactgcaatatgcagaatttatatttctgacaaaattgctcacacatcttagtgtaacttgcttagtagtcacactttgtcaattttatttttttcccaagcaaaaggagaaatgattaatgatatgaagttgagggctgggaaagggaatttgacccaagatctctcggaatatcaaagcctgtcaagttttcctttaaggggtctgtcacacctacaccttcgcagccagtctcccacccatctttaaatcacagccacattacctcccagtaattctaggattaaaataccccaactgccctccctgttctgggattctacatttcattctgcaccactctctcgagttcatcttctaaaacatcaaggtggttataaatattagcatggggaagggggaatggttcccagtgtcaaatatattattttttctgtactttgctttatactggaaatattcctaaactaaatatttataaatgaagttaataaatatcatagtgtgtctgaaacataattttagaaggctaatgccactctcacacataattagaagattaaatcgataaacaagaacctatttatttgaaatttttttaaaacacaacttatagtttccccacattttaaactcctttgctcaatatttaaggttctacagctttacttcctcctttcattatgatttcatttctcgcctcttccttatacacaccatggtattcctgggttatcaaaataacagctacttgttggggaaactgagactcagaaatgtaaataagctttttgctcaaaataactccactgagcaaaaagcctgtttacatttcttagcctcagttttctcatctgtaaaatgagaaaaaaatatcacccatcacatagaatagttttgaagattaaataagatacagtatataattgagtgctgttggcacccaacaagtatcaggacagaaatttgaacccatgtttgttgacatcagtccacattcttaacctaaccacagtgcctagcacaatggtagcattcaaaaactggttgtttttattagacatcatcagatataatcacaatctgttctgttctgttctgtcctgcctccctgctttggaatgtcctctcctgagaagtttaatgattcctttttttttttttttttttttggacagagtcctgctctctcacccaaggtggagtacagtggcatgatcttggctcactgcaacctccgcttcccaggttcaagcaattgtcatgcctcagcctcctgagtagcagggattacagatgtgcaccaccactcctggctaatttttgtattttcagtagagacagggtttctccatgttggccaggctggtctcgaactcctggcctcatgtgatcctcccccctcagcctcccaaagtggtaggattacaggcatgagccactgtgcctggcccagtggcagtggttctgatggctgtcactgcatgacaagttatctcaagacttaaaacaaccatcttattacattcacaaattctgtgccagaattccagacagagcacagtgggtatggtttttctctgctcgatgatatttaaggcctcagctgaaaagacttaaaagctgtgggtgactcaatgactgggggatggaattatctgaaagtgcaactaaatgtccagaatggcttcctaacaaggctgtccactgacgatgctctctgtcagctggggcttagctggaactgttgactgtggcacccactcatggcctcctcaacatggctgtctgagagtaattggtcttcatgcatggagactaacctcccctaaaatgagcaccccaaagagaaccaggcagaagctgcacagattttctaacctagccccaaatatcatgaagcatcattcccactgtattttgttgattaatagggagtcactcaggccagtccagtgcaaagatggaggatataaatctgtcctcttgattggtgaggtgtccaagaatttgctgacatgttttaaattactgtattcgtattgtacataatgaaaggactatttcagtgaaaggctgaacacttctcctggaacccaaatattggaaaggtcatctatattgatgtcaaagtcacccatggtaatggcagtatttggaaaaaaaaaaaaagaagtctgcaaaccaggtgctggagacttcagaaaagagatgtgaaggagttactccggaggatggggaatgtggcaacaacattcaggagtagaggacgtcttagccagatggtagttattattaggcataatcaggtataatcacaatctgtttcctcctgccttctcaaaggaggagagattttttctcataatagtagagaattaatggtctaccgggcaataggcatctaggataatgacatccttacttctgatccctgtgacatttggagagtggagaatgacatgattctctgaaagggctacaaaagaatcagtgccctctgaggagagctagggtgtaggttaggcaaagagatgagaggtttttttgtgatggcatccgaattatttacaatggaagccacattccagaagttccagtaaagtgagtaagaagggaagacagcaataggaggaagagttacagaagattaaaaaaaaaaaaaagaagtaagcaatatttctggttgcaaataaagtaaagcaaaaatagaattaaaccaaaaggacatttatcattacataacaagaaatctagacagaggtttgtcctggactcctctgattctaccaatctgtcatttaccatggtcagcaatatctcccctcatggcacaaa

SEQ ID NO: 1885021 - DNA, 4001 bp, Homo sapiens
cactgcacacatgcagctgtacaggctgtggtgttgcctctggggactggggaccaccatgaggctgcaggcattttcatccatcagcgaatggaaggaagactgaatttagtgcacggatgatcatttaagtataaagaggttataggttgtttgtttgaataccaaatctctagttgctcaggatccacttgtaagagagctccaagtaggggcccaatgagccatgtttttgctttaacatggggctgttccaacagtagcaggcagttagttacaaccaggagcacatttttctcagaagacccataaacagctcttgcttcctaggctagcccactactgggctccagtgtagagaggaacctaacacccactggctttgctgattgcaattcctgctccacaccccaagcaggctcacacggtgttgcgaggaggtggggagaactgggtcctcttagaccaatcacagcaggcaaggtctgcaaggaggagctggaatcacttatatattgaaccaatatttattgtgattgaatgcaggctctttcataggacaccctaggttcagactctggctttgccacttactagctctgtgaccttaggcgagtttcttaacctctctggaacattttttttaatctacaaaatggggatactaatagtacctacctcatgaggcagttgtaacaattaaacaaagtagtagaccaggcatgatggctcatgcctgtaatcccagcaccttgggaggtggaggccggtggatcacttgaggccaggagcttgagactagcctggccaacatggcaaaaccccgtctctactaaaaatacaaaaactagcaggccatggtagtgagcacctgtaatctcagctactaggaaggccgaggcaggagaatcacttgaacccaggaggcagaggtttcagtgagctgagatcgtgccactgcactccagcctgggcgacagagtgagactctgtctcaaaaaaaaaaaaaaaaaaaaaaaaaaaaagaaaaaaaagtaaaatagacatcattatatacattttttctatatacaaatatagaaaagaaaatatatttaaaaggaaaggggcattaataattatgccacccagagataggcaccgtcagcatttctttcagtctgtcctctcagcatgcaagcacacttgaattatgctgtttatatacttctgtgccctctcttttctacctaacaggtcttgagtgctttataagcattcagtataaatataactttcatgcctgcgtcacattccatcaagggacaggtttctgtagtaggggagtctgtgttttttcccaatatttctctcacctcagatatcattgcttcaatcttggaaggcaacttggagtatttttcttgggcttcattcctagaagcagaaacatattcactttgagtctttgactctcacagatgtcaggtgcggtgaagtgtggttttatggtcttcacacagacgacatacaccagatttatcttagcaatatttgctcctctgagaaggaaatttcactgctcaagtctcaccttgaaatagattacttggagctgggcgtggtggtgtgctcctgtaacagctactggggaggctgaggcaggaggattgcttgcttgagaccaggagtttgaggctgcagtgagctatgaccacgccactgcactccagattaggccacagagcaagaccctattacacacacacagaagaaatagcttacctgctgctaagctactcctttttccttacatatagtaattgctgatgtgctggagctcaccgttcagcctgcaccatcccaggctaggggttaagatcaagaacattatttcatgtgcctggacttgagtcctggctctgccattactctgtgtgcccttgagcaaggcacattctccctctcagcttcagtttcctcatttctaaaggcagcttcgaggattatatgagctgatgtatgcaaagcacctaccacagggtctggcattgaccacaggctcaggaaacgttaagcgtttgtgttgtgaggctttgcaggtgatgaaactattcaactctgccgctgcaacgtgaaagcagccagagacaatatgtttacaccaattagtgtggctgtgtcccaagaaaactttatgaaaacggaatctcgaatttcgcacagtttttatgcatcacaaaacattttccaaccacttaaaaatgtaaccaccattcttagctcacaagctgcacaaaaccacgtggcaggctggatgtgacagacagcttgcaaccactcacctccgctaatcagagagtgacctgcaggcagtcttgggtgtgtttagagtttctcagtcccctgtccctgaaggatggctatttccaaacctgctggggaagggtgaggggcctgggttctaggggtctcacttcccctcttgtggcttcagtttccctgtccgtgccggcagggtgagcttttggctgtttccagctgcagcttcttaaggtggctgagactgtgtcatggcgaacacctgctgggtctctggttttcattttaaaacaacctgtgtgcggctgggcacggtggctcacgcctgtaatcccagcactttgggaggccgaggcaggtggatcacctgaggtcgagagttcaagaccaaccagcctgacaaacgtggagaaaccccatctctactataaatacaaaattagccggggtggtggcacatgcctgtaatcccagatactcgggaggctgaggcagaagaatagcttgaacccgggaggcggaggttgcggtgagccgagattgtgccattgcactccagcctgggcaaaaagagtgaaactccatctcaaaaaaaaaaaaaaaaaacaactttgtgcaaggcaagatatgagtatctttctgtgcatgtcctgagcccttgcctggtgcaaagccgcagggcagatcctgggagacccccctattccctcccttctggaagtgtctgggtattcttaggcctcccagcctttgcctctgctgtgctctctgcctgggatgcccacctggcttgtcatctcaagtgccacttcttggaagctcctcctgttaacctccctcccccacccaggatggaaggagaggcccctcccttgctcaccgcaggatggcactcactgcgctgtgtcattgtggcatgatgttccaccgaattgtttactcgctggcctccccattggatggagggctaccagagggccacagcccagaattgctggcctttagacctcagggcatgcagtctggagtgccagagttggtcaaatgaacaaatttaggatgaagaaataagataagcaggacttgcccttgtggtatctgtagtccagctccctagagaggctcttggttgcagctgaaagggcctgtgctgtgcatctacagagagtgttttgagtcctgcgagaagaaatacaccatatttgcaaaccctttgaaggttcatattttgtgttttttgctccctgaccacctcccacccctccccacgccccaccaatcttgggcaagaagcgagaccattctcctttttctctggtcactcctgtccttcagggggctccctctggccccgactgtccattgctgctgaagtaatgctgtggcctttctcagtttgggccccacccaaaaccgaagaacttctccccagaaagcttctacttggttctcagtgttttcacagttatgggaacccaagaacagtgtcagacctaggaggtgccccactaccaccctgtctttatcaatgttgtcaccaaagctgtcacaaacaatggggtgtgggctgtcacatggccctgcctaagtaaccacattctcgcttcctccttccacacacagccattgggggttgctcggatccgggactgccgcagggggtgccacagcagtgcctggcagcgtgggctgggaccttg

SEQ ID NO: 1885022 - DNA, 4001 bp, Homo sapiens
cacacactctctctctctctctttcgcctccccacccagcaattctaaaatttcactttccagctgttggacctcaggagagatgctgctattttcaagctgaggaggaaggagctaccccacagtccctgagtcagctcaatttagtgaaaacactaatgatgaaaatggcatggctctgggccgggcacggcggctcacacctgtaatcccagcactttgggaggccaaagtgggtggatcaactgaggtcaggggttcaagaccagcctggccaacatggtgaaaccctgtctctactaaaaatacaaaaaattagcctggcgtggtggcgcatgcctgtaatcccagcccccaggaggctgaggcaggagaatcgcttgaactcaggaggcagaggttgcagtgagctgagatcacacccctgaactccagcctgggcgacagagtaagactctgtctcaaaaaaaaaaaaaaaagggctctgcacagcctggatgctcccagcatcttcactgcgactgtgaggtgaggacttttgtatgccccactctacagggggatgtagaggcactgaggcacaaaggtgaagggacttgcatagggctgctgggttagagagtcacagagccaagctgtgggcctgctaggctttccaaccaccctggaggaagtgagctgcccatcctgtggaggtattcaagtggactcagtgctgggtagagggtatggctatgtgttggggcccacctttgttatctgataaaagaaaatacatgggtaggtgtggtggctcatgcctatactctcagtgctttgggagactgaagtgggaggatcacttgaggccaggagttgtagaccggctgccctcccccacccccccttctacaaaaaaataaaaattagtggggtgtggtggcgcatgcctgtactcccagctgctcaggaggctgaggtgggaggatctcttgaggccaggagtttgaggctgtagtgagccgtgatcatgccactgcacttcaacctgggtgacaaagggagaacatgtatcaaaaataataataataataaaaaaaataaacaaaaacgcattgagccaggcacggtgactcagacctctaatcccagcactttgggaggccgaggtgggtagatcgcttgagcctggagtttgagaccagcctaggcaacatagtgagaccctatctctgcaaaaaatttaaataaaattagccaagcatggtggtaggcgtctgtggtctcagttactagggaggctgatacgggaggattgcttgaacgctggtggttgaggctgcagtgattcctgatcacgccaccgcactccagcctgggcaacagagtgagaccctgtctcaaaaacaacagcaacaaaacattgatggcctactccgaggcaggcttcgcagtaagcactgggtgaagaccaaggagagcagctcacatttatttacccctgaaccatctctatgggccatacccgagggtagggacctccttcaacgcctcggaggaaattgtctgctgaatgaatgaatgagcaaacacgtggaggactgggccgggacgcccatttagagactaggacacagtcccagggcggcccgaagtcacggagcaagatcgaatcggagccgattccaactagagccctctccaaagaccgtctgccgctctatccggggatcgcgacacccattttccaggcgaggaaactgaggccctggccctgcacctcccccgcaggggaggccctcgctgggcgggcggggtgcgagtaggggccgccccttctagggcctgcgctcggcggggtccgcgagccggcgggtgggcggggagctggccgggggcggcgcgcggctggaacctgagccggcggaggagggacccgcgggcggacgggcgccgggcgggccggccgggattcaggaagcgcggatctcccggccgccggcgcccagccgtcccggaggtaagtggggcccgggcccgggaggggcggctcagccgaggtcccctcgcgcccctggggacatctccgtggcccgtccggctccggggggtcccgaggctccaaaatgcgggccaggggcgcgggagacggaaggcaccaggttccgcaggcgccagcctctcagctaagtgcccttgggccggacaccggctctttgggtctcggttttatcacctgtgaaatgggcaccaacgtggggcctggggtagcaggtctggggggagggcggttcggttccctgagaccccaagccagggaaccaaaggcccggagccttgcagcccaccttaggagacttggaagagggatttcgggggacctaaggtttgcccttggcccctgagcatgtcggagggaatttggagtctggagcttccaaaggcttcttcttggttactgagtcccggagagacggctgtttcctccaagaggcatgaaaatctttaacctctagttctgccctggactctcaggacgtcccgggggcgggtggctcctgggggtgggtagcgggggtgggggtgggggagagagagactcccacactccccgcttgcctggaaacaccaaccacagatgcattcatcgagccacccactgctccagcctgccccagctgttccctctgtctgtcctctctgttttgcagatggggaaactgaggcttaggtcggggatctagacaattgggatttaaacccagggactatccagccccaaagcccttcccaccacaccaggtggcctgtcctggggccagctctgcacacagggcctggtgcccccggggtgcttgggaagtggcagggcagaggtgggccctgtggctgttctggctcagcttctaaaacaagagcctctgctgggggcagaggggccgtgaacccctgaaatgttaggcagataccctgtgggagctttgttctgggatgctaagaaccgcttgaggatttaagctttgccactttggctccggagcaagggcagagggtaagtcgggactccccgggctcctgaggagggtgacgaggtgggcttttgggggaacaagggtagaaaggtcaggcctgggttatctgcggggctaagagcgggcctgtgtggggcccggggtgtgctctgcagtcccctgctgtgtgaccttggcctggtcccttagctgtctgagcctttgtgttctctcctctgtaatactggggtgcctgagggcaagcccccagggctgtcgtgaggaccgatgaccttccaggaacctggcacagccactgttggctgccatcaatgtttaaccagttgtcgttgccccaaacattttcttaacaaagagggtgaaaaaagtcaattggccatttccacatttctctagttcattctgtttgaagaatgatgggaaccagaaagcctggacacccaccttgattggtgaattgcacgcggaaggggtcccagacacaaatggcaaatggcagtcatagttcagggcggttcactttgtaagatcaaggtggggctgttttgaaatggaggtaaccagggaatggttgcctgaacaaaaagggtgtgatgcccccaggagggatgtttcacatgagctccggtgaggatggctgggattccccaggtgaaacccagataccttatatctggggaaggggctgtggaggttcctcctgccttatctggtgccaactgggcctctgccacttactccctcctccagcaaatgctctctgcaagctcacctgtgccagctctgggctgggcactggagcagtgagatgcttccaatcccagcttcgctgtagcctgaggcgtgtgaaggcaagaaggattttcccttgtggccccccggggaggagctcccacacctgacttgtgagcatctagcaaggtgtgcatggatggccgacgcttagtaaatgtatgctgtggaatggatggggtcaggggagaatgccgt

SEQ ID NO: 1885023 - DNA, 4001 bp, Homo sapiens
gctctgggacaggcatcctgacatgccagccagtggctcttccagttttctggcaggactgccacagacttaaaagaatttaacacactatcatggtctttttggctcaaagtgctctgccaggactcttggcactcagcatttctggcccctgctcagccctagcgcctgcctcccgtgtctccttagcgggctgggacccccttaccttcccgtgggtgttccctggctgggacccccttaccttcccatgagtgttgagcgttgcgagggctgcatccaacatgcacttccggacatctgggtgtcggtcattgagggcatcagggacaaaaaactgaaagagtggcttcacctgagagctgtccaaatactgggagagcttgttgagggccaacgccaagccacacctgggaaagaagtgggagcacatcaggaggggcagtcagggggcctcctctgccagtggaacctctgctggtgcacggcaaggagagggagcttgcctgaggcaaacactgttttgggggcagagaacagcctgaagcccaccacccagtgctcacccaatgttctggaacaacccacttgtcatatggagacttgccatctgccctgattttacctcctactgggtgaccagccctgtgttggtttccccagagaggaatgtgagtgcaatgctcacccctctacctgcaaagcaggttgtaagagaacacagaggtaaaagaaccagatgtagaggcctgtggaagtgaacacattctccaagggcaaagtgttgttactctttccagtcatggagcaaagaatctgtgtcctatccctggctgatggtctggaatgaaaaataagccaggatgggcccatacaccaccctacactgacacacaaggcctcacgggagtggacacggccaggatgagccattcagagaactaacacccttgcgtgttttgagcctgctctgtgggaggcaagtgtctttcaatgtcccagttgctcccagacatctgtctaatcctccaactgctactcatgggctctgtggagaaaggctggtagcttctgttattgtgccctgcatatagatgaggaaacagaggcctggggaaaaggagaaacacgctcacggtcacgcagctagtgcaggagaggacactctaaggaacttacttagagttcattttaattgatttaactttagccacatgcggttagtggctacatcttggacagtacagcctagagagaggtgaggaggcaggtcagaggctcttctgaaagatggtgcctcacacggtccaatcccaccccttccaggggctgatggaactcaggcctccccgactctgagggaggtcctgctctttcattaacccatgctgcctcctcacagcacccacccagccaacctgccacatctcacaaagcttggagtagaacgaggctgaacaattgttatacctggcttcccactgatctggaggagattctgaaataactcgtcccaaagcatccagcactgggggcggccgctgcaacagacaagttggtaaatgctttgcaacgggcagatcaatgacctgggcaccaggattgtgaggcaggaaactagccgcagctaccctgagccaccgtgagccccgagattcctgtctggagcagtagcggggtgagcagagacccacccaaccgcacacacccagactgcatcagggctgcacaggtcactcacgtagagcttttcctggtaaatctccatgagcctgcccataacctccgccgcctgccgctggtaacgtgccactgcttgggagagggcttcggcccctgcctgccttacagccgcctcatgatagatcacgtcgtcaatcagcaaggagcagaggtctggctgcaggtctaggcccatcattgaccagagcctgtgggagatccaaggcaggggctgcttagacaaagatctgcagcacttgccctgccagcccagcccttcttcccactggaggctgagcacactgggttcagttatttcctaaaggaagagaggatgcagcaggagaaagcgacatgctggctctctcacctctcagccagcttccggatctcctcctccttgtcaaacttgaccacccagagtctccgcagaaggttcaggccattcttctcatcagtatcaggtgctggcaataccatgtggagttccatcagcccctggaaggggtgggattggaccgtgtgaggcatcatctttcagaagagcctctgacctgcctcctcacctctctctaggttgtactgtccaagatgtagccactaaccgcatgtggctaaagttaaatcaattaaaattaactctaagtaagttccttagagtgtgaggtggtaaaatgtttttttaatgtgaaaattaaaacgttaaataaaccagacagataaaaacctcagaaaaagcgtattccttttgttcaaaaaaattttaaggaaaaatttactatattgtcatcattttcacattttaccaaaagccagtgaaaactctgtcacatatcaatagcaggaggctgtggatcagcaggtaggaaccactgtcttaccactacaaggggatgcttcagtttttggtccaaaagccatgaagaaaaaccaagtacatggcagtgggctaaagaattgaactcctcctgcaagttagctctgtccgtggaagtaccaaggtccacattccagtttaaaaattaagtgaagtgttccaaggtaaaggaaaaaatacagtgatacatcatgactgcttagtgttctgattctcagagagaccccaaccatgtgacttcttctctttgcctctaggcctcccaccagagtgagggacattctctcaaatgcccatcatgcaatttgcacttgcatagagtgacaagggacactgcagtggctctgagactgagcacacacccggagcacggtttcccgcacgctggcacacggggactgcaaggcacagagcagcacgtccacctcctcctgctctgcaaaggcacagccatcatcaccactgctgctggcacacagggtggtcagggtgtctgaagccagaacctaaggagaacatcaatccactggttcagtcagcaactcatttactactagggggccagagagggatatgcactgagaacacccacccctacagcactgcaagggctaagaccccagctccagtggcaggacccaagcaaaacccctcactagctaacaacagtcaggctggctctctaaagcagtctttctaccaaagtccaaaagtaagggctgaaaggaaactaggactccaccctttacactgggacttgaggtctgggtcacgaactgagtcacagcaacagccaactgaaaaccacatcacctgtaagcgaggcgagcccgtcccgatcacccaagtcagaagacgcagcatggccacgcgaggcagcaactccgggccattctaggagagaacggcaggtaagtcgagatgaggctgtggggaggtctgtaacccaggcggccaacggcagggcatcctctcacccacgggggaacattctggatcatacaaccggccccaccacagaaacctcattaagtttacaactaggtccacaggtgctaaccccagtcaaccatgatcctcaggaactaaaaactaaattctgaaacttgcttgaaattcacactatgaaatccagaaagaccgtaaatatatgaagagacactcaactttaaatgaaatgcaaaataaaatgagattatcattctttcactcatcactgacgatattaatactatctgaggttgcattaaggctttgagaaaagaaaactcttggtgagagtatagctcagaatatgccatataatctagtaattccatgtccaatgaacctgtcctaaagaaatgctcacactggttaagtaaggggcatatacatacaagagggcacatcacagtgctgt

SEQ ID NO: 1885024 - DNA, 4001 bp, Homo sapiens
atgaggtgaaaatgcgaagctggtgataaacgaaagttgtgcttcaagagtttggctcctagtccatgtttattaattgtttgctgaaatgaagacaagtgtgagatggtaatataacactaaagtgtgctaataagtccatggtgctatgctgaaagtgcaaataagaccttgcaagtaagtccatggtgttttggatttgatgttagcggtagcagaaagccactaatataagccttgaatggtgttcagggatcttgtaaactactgaaaagtgaggaaataaatgtatgtccaaggtcattcatttatttagcggcctttaaagaggaacattttcactgtgagataatagttgctgtagtgacttatttaagcaagattacaggctcttctctaaacagggctgcacctctccattcacggcacaagaatgcacaatagactggattttgaaatcagtctgccttctgctaaccaagccatgcaccctagtgtagggctgcatctcctcagagaaaaggacacatttttccactttgcacaaaggcatccaatggggtaatggcggccctgtcttgaacaatctaaaaacacaatgcatgcttttctgcttagacaacttctcagggtcactttcagacactgggctaagaaccaatgaaacaagcaataaagctgaagaaaaagaagataaaaaacaatcaaaatgtaagatagaggaaatgaaaaagaacagcaaagtgagctgaatcatgaacagcaggaaatctcgagataagtggaggctgtccctacatatttctggtactttgagtaaacatggagagaaagttcacagtgacctaatcagaagcagaaatgaaaatggggcaaaatgccatgtgggggcattttgcaataagaagcaacaggagtctggcacctaaatccagcaactgtgtagccagggttggaaaaagtccaggttaccagcaacatgcctgttttttacggagaatgagtgaaatgaatatgctcccaatggtcctctgagttcttcacattcatcccaactcccttgctcctctgctccagcactgcagtggaactggatggctacagcttacattgcacgtttcaatttgggcgatggatgagaacttctgtactatgtttgcatctgcaagactctgctactcttgtttttaacttctggatgttcaggtacacattgaaaaaaggaagtccttaactctgagaagcagtatcgtcctgaaactacctaagaaatggctcaaatcctttcaatttccaaggaaagcaaaagttacacattagaaactgagatgacaatacctaagcatataatttcattgagatagattagattagcttcagggacatatatggctcacagtatattccatgcttctccataggccaggaagatttgcagctaacacccttcctgaattcttgtccctatagggcttttgtgtgggacatcattgatccctatgagttccagctgaggaatttatgacatattctattcccccctgagattagcctttaataatttatttattcatccaacatttaagagaccccaatggtgttagatgctgggaacccaaagacaactaaggcaagatcactgtccccaaagtccttagtaaggggagataagacatgtaatttttaaaagccacaaaatgctatggtgccatgacagaggtatgtctggggaacagaagggactccaagaaggaagaggtgcttccaggtaagacaaactgtggaaataaagcagctatagggcaaagaacttgttgcagtcaggaagatgcaggtagatcaggtgaccaattacaatcctgttcttggagctggtaggataaaggacagacccaggtggaagaggcgcaggtgaaagttttgctccttctggggtcttcctctacattttgacccaggcccgtctaggtggaaatgtagaggaagaccccaggagaagcataactttcctttaacccatatatcacaagacttggctgccttatgatgaagctatagttcccaaatatgtcttcaatgaagaaaatttaatgtttaggaattctagaacttgcagagttgggagttgcctgggagatgaaatgttctctccatcacctccagcccttggtgctgagttcattagcatgtttagttctaattttagctatgaaaaaatatattttaaaatattgacacatttattatttagtgctggatttaactgtttacactttcactgataaaagattaaaaatatgtcttactatatactgctgcctatagttaaaacagcatccctgtttctctttttctctcttgttctctatttttgaaactgagttaataatccccttgatgtagagatgggggattttcatcagtaccagatcatttcacctgccttttctcctccctgagatttccaatttcctggtgcttccttttcactacatttaccacccatttcttggttttaggtaagatcccatggtctctccctatgaacactatctctcacatagtgtcagcatttctaacttcttaccctggagctatccacctggatctttcacctaaactcctgagtgcttctggagaaggtaaagatctgttttgagatgaatctcaaacactgttaagtagggcagcatttctaaagtccacagagcagcacagtggtccaccttcaagtgtgataggcactacccactacctccccaagagccattttcccttctttcagtgtgttcaggtggtaaggagagatctttgcttccaaggagagtggtccccgactccaggataggcctaaccagtcatggaaatctccttccctttatcaattggttgttcttggtttgggcatttgaccttgttctggccaataggatataaaaagaaatcagctggagatatcctaagtaaagacaagattttgtgctgtgttaatttccttgggctgccatcacgaagtatcacaaactgggtagattacaacagaaatgtagtatctcacaattctgaaggccctcagactgaaataaggtgtcagcagggccatgctccttctgaaagctgtaggggaaaaaaccttttcttgtctcttcctggcttctgatgcttgccaatgaaggggtttggattatgccaccccacaatatgccactctggcatatggattattttgacttgaaggcaactgagaaaaagcagacccaggatgagatctctgtccgcctcctatctgcctgaaaacagaacataagctccccttgtgaaagtgcccccctctacccccctaccagtaaagggataacataaagggacaacaccttatcactggagacaagatgtcatccagaggaatctacaaaaacaaaacgtattaactagccctcatctaccataagtttccccatatatttgccttcccacaatttgctgcccctagaagctcaaagtcattttcctttgtcttgccacttctctacaaaattattgttctttgctcaattctatgtaagttcaagttctttttttttttctttttttttagacggagtctcactctgtcacccaggctggagtgcaggggcgcgatcttggctcactgcaacccctgccccctgggttcaagcagttctcctgcctcagtctcctgagtagctgggattacaggggcgtgccaccacatctggctaattttgttatttttagtagagatggggtttcaccatgttggtcaggctggtctcaaactcttgacctcgtgatccgcccaccttggcctcccaaagtgctgggattacaggtgtgagccactgcaccagactaagttcaagttctaaccactcctttgaattacttattactgaatactcctatgtgtatgtgcaatgcatatttcaataaacttgtttgtttttctcttgttaatctgtcttttgtcagtctaatat

SEQ ID NO: 1885025 - DNA, 4001 bp, Homo sapiens
ggcatataccttcaaagttaattgttgaattattaacaaatagccatctgcccttgctaatctagtaaacatactgaagaatttattgaaaaggcttgttgctgtgatgtataccatatgtgaaatacaaacaaatgtaaaatgagagcaaacttatatcccttgactggaaaagaagactgttattacataaaaatgacaactgctatatcaagaccaattataccaaccagtttatggcttactctaaagccggatttaaggagaaacagtaactactaacattccattttagacctacgtaatactctagccaaggaacagtaatctcatttcttgcttaaccacaccactgtcattgtggaagcctgggcttactgtatcatgaaattgaaatatgtgtacaacacacacttttgcacattggtagacagcaaagataaggagaaaggcaggacacggaaagatttatttgccttagagaaatgtgttggattttgattctgcagatgacagtctggtaaagggaagaaatactagaaagaagagagaggcaagggagcatatctctgtataatcaccatttgccatcacacacatgtgaatgcgcatacacactaggctgttagctaaatttgtttgtacattgcattcctatgtgaaaagattgcttgtgttttatcccttctctttggcaaaaccatcctaccaaatatctgttcttgttcatacacggttagggttagatctattggaatcactgctctattaatgaagtagatttctaaagaagtaccattcaattttttcctctcaaaagtaaagactaaattattcagaattggtttccatattttaactggtcaatccaattttccttcaagaattgcatactttaaacatctcatactgcactgactgagctggccaggtgttttgtatttaaatatgtccaattccattgataaaagtaaatctctgtctataaaacatatatcctgacttattcctttattatttggtaactttattattctttcctggttttgggcatattttgttccttttttcctaggttcttgagataggagcttatattcttgatttgagtgttttcctcttttctaatctatctatttagtgctataaatttccctctcagaaaataaactacttaaatacaggtgttctgtatttaaatatgtccaattccactgataaaagtaaatctctgtctataaaacatataacctgacttatataagttgctcatgcagtcctgttgtaaaaaaaagaaaatttaaattactcttactcattgatagaaaaaatctttacgtataaatcaagttttcttctgatattgtcattcaggcatttatttaacaaatatgtattaaatactgaatatgtgtcattaaggcaaggagctgagaattgacggtggacacaaactcagatgactccttccttagtacagttagaggaaagaagggcaaacgaacacatcaaaggagcctaaagactaatatgaatctgcaagttttatacaaaccaccaagggaaaatgcaatgtgctaaaagaccatgataaagggatttgacctaatcagggaggtcaaggagggcttccctgaggaagtgacaccagctgaaatctaacagacaagtagcatatatttcaggcaatgttcctgggacaggaatgagcataagaataactgcagggaaacaggagcatgtggtacattagacaggagcacgttgtaccttggaaggaaagagaatgattaggatcgagcaaatggccaacactttcaaatgctgaggagtcaagcacagtgaagactgaaaatgcccattgactttggcaagtagagatgactggggatgttaggaaaagctgtagctatggaatgatggtgacagcaattggagaagattgcagagtaaattccatttcttaatcaggaacttactctgcaatcttctccaattgctgttgaagctgttgagtgtagacaaggccttaaagagagaatgttgtagctgtcaggagataagggattagagatttttgttgttgtttgttttaatgaggtagttttatgaatttgtttgaaaatgtggtaattatcaggaaaataagcagatttacatgcagttgtaagaagtaatacagagatataccctttaaccagttttccccaggtgtaaaaactgcaaaactacaatatgttatcacaatcagaatattgatacagtcaagatacaaaccagttcatctctacaaggatccttcgtgatgccctttatggccatatgtggccattgctgatttatagagacacaatgaatatttgtatgttaatcttgtatcctgagactgggttgaactcacttattagttatgggatttgtgtgtgtgtgtgtgtgtgtgtgtgtgtgtgtgtgtgtattctgtaatcatttatgcaaataatcatgccatctgcaaataaagacaattttatttctacccttctggtgtgtatgccttttcttcctctatatttctgtttatatttatttatttattttttgagagggagtcttgctctgttgcccaggctggagtgcagtgttgcgatcttggctcactgcaacttccacctcctgggttcaagcgattctcttgcctcagcctcccgagtagctgggactataggtgcgcaccaccatgcctggctaatttttgtatttttagtagagatggggtttcaccatattggtcaggctgaccttgaactcctgacctcatgatctgcccgccttgacctcccaaagtgctgggattacaggcgtgagccaccgcgcccagcttccctatacttctttattaaatgagctagaacttccacagatatgttgaatagagggtgagagtggaaatacttgccttgttcctgaacaacagaggagaaacaatcaggcttttatgattaggtatgatattagcagcaggttttttcataggtgatcttttgtcaggttgaggaagttcctttcaattactagttttctgatagctcttcattatgaatgaatgttgaatttattaaacaactttttctacatcaattaatatgattatataatttttctgtagcctattaatatggtagattaccttgattaattttcagatattgaagcagccttgtacctctggaataaattccacttggtcacagtgtataattcattttatagattgctgaattgttgaattcaaaatatttgctaatattttgtcaagaattcttgtatctatatgtttatgaaggacattagtttgtagtatttttttttgtcgttgactttttattagggcaatacaagcttcattaaatgataaggagagtgttccctcctcttctattttctgaaagagactgtgaagaaatggtattgattctcccttaaacattagtagatggcacatggaatacagaaataccagccacctgcctcctcttctattttaaacattggtagaattttccagtaaaaccatctgtgtctggagatttcttgttgggagtctatttaattacatattggattttcttaatagtaataaggctattctagtaatttatttctcatttggtgagtttatggtttttgaggaattagtctatttcatcttcatctaagttgtcaaatttatgtgtgttgaatttctcatagtattcccctattacacttttgatgtctgcagcgtctttagtgatatctactgtttcacatgtggtactggtaatttgtgtcttctgtctcttttctttgctaggcttgtagaggtttgtccatttcatttatcttttcaaagaaatagttctttttcattaattttctatgtttttatgttttcaatgttattgattcctgcttttacctttattattccttcctggttttaggtatattttgttcctcttttcctaggatcttgagat

SEQ ID NO: 1885026 - DNA, 4001 bp, Homo sapiens
gtgttggtgctcaatatttaggcccctggagttgggctgcaaggaaagctttcttttccccagaggctgtgaaggtgggtggagatgctacccccgttccacttcagtactgtgtctcattcccgattggggcagaacccagacacatatttgacccctagcatcctcatcaggacacctttgccccgcccaagaaactatgctgattttacttgtcccataagggtcttctcttgtgcaagtgtgattctgattcccatagcctcctgggcaccacccacgccctcccaggcacccacacatccctccaactgcctttctttcccagcactcagccaggcaggcatctgttcccagcattgacctatttgccaaaacttctgtctcttcctcttggaggaaagtggaaacctcggtcactacttcctagaagaaagccaatcaaaagatgcagcaaagtccttaatgtgttacctttctttttaaataatgcatttaaaagaacgcctctaaattctcagtactttaaagtcaaatgaatggctcccattggcaaatgctctaagggcttcctcacctttccgtcatcccacctgggaaccagccctgggtggaagaaacgatgaagaagcaggagaaaagggagaaataagtgagttgtgtttgtgagcaaaggccaataattgcttcaggtgccacagagcatctaaaccagactcttgagaatttgtgactgtaaatatgaacgttcaaatttcattttaaaagtatccaagttttccaatagagacagaatcagatagtggttgcaagaggcgaagtgggggaagtcacctggctgcaaacacaaggaactcaggaactttctgagtgggtacgatggaaatgtcctatatcatgattgtgatgggtaataaaagtattcatttgtcaaaatgcatcaatactcttaattgaggtaaattttactgtagttaaagtatttcttaataagcctacctttatggccagccacagtggctcacacctgtaatcccagaactttgggaggccaaggcgggttgatcacctgaggtcaggagttcaagaccagcctggccaacatggggaaaccctgtctctaccaaaaatacagaattagccgggcgtggtggcatgcacttgtaatcccagctacttgggaggctgaggcaggacaatcacttgaacccgggaggcgaagggtgcagtgagccaccatcatgccatcacatcccagcctgggaaaaaagagcgaaactccatctcaaaaaaaaaaaccctacctttaaaacatgcatgtaaactttcaatttacaaagccactcaccctgggaaaatataaagcaaaaatattaagcctaaagtccagtacaattcctcaatcaccctagaagccagctatactctagttcaactacttacagaagggccacataatagccaaagtaagagaaacctggagcccccattcgcccctgctcccctcagcaacacaacgggcccaacaatcaggagacaggacgagggagacgtactgtgaaaatctttcttttattactgtctcatgtggcaaaataacattttatacaaataagtcacctagtttactttggacacaaagacaataaaaactggaatgtgattttgggggaagcgggaaggaggaggaaggacagatcaggtcattgatgtttcttatattctgtaaaaaatagatttacaggaaaaaaaatagactttcacaacttcaatgactttacacggtcctttgtaaaaccagtggtaaatccacctccaccaaatccttcttgaggctgatatgttctgtgacatggaatgtgagtaacacaatggttcaatgattaggctcctacaccaggtacagcagcacctgatgccacaggaatcctcgtgcactggggtgaggagtcagtcctgtgaatttcaggacacactgtcctcatccccagacctcactgacatcatagtgacactggccatcagaagaaagtgactttacagaggggaaaagagtatcctggaagcgtaccggtggggcaggacacactaaggcaggactcacccagtttgtacattagacacagcctattaaatccattccagaaatgagttccacttcaactgaaaaaataaactgaagattgcccaatcactgccatttcacaaatttccagtttatggtcagccccaaaatcacattcttccaccctatgtattggaaatcaaatggcccaaagactgaggtgtcttcaggaagcacatgcttgaaaaatgttttctctgcaaaacagtattgagtaatacataaggagacatagcctactttagcccaaaacttctttcacttgttatgtccttttacctcttaaaacatagaatgaaataaactcggatcttctttggagaagctagaagggcattttggcccaaaggctgtacaggaaaagagaggctctctccaggagactgcaaggcaaaggaacagaagcaggaggggcaggccctctggcaccaggtgggcctgctactctgatgaaatgtgctcccagctcttgacaaagggcagggtctcctatgcaggtagtttttttgccgcctcccattgtatcacccacaaggtaactgctatcaacagttcagattccttaataacatggcagcctgaatggttctgttactttcagagaaagtatgccttgcaattctctccccaactcaggtacaaacgcttgaatttcaaactcatactggtttacaccccagagtggaatgcttctcaagatttcctgagcagctagacacaggaacccacagccccagatacagaacaccagactttcagaagcagcaaagccctgtcctgctgggcatggaccaagcactatccgcaaatggtctccagtgagactaaggcaagctaacaaggaagaggatacagcacaactcaagccagattgcccacctcctccttcctccacatcctctttctagcaaaagcgaacactgcagataagagatagcccactaatgtagcagatacagtgtgcccaggggcatgtttccaagacacactctactaagcacagctctgggcagctccagaaccacatcccagataatactcaaatatcaaatagtagaaactgtcccacctgggcctctgtcaaagagagaagggattgttgttacgcttgacaggaacatgcaaatcccatttgaggagccacaatgagaaacagaaggtgaggagacagtgctaacagccctggcatctttctgccagtgaggaggtgggaacaatggcaatgcagctttcccctgcagcataagggacagagccacacgtaaggcacctggatttacagtggacgccagttctgagagtggccggtctggtgataaggaacccactccacaggaggaatggtctctcccctctctcggggctgaatccaaggccagcacacaggggtaagctaggaccttctcagtgagaaagctgccagcatgtggcattgccaagactctggcctgggacaaagcactgggccaaggttcggggccactcgccctaaagcccacacagggagcagcactggtggtggatggacaggaatttctgtggccacacactgtctcttccatccctggcccccatacggcctttctcccaagcacatcaggacactctcctgtcacaggtactgtgacacctcacagtcacttaccagatacctgggcctttcctagtgacatccttctactgatgctaactggaccctggccacatcaatcgtctcatcagagggtttgtggagtctgtccactaagggtctgaggacaaaagcagcccacagatgtgcaagtgaacttttttgagaacacatcactctgacaggccacatcagcctattttgccctttctgaacacctaaaacaattctaactagcagtctgaa

SEQ ID NO: 1885027 - DNA, 4001 bp, Homo sapiens
ggcgtgagccactgcgcccggcctaatttttttttttttttttttttcagtagaaaaggggtttcactatgttggtcaggctggtcttgaactcccgacctcatgatctgcccacctcggcttcccaaagtgctgggattacaggcatgatccaccgcgcccggcatggcttcatcctttcaacacctctaaaaggtaggtattattatccccattttatagataaggtaactgaagcttagagaagttagaagacttctcaaataagccagtaaatggagcagccagaattcaaaccaaatagtccatctctagtagccatgctattaaccactcccatccaccagttcatttgagaggaaatacctcttattggactggtcacagataaggacagaagtattcaagtttatataaacctgatttttaatcccagctctgccacttactagttgtttgaccttgggcaagttatttaatctctctgagagtcagtctctatccaatgaaaggcgataatagtatcaggattaaaatatgctcaaaaatttataggacagtgcctaatgatctctgttcttaatatcagacttgatataggaggtcagagggaagaaaaccccacaggagccctgatgggaaatctgtgatcccatccccagcctataatcccagcttcacctggaaaaagtcctgggaaaacccgccaagcaacaaagccctcttaccaatcttcatctggaaattgttgaaggagtgctcattgatgtgcttcatctgctccatgagccgcatggcgtagtcagccagggcagtgatgtgggagcggcccacctgatcgtaggtgctggcgttcagccctgaggcagccatgtaggtgctaccaatcgtcttgatcttttccagctgccggaaccgctcctcgctgataatctgaacaacacaaggagacctggctgtcaaggcaaagaccccagacccagccctgccccaacactcatttcttgccacgccttggctgccttccccacttccctgtctcaagagcccccttccagctgctgctatcagtgtaagactgaggagctgggaaaacaggcagcctaggactccaggcaggacttgggcatacagcttcagaaggtccctccagtagctcactcacagaacacagacccacaagtgcaatattaagcaatttctccaatccttaccttttgggatactgagtcccagagtgagcaagtgacttccctccagaacagtgaacagcccattcctgatctggatgttcaggacactacctcacattttgcttcaattttctctattcagaggaccatcttgcttggttggtctcatgaggttctgtccacagactattgccttcttcttcagtgacatccacctggtacctatcctatccccctacagatcaagtcctcccctgctccccaacagtgatgaccctgccccactagggctgacccccttgctgcctctgacaccttcatgggttcttgcctctgcctccactgtgcatacccttacccctgatgactctgggtcccatcaaatctctctctctcttcccagttccactcacccattccaatccctggtctccaagtaccccccactctctgccaccaccagccaactggaaaagtacctcatcaaagtcagcgatgatctcgttgagcagccgcaggcactcgacaccctcattgtttgcctccagctccacatagaactcagagaagttggcaatggaggcaaacataacagccacacactcacacgactgatagtagagttcatcattgcggcgctcccgggccaggaagtgggccgccacgtccttgggcagaatgttatgcagcagcctccggttgtatgcctgtagctcctccatctcctccttctcccctgttgcctgtggacaccacacccatcacccattgcccgacattcacaaggggtaggtgtggtggccaaggcttggaagtgcggataagagggaatcacatagagaaagaaaggcccagacagatgaggcctaaagaacaggcaaaggggtaaagggggcaggtagaggatggggcagggagtaagggatgggcacagagaaggaatggaaccagggtgggcctaggtgtggcctgagccttagccagctagcacaagatacatttctggcctggcccaggctccgcccctaggttcctcctcttcccccaaaggcccacacagtcacctgtagtttccagaggaagtctaggcgggcagtcgactccacctgctgagcatgcagatacagcgccagcgcaaacaccagcagaatcacaggggtcatatatttgagggccaccctccctgcagctggactaaggataagcagagacatgcttggtgtctgaaggaggcatctaatggctctaccctttgctgcctcggagccctcacttaccagtccagcccatcaaaggtctcattggaagaagccctggtaagaagatagaagagacaaagtcatcagtgcttcctggattgctgggtgggcacatggaaggggagacaagagactgcatttactgagcacatactgtaagtcaggcattgggccagggcttttacttacattaattaactcattaagagtagaggttaagaaaacctctgctcttagagactcctctacttaccagctatgtgacctgagacaagtcgcttaactctctaagcctccttcctcatcagtacaacagggatcagatctaaataatgtatgtaaaaggcttagcacagtgcctgccatatagtcagccttccataaatgttagttactataatctttacaactaccctgtgatttaggtgacattgccattttacagatgaagaaattgaggctcagagaagctaactcacctgtctaaagtcacacagctaatgagcagcagagcagggattcaaacccagcagagaccagaggctttttctactacaacaagctatggccacatatcaaaggaatggggttttgcagaggaaaagccagtgtggtgtcccaggcaaagcccccaagcaggaatcagaagctttggttcctaaccagagccctgccaccaagcagctgtatgtcctataggtggttaagatggtggatgtgaaagcaccatgcaaatgtaagagggaatttttttttttaatgtctagcctaaagacacaaggatttcccaggactagggtttccttgggggtaactatttggggtcacatgctgggagctcctccatctcctccctttcccccacaggggtgttgtggcattccaaggcacaaggggcatgggcaccagagaggctcacagtgacctagaaaggtgagggaagctcctggggtattaaaggacctgagaataaactcacaagccatggacgccaagcagtaggtcatagttgtcaaagatggtggctgggggacccagcagaagcagcaccaaatagatgagccccaagacaaagatcatggccaacttcccgatgctgctgatgtgcaggaagacagagctggccaagagactcagcagcatgttcccgatgaagtactgcgggggtggcagaggcagcgttgggtgaaggcagaggccacagcacccttgggcagggagagccctgcactctcctgcctgacctaaccttcccaccacacccctcaaacccccatatcctccaccttccatgcccagcccctacaacacaccagggcccctggttgctcctagtgtgggagactctggtgagttcctgggtccccagcgcccatcaccaggcctggcacagaagggccaatgtctgtgccaggacagcccccccaccgcctgagcactgctcgaacacctcaggaaagctgcaggtgggcatggtgccctcacacaggggagcatccaggcccagagagtaattgagctgctgcaggtggcaggcagtgatgtcagc

SEQ ID NO: 1885028 - DNA, 4001 bp, Homo sapiens
agtctggtcttgaactcctgacctcaggtgatccgcctgcctcagcctcccaaagtgctgggattacaggtgtgaaccaccgcacctggccaaacctatgtctttttattgggaaaggaaagtttccctgctgacctccctgtttagtgagaaccgagttattcttgcctttgacttgtcactggccaaagagaaggagaaaaccaaagaaaaggttgaatcccatcatcattcactttctgaggctgagagagggacctgtcctccctcagattgggctcaaaggggacagaaagggctgctgggtgtgcacatatagggtggcctaggatgtagacttcttaggaacttttaaagataggagatacttaatgcttaccttccagaaggagaaatggagacacagaaaggttaatgtactggccaaaagtcacagagtatgtgctggagccagggttggaagccaaggagtgtggttccagagtctgtagacacacgctagccacaggcacgttggatacagtacactctgggatctggacctgcaggaatgcaggcccgtgttgaaaaggtgccaacccctctggctcattgtgggtcctggcaatccacattgcagggtcaccttttttttttttttttttgagacggagtctcgctctgtcgcccaggctggagtgcagtggcgggatctcggctcactgcaagctccgcctcctgggttcatgccattctcctgcctcagcctcccaagtagctgggactacaggcgcccgccactacgcccggctaattttttgtatttttagtagagacggggtttcaccgttttagccgggatggtctcgatctcctgacctcgtgatccgcccgcctcggcctcccaaagtgctgggattacaagcgtgagccaccgcgcctggcccagggtcacctttttgactgagatgttttctgttatagttgtcccttaggcaatgtgaagaggcacccctgtccattacaccgtaatttgacttggccttctggatcattttatgtgttgacatttgcccaagaggagcctggggattagactggaacttttctttgctcttgtttttttttttttttcttcccttgagccataaaattttgctggcaggtcaggggaagaaccaggggtaagggtctcttccttcccatcctcctacccaggagacgtgctttgaggagagcagaggccccagagcctgcagcctcagaggaccttggaggtggacaggttgttgtaatgatcttcctggccctcaagcaggctgcgataggtggcgatctcctgctccaggagccgctggtactcctgattctgccactcaccatcagctcgcacatcgcccagctgggcttcaatactgctgatcagtgcctggatctgcaccagctgggctccaaagcatgcctctgtttctgccagtgtgccttctaagggagctttcacgctgagctgcgagtgcagctcaatctcaagaccctggagggtgcactgcaggtcagtgacctcagacctgcttatctggagctgctctatgtggccagtgacctcctggttcagttcctcagtccagctggtgaaccaggcttcagcatccttccagttctgcttggccatgatctcatattggctttgcctgtcactcaggatcttggcaggtccgagctgaatccaccctcacatggacctggtctcccacttggcccctcagggcattgatttcctcctcatgcttcttcttcaggtaggccagctcttccttcaggcctttgatctgtgcctccagatcagtcctggccagggtcacctcatccagcacccaaacactcaaaccaaacttggttcagaagtcatctgcagccagttgagcattgttgatctgcaggacaatcctggcgttctcaatggtggcaccaagaatcttgtcccgcaggtcctcgatggtcctgtagtagtggctgtagttgtgggagggcctgtgcccctgcttctggtactagtcacggagcttcacctccagcttgctgttggctgcctccagggcgtgcaccttgtccaggtaggaggccaggcagttgttgaggttatgcatggtgagcttctcgttgcccgcaagcaatccgttggacccagacaggatgccgctgtagccccccgaaggaggacaaggacacgccgcggctgctggagcccctgtgcctgctgggggactggaacttttctagtgagcagtagagactgcagtccagctcgtaggcagccacagtgctgaaggaaggagcagccattaggatagttatgtgcttgtcctggctctgtcactacaaagatttgtgacctcaggcaaggtcccgaatcagatggtcttaagacagtgtatcatttcatctgactttgatgggcacagacatacagtccccctttttctgtctcatttccctcatctgtgaaataggggaactggagggataatctggataaaccttaacatgcttgtcagaggaaagtggggccctgaacaagagctgggaggcccccagtacttctctctgctatctgttctgtgtcttctgtccactccttcatatgagctacaaggaatctctgcaaaagaggtgaggtgggaactcaaactgagaggagtggagactgaggacaagccaggaagatacgtgccgagaaagatgccaggtgaactcgatcttagaccccacggcggcgttctctctgggccctggctagtgtcagtcagtgatctcagagtcagcagatctatttctcgcatctggatgccaaaaagcaggaaatccctggtcttggctgggatcaggggataatctcagatgtgaaggatagggcagcaagccctcagatgggcttccaggcaagtcttgtccccagtgggagcccataattccttttttcagccacttggatcttttgctttttagttttggtgactgatcttctgttccagccagggaaaaaaaattatctgcgcagaggcttgctccaggattctctttcttcttcttcttcttttaactagggactgctgatgtcgtcacttctgttttattttcttttggaatttattcctattttacagagtccttccctggcctgatgctctcaggcataagcttcgtggttaagcttcccccttccccctaagtcttgttctcttcccagacacaggcacttcccccttggctgtctgagtaaacacagcccctgcctcttgggattctacctaatagcccttttgccatttgaggcctggcctggtatcaagtttcttcttttaaaaaacagccttgggctgggcgctgcggctctgcctgtgagcacttcgggagacggaggcaggcagatggctctgggtccaggggtttaaggcccgcctgggcaacatgatgaaacctcatctcttcaaaaatacaaaaattagctgggtgtggtggcatgcacttgtggttccagctatgggtggtgggggctctggagcaggaggattgcttctgagcctgggaggtggagattgcggtgagctgtgatcgcacaactgcattccagcctgggtaacagtgaaaccctgtctcaaaaaaataaaaataaaaataaaaaaataaaaacagcctttaaaacccacatttattttgatttctaaagcaatatatgtctgttgtggaaaatttgggaaataaaagtaataaagaagacaataaagatcaaccttaatcccagtgcccagagaattaatgtttcatgcattttatttcactttcttctggaagtatgtatatacatgtgggtatgaatatttaacatagttggagccatactgtacctaatggtttataatacgttttgcttttatgttctcactaacccctgtggatatgaccctagacatgtctttgaattttttgaagttaaattatgctctacttatttagtgaccata

SEQ ID NO: 1885029 - DNA, 4001 bp, Homo sapiens
agtcacatacaaggtggtgaatttcagaagggggaactgaatccttagggggaggggaaaaacgaaggcggaggagcaggcgctgatccaaccccgccctccccagctgcagcccagcaccccggccctttgtgagctcagctcatcacacgctcccttccgcctgccaatcccgccctgttgctgggcctctgtcccttctccattggtgccagctctgaagcaatcttttctggggcgcctgcaaaggacggatctgtgggtggaacgaactgaaaacggatccagtgactcatcccgattcttgcacattctagcacatcgcattctaggtcagcagggtttaggttttaagagcgtgacttgatacctgactcctgagtccaagtgggacatttagactttgggaaccctttcggaaaacagaaaagcagttgttgcaacaacaaaaatcctttgtaggacagggtttcttaatttcagcactattaatatgttgggtctgataattctttgttgtgggggactgtccctcatagaatgttcagtggcatccctggtgtctaccaacagtgctagtattagtagtagcatcccctaacctcccctgagttgtgacaaccaagaatatctccagatattgccaaatgtcccctgaaagagcaaatcactccttgttgagaaccattgttgtagagaaacatcagacacctgcgttttgggaggccattttcttccctgtcacctcagtgactttggagaaaggtttatttctgtttgcttcaataaccatttaagtcagggaatgctgggatgttttcaataatttttttctgctagagacaacattggtttctctttgcagctaacctttggcccattacccaccctaccctcatcccctcttcttcctttttcctcctcctgtcctcctctcccgcccctgcctctgcagttagggctgttttttctctgtaccttttggactctgaaaaaagctatgtcacaaagctggtgactcagcctttaaacaacatgaatcacaaggcttgcagcagagtaacagccaaaagcaaccagggcgtggttgaaagccaggcctggtcacctcagaaagaatctcagctttttaatcccttcaaaactccttcccgaaatgtaggggaaaaacaaaaaacaaaaactttgcagaaatgtgtattggaaatcactggggtatcctgccaatcctggaaaatgacacttttattattcgttttaatttcccagtaacacatgaattcattctctttaaaatgttaaaaattggagatgtcaaagtctgttttgaacaatgcacagatcttggattttcataaatacacagaaacatgggttaccatagaaaatatatagcaggttcattttgctttgatgcatattttaagtctgccgtttaaataatgtaatgttcataacttaaaacaagaatgcagccttttcctaatggcaaaatatttttcagttggtagcctctttttctcttttttttgaagcttttaagggtagaaatcaaaatagcctccctacctccaatacatttgtagaaacagggactatttgtagaagagtccagaaggaacagtggctgggaaattgagggcatgagggagacttttcactgtacactttaaaaagacacatttaaaaaatctcaccatgttcgtatattttaaaacatttaaaaaatatactgaagaaatgacacgtagggatcacaaaataggttgtggtaaaaatttaaaaagctggctggtgatgcttttctccccacttcttttaccaaaatagaattgccctgtagaattacatttcatatttgacaccctaccctgcactgaaataaggttgggattctattcctgtcttttaaaatctccggtttaaatgggtccgattattgaatggatcctgcttacaataatcgtacccattgaaaccagagaaatttccatgcctccctgttggcatcaagtaggacctttccatacctggccctcagaatgtacaggaaggtggaagaacagtctagaaggatgtcgttcgctcagccttgcgttccagctaaaataaaactgtgtggggtttccgcctcttttttccaaatttaacctggacacccagctcctctgcagtgtctcccctggaaagttctcgagcgttccccagctttagggccacgcccgccctgagatctgccgagtcattgtccttgtcccgcggccccgggagccccccgcgaccggcctgggaggctcagggaggttgaagggggctgagcaaaggaagccccgtcattacctcaaatgtgacccaaaaataaagacccgtccatctcgcagggtgggccagggcgggtcaggagggaggggagggagaccccgactctgcagaaggcgctcgctgcgtgccccacgtccgccgaacgcggggttcgcgacccgaggggaccgcgggggctgaggggaggggccgcggagccgcggctaaggaacgcgggccgcccacccgctcccggtgcagcggcctccgcgccgggttttggcgcctcccgcgggcgcccccctcctcacggcgagcgctgccacgtcagacgaagggcgcagcgagcgtcctgatccttccgcccggacgctcaggacagcggcccgctgctcataagactcggccttagaaccccagtatcagcagaaggacattttaggacgggacttgggtgactctagggcactggttttctttccagagagcggaacaggcgaggaaaagtagtcccttctcggcgattctgcggagggatctccgtggggcggtgaacgccgatgattatataaggacgcgccgggtgtggcacagctagttccgtcgcagccgggatttgggtcgcagttcttgtttgtggatcgctgtgatcgtcacttggtgagtagcgggctgctgggctggccggggctttcgtggccgccgggccgctcggtgggacggaggcgtgtggagagaccgccaagggctgtagtctgggtccgcgagcaaggttgccctgaactgggggttggggggagcgcagcaaaatggcggctgttcccgagtcttgaatggaagacgcttgtgaggcgggctgtgaggtcgttgaaacaaggtggggggcatggtgggcggcaagaacccaaggtcttgaggccttcgctaatgcgggaaagctcttattcgggtgagatgggctggggcaccatctggggaccctgacgtgaagtttgtcactgactggagaactcggtttgtcgtctgttgcgggggcggcagttatggcggtgccgttgggcagtgcacccgtacctttgggagcgcgcgccctcgtcgtgtcgtgacgtcacccgttctgttggcttataatgcagggtggggccacctgccggtaggtgtgcggtaggcttttctccgtcgcaggacgcagggttcgggcctagggtaggctctcctgaatcgacaggcgccggacctctggtgaggggagggataagtgaggcgtcagtttctctggtcggttttatgtacctatcttcttaagtagctgaagctccggttttgaactatgcgctcggggttggcgagtgtgttttgtgaagttttttaggcaccttttgaaatgtaatcatttgggtcaatatgtaattttcagtgttagactagtaaattgtccgctaaattctggccgtttttggcttttttgttagacaatgcagatcttcgtgaagactctgactggtaagaccatcaccctcgaggttgagcccagtgacaccatcgagaatgtcaaggcaaagatccaagataaggaaggcatccctcctgaccagcagaggctgatctttgctggaaaacagctggaagatgggcgcaccctgtctgactacaacatccagaaagagtccaccctgcacctggtgctccgtctcagaggt

SEQ ID NO: 1885030 - DNA, 4001 bp, Homo sapiens
cacttattatgcaccagacactctgctaagtgcttttcatttaccatctcctgcatgctcacatccttcccaggaggtcctacatcacctgcatttgacagatgaggagactgagcctcaggaaggtgaattcattcttctgttccaggtcacacagctggtacatggtacagacgggatttctcagccagagctcctaacctgtacctcctattacgatgctgcattttccctgctccaattacactgctctctttctttcgttcttttttttttgagatggagtctggctctgtcaccctggctggagtgcagtggccagattttggcttactgcaatctctgcctcccaggttcaagtgattctcctgcttcagcctcccaagtagctgggactataggcgtgtgccaccatacccggctaatttttgtatttttagtagagacagggtttttcaccatgttggccaggctggtctcgaactcctgacctcgggtgatctgcccacctcggcctcccaaagtgctgggattacaggcgggagccactgtgcccatctttttttttttttgagacggagtctcgctctgtcgcccaggctggagtgcagtggcgtgatcttggctcactgcaacctccacctcccaggttgaagcaattctcctgcctcagcctcccaagtagctgggattacaggtgaccaccaccacacccagctaattttgtgtatttttagtagagacaaggttttaccatgttggccaggccagtctcgaactcctgaccccaggtgatccacctgcctcggcctcccaaagtgctgggattacaggtgtgagccaccgcgcccagcccactgtgcccatcttaaattacactgctttctgttggagcacagagactaagtttgatacctaccattactgggcaccgcagtactaaccattttacgtccatctattcatttaattcaaatagttactgaacccaccatgaaccaagttctgttctaggggctggagatatggaggtaaacaaaacagacatcctagtgggaggaataaaaactaaagaaactcagttaagtagaatataaaatatgggctgtgcacagtggttcatgcctattatccccgcacttcgggagccagagagggaggattgcttgagatcaggagttcaagaccagcctgggcaacatagtgagaccctgtctctacaaaatgtaaaaaaaaaaaaagaaaaagagaaacttgagccgggcgtggtggctcacgcctgtagtcccagcactttgggaggctgaggcaggtggatcacctgaggtcaggagatggagaccagcctggccaacacggtgaaaccctgtctctactaaaaatacaaaaattagccgggcgtggtggtggacacctgtaatctcagctactcaggagtctgaggcaggagaattgcttaaacccaggaggcagaggttgcagtgagctgaagattgcgccattgcactccagcagcctgggtgacagagccagactccaacacacacacacacacacacacacacacacacacacacccacaaaaccaaaaattagccaggtgtggtggtaggcacctgtaatcccagctacttgggaggctgagacaggagaatcgcttgaaccccggaggcagaggttgcagtgaaccaagatcatgccattgcactccagcctggggggcaaaagcaaaactgtttcaaaaacaaacaaacaaaaaaaccggctgggtgtggtgatacatgcctgtagtcccaggtaatcaggagactgaggcgggaggatcacttgaatccaggagttggacatggcagtgagctgtgattgtgtcactgccctccagcagcctgggtgacagagagagaccctgtctcaatatattaggttggcgcaaaagtaattgcagtttttgccactgaaagtaatgccattggaggtaatggcaaaaacagcaattacttttgcgccaatctaatagatatgtagataatatgatcgatggtgatcagtgataacagtgaaaaagaaacagaacagggaacaaggggccgggctcagtggttcacgcctgtaatcccagcactttgggaggccgaggtggacggatcacttgaggccaggagttcgagaacagcctggccaacatggtaaaaccccacttctactaaaaatacaaaaaaatttagccaggcatggtggtgtgcgtctgtggtgccagctacccgggaggctgaggtgggaggatcccttgaacacaggaggcagaggctgcagtgagctgagatcgcgccattgcacgccagcctgggtgacagagtgagaccctgtctccaaaaaacaaacaaacaaaaacaaaaaaagaaaagaaaaaggaacaaggaaaataagatggtaaatgtggtctccaaggtcttgtttcatcttcctatgtccattatttttcccattatgcaagtgaggaggaggttcagagaggtggagtaactcgtccagggactcacagtgcgcaagctgagacgtcagtgtcctggaaggacccatcctgcaatcgttcttggctgtgttcctacccagtgcctaggatggaggtgaagacaaaaagagcatcaggctttctctcaagagcttgagacctggcaagcgggtaggtcaatccctgtgagcagaggactccctaaagcccttgcgatgcatccatgaggtgcccagagcagacattgaggaatcaccttgggagaagcggatgcagaggctggagtcgaagctcaggctgatgaatcgattccagagatcaggagcagaaggcaaagtccccgtaggatcttctgggactattggtggctcccaggcccaccagtcctggctctactccccttcagccctcttatctccagcctttaggccttcaggtagggagacccaacgacgctagttacctaataattagccacagccgccgggcgcggtggctcacgcctataatcccagcactttgggaggccgaggcgggcggatcacgaggtcagtagatcgagatcatcctggctagcacggtgaaaccccgtatctattaaaaatacaaaaaattagccgggcgtggtggcgggcgcctgtagtcccagctccttgggaggctgaggcaggagaatggcgtgaacccgggaggcggagcttgcagtgagccaagatggcgctactgcactcgagcctgggcgacagagcaagactccgtctcaataaataaataaataaatagatagataaataaataaaaataaaataattaggcacagcctagcagtgaggaagctagagtcacatgcaaacagcggcccctcctctacccggcatcatgagctaggggtgcctcccagactgctggctggtggcggtggaggggacgcagggtacgcgtttttaggcctcagctgcgagcaatgatggctggtccccatgactcagtttgtgtgcaacaggtgtcatgaataagggtggcagtgtggaatagagtgggtaagggtctggactttggagctagaaaggtgttcccgcctcgccaaggcacaccaacgtattttttatacctctaagaaacttggtatcttttttttttggagacggagtcttgcctctgtcacccaggctggagtgcagtggcatgatctcagctcactgcacctccgcctgttgggttcaagcaattctgcttcaaccttccgagtagctggaactacaagcgcacactgcgacccctggctaattttttgtgttttagtagacacggggtttcaccatgttacccaggctggtctcaaactcctgagttcaggcaatctgctcgtcttggcctcccaaagtgctaggattacaggcgtgagccagtgtgtcaggacttttttttttttgagacacagtttcactctgtcacccaggctggagtgcagctgcgccatctcggctca

SEQ ID NO: 1885031 - DNA, 4001 bp, Homo sapiens
tgagcccaggagttcaagaccaaactgagcaacatagtgagaccctgtctcttaaaaatgtaaaaaataaaaataaattaaaaaaacaaagaggtacaatgacttgctcaagataatacagctagcactgatttaaacacagggtgccctacatagctgcttgcaattaatcaattaagaacacacacccttttagcctatagttctccctctttttcattactgagttttaagccctcacctcaaacaagcaagatgcattgtaatgttaattttaaaactgtaacagagcttcctcctttaggaatggattgtaagtggatttgttgatatcggtgctaggtttgcctttatgaaacgtactcgttccgctacacaataagcccaaattctcttcccccaaatttcacaaatactaatttggatacagagaccatcaacatgacagccaaggatcaaacccctgcatggcagcagcacctcattcatgctaattgacagtttcacgtgaccaaatctggtcagaggaaaagcaagaaagcaattctaaaacagaaatatggccggacatggtggctcacccctgtaatcccaacactttgggaggcagaggcgggcagatcggttgaggccagaagtttgaggccagtctggccaacacggtgaaactctctctctactaaaaaaataaaaataaaaattagccaggcatggtggcgggtgctggcaatcccagctactcgggaagctgaggcatgagaatttcttgaacctgggaagcagaagctgcagtgagccgagatcgtgccactgcactccagcctgggtgacagagtgagactccatctcaaaaaaataaaagaaaataaaattctgaaatatctgaaagggctgtaccttccacctaaaggaacactggcaagaaaagcaatccacaagcctgtctgaacaaacagaaacagaccttaaatggacaaacgtaatattgtttctttataccatctacataatatttacattttcccatagctgggaaattactcactacagtcaagtacccctaaatttacctctggcatgtcatgaaacctgcatctgcttaaggcctaaacggataaacgtgctagttaaatttctcatctcagagttcctctgaaattaaagtccaataaaatcaactgaattttaattcccttggaatgccctgttaactgtaaaacactaagaaatgctaaagttaattttggtactggtacttttcctcctacgtgatatatttaactatgttgttttctattttcatttaaaaaaattttgctcctatgactttgctggcaaaatatcaaaaaagattcctcgaaacaagcatttgtagaaaattttcacggtggccgggcgcggtggctcatgcttataatctcagcactcagggaggccgaggcaggcggatcacctgaggtcaggggttcgagaccagcctgaccaacatggtgaaaccccgtctctactaaaaatacaaaaattagctgggcatggtggtatgcgcctgtattcccagctactggggaggctgagactgaagaatcacttgaactcaggagatggaggttgcagtgagccaagatcgtgccactgtactacagcctgggcaacagagcaagactccatctcaaaaaaaaaaagaaagaaaaaagaaaattttcacagtaagcttgtttgaattaagaaattggggattaaggagggctcataatctatcaatcataaagtcagaagtaactcttcacatctttttaaaagattcacttgataaaaagattctgaaagaaaaaatttaaagtaggagttaatcagaataaaagagattaagcaacaattttctacttaggcttcaacaagcctgaaagtattaagttggtgcaaaagtaattgagatttttgctactgaaagtaatggcaaaaaccgcaattacttttgcaccaacctaatagatgccaatgccgattcctttctcatcgcaatttttcaacaaaagacagtaagcctataagtaaacagtataaattatctttggtgggtaaggtttccagcagtttgtcctaccatccttttttcaatacctagtatacttacaaaataagttaggactggccaggcacggtggctcacacctgtaatcccaacactttgggaggccaaggcaggcggataacgagctcaggagtttgacaccagcctgaccaacatggtgaaaccctgactctactaaaaatacaaaaaaaaaaaaaaaaatagctggacatggtggtgcatgcctgtaatcccaactactcaggaggctgaggcaggaaaatagcttgaatctgggaggcagagattgcagtgagccaagatcgcgccactgcactccagcctggtgacagagcaagactgtcaaaaagataaaaataaataagttaggttcttctaaattctaccagagtggttggaaaacaagccctaaatttattgaaattcaaagataaacaggaacttctagtcacccttttttttaaaacacatggttagtagaaaacacatcacccaactccccaccttctgaatcccacgggtttatttatggtgatgctttcttagcaatgcctttcccatgttgtaactacaggagtaataagtatttttctgagtttcagtgatgtcagcctgaaacacattctgaagtatttcaaaatgcctgggccgggcacggtggctcacgcctataatcccagcactttgggaggcccaggcgggtagattaccggagatcaggagttcgagaccatccagcctgatcaatcctgtctctactaaaaatacaaaaattagccgcgcatagtggcgcatgcccataatcccagctacttgggaggatgaagcaggagaatcacttgaacctgggaggcggaggttgcagtgagccaagttcgcaccattgctctccagcctgggcaacatgaccgaaactccatcttaaaaaaatgaaagcctgaatatgtaatatccttttggtacaaacagtgtaagtcaaaaaaaaccctgaagttcagctgacctcaaaaaagcagaaccatctaccaagctaaaaatgcacagactcaagcagtgctctctcaagattttgcctacctaatagacaaatgggcaaaggtcatgcatggacaattctcacacaagggagatttactcagaagtatttaaaaagtattaaattcacagttaattaaaggaatgtgccaggcgcagtgcctcacgtctgtaatctcagcactttgggaggccgaggtgggtggaccacctgaggtcaggagtttgagaccagcctggccaacatggtgaaaccccatctctactaaaaatacaaaaattagcagggcgtagtggcaggcgcctgtaatcccagctacttgggaggctgaggcaggagaatctcttgaacctgggaggcggaggttgcagtaagccaagatcgcgccattacactccagcctgggtgacgagtaaaactccacctcaaaaaataataatttaaaaaataataataaaggaatgtaaattaaatagcaataaggtgcctttagttattgaagttttttttctctattttaatgactatatccaatggaagtaagggtgtaatgaaacttaaaaatagacataaattggcaatatataactagaatcataaaaagtcacaccctcataattagtaaaattccatttttgtacaactatcctataaaattaatccataatggaaaaggtttcatgctcaaggtatttattagtgctatttacagtagcaaaaattagaaacctccacattttccaatatttgggaataacgccaattcaataaaatacaatgtagacaacaaaatgacagctgaaatcaagcagcagtattccataatcctgggtttaaataaggattcaaatttgtcagtatagtattcctcaa

SEQ ID NO: 1885032 - DNA, 4001 bp, Homo sapiens
gtattttattgaattggcgttattcccaaatattggaaaatgtggaggtttctaatttttgctactgtaaatagcactaataaataccttgagcatgaaaccttttccattatggattaattttataggatagttgtacaaaaatggaattttactaattatgagggtgtgactttttatgattctagttatatattgccaatttatgtctatttttaagtttcattacacccttacttccattggatatagtcattaaaatagagaaaaaaaacttcaataactaaaggcaccttattgctatttaatttacattcctttattattattttttaaattattattttttgaggtggagttttactcgtcacccaggctggagtgtaatggcgcgatcttggcttactgcaacctccgcctcccaggttcaagagattctcctgcctcagcctcccaagtagctgggattacaggcgcctgccactacgccctgctaatttttgtatttttagtagagatggggtttcaccatgttggccaggctggtctcaaactcctgacctcaggtggtccacccacctcggcctcccaaagtgctgagattacagacgtgaggcactgcgcctggcacattcctttaattaactgtgaatttaatactttttaaatacttctgagtaaatctcccttgtgtgagaattgtccatgcatgacctttgcccatttgtctattaggtaggcaaaatcttgagagagcactgcttgagtctgtgcatttttagcttggtagatggttctgcttttttgaggtcagctgaacttcagggttttttttgacttacactgtttgtaccaaaaggatattacatattcaggctttcatttttttaagatggagtttcggtcatgttgcccaggctggagagcaatggtgcgaacttggctcactgcaacctccgcctcccaggttcaagtgattctcctgcttcatcctcccaagtagctgggattatgggcatgcgccactatgcgcggctaatttttgtatttttagtagagacaggattgatcaggctggatggtctcgaactcctgatctccggtaatctacccgcctgggcctcccaaagtgctgggattataggcgtgagccaccgtgcccggcccaggcattttgaaatacttcagaatgtgtttcaggctgacatcactgaaactcagaaaaatacttattactcctgtagttacaacatgggaaaggcattgctaagaaagcatcaccataaataaacccgtgggattcagaaggtggggagttgggtgatgtgttttctactaaccatgtgttttaaaaaaaagggtgactagaagttcctgtttatctttgaatttcaataaatttagggcttgttttccaaccactctggtagaatttagaagaacctaacttatttatttttatctttttgacagtcttgctctgtcaccaggctggagtgcagtggcgcgatcttggctcactgcaatctctgcctcccagattcaagctattttcctgcctcagcctcctgagtagttgggattacaggcatgcaccaccatgtccagctatttttttttttttttttgtatttttagtagagtcagggtttcaccatgttggtcaggctggtgtcaaactcctgagctcgttatccgcctgccttggcctcccaaagtgttgggattacaggtgtgagccaccgtgcctggccagtcctaacttattttgtaagtatactaggtattgaaaaaaggatggtaggacaaactgctggaaaccttacccaccaaagataatttatactgtttacttataggcttactgtcttttgttgaaaaattgcgatgagaaaggaatcggcattggcatctattaggttggtgcaaaagtaattgcggtttttgccattactttcagtagcaaaaatctcaattacttttgcaccaacttaatactttcaggcttgttgaagcctaagtagaaaattgttgcttaatctcttttattctgattaactcctactttaaattttttctttcagaatctttttatcaagtgaatcttttaaaaagatgtgaagagttacttctgactttatgattgatagattatgagccctccttaatccccaatttcttaattcaaacaagcttactgtgaaaattttcttttttctttctttttttttttgagatggagtcttgctctgttgcccaggctgtagtacagtggcacgatcttggctcactgcaacctccatctcctgagttcaagtgattcttcagtctcagcctccccagtagctgggaatacaggcgcataccaccatgcccagctaatttttgtatttttagtagagacggggtttcaccatgttggtcaggctggtctcgaacccctgacctcaggtgatccgcctgcctcggcctccctgagtgctgagattataagcatgagccaccgcgcccggccaccgtgaaaattttctacaaatgcttgtttcgaggaatcttttttgatattttgccagcaaagtcataggagcaaaatttttttaaatgaaaatagaaaacaacatagttaaatatatcacgtaggaggaaaagtaccagtaccaaaattaactttagcatttcttagtgttttacagttaacagggcattccaagggaattaaaattcagttgattttattggactttaatttcagaggaactctgagatgagaaatttaactagcacgtttatccgtttaggccttaagcagatgcaggtttcatgacatgccagaggtaaatttaggggtacttgactgtagtgagtaatttcccagctatgggaaaatgtaaatattatgtagatggtataaagaaacaatattacgtttgtccatttaaggtctgtttctgtttgttcagacaggcttgtggattgcttttcttgccagtgttcctttaggtggaaggtacagccctttcagatatttcagaattttattttcttttatttttttgagatggagtctcactctgtcacccaggctggagtgcagtggcacgatctcggctcactgcagcttctgcttcccaggttcaagaaattctcatgcctcagcttcccgagtagctgggattgccagcacccgccaccatgcctggctaatttttatttttatttttttagtagagagagagtttcaccgtgttggccagactggcctcaaacttctggcctcaaccgatctgcccgcctctgcctcccaaagtgttgggattacaggggtgagccaccatgtccggccatatttctgttttagaattgctttcttgcttttcctctgaccagatttggtcacgtgaaactgtcaattagcatgaatgaggtgctgctgccatgcaggggtttgatccttggctgtcatgttgatggtctctgtatccaaattagtatttgtgaaatttgggggaagagaatttgggcttattgtgtagcggaacgagtacgtttcataaaggcaaacctagcaccgatatcaacaaatccacttacaatccattcctaaaggaggaagctctgttacagttttaaaattaacattacaatgcatcttgcttgtttgaggtgagggcttaaaactcagtaatgaaaaagagggagaactataggctaaaagggtgtgtgttcttaattgattaattgcaagcagctatgtagggcaccctgtgtttaaatcagtgctagctgtattatcttgagcaagtcattgtacctctttgtttttttaatttatttttattttttacatttttaagagacagggtctcactatgttgctcagtttggtcttgaactcctgggctcaagtgatcctcctgccttggcctcccaaagcgctggtattacaggtatgggccatcacgcctggcaaatcgttgtacctctttgagcctcagtttcct

SEQ ID NO: 1885033 - DNA, 4001 bp, Homo sapiens
aaattgtgcatttccatcttcatgctgctggccatacaaggtgagggcagagatacctgaagctagcatccttgatttttgaagagccatgagctgacagatttgtggataaagagaatggaaagcaattaattatagaaacttttacacactccctggcttcctgagattcttgaggtgtgtaattggctgttgacgtggctgagtgtttctcagcttttttgctcagctccaagacagtgaagtctctggtggcttctgctctgaggctgcgtgacatctgctaccatctgtggtggctacctcagaaatctctctccttgctaagccagccagaatctctcccttgccaggcctttaacttgactaaagcagttaacaggaacatgcgtcagccatgttaacagctgttttgttggtggttactccgctctggcttaggcattgagaattggatttctttttttctcttttccttttttttttttttcccgttgtgctttaaaataagccactgagtagtagaaataaaataaagtcatgtactttctggtctgtactagcagtaagggaccccatttgccaaagaagctcttggaggcctggatccttctctgattcttggactgtcaatgtcacaagcaacagtgctagcctagccttctaccaggggtttcctcccaaagtggttttgaattctcttccttcatcatatttattctgtgttttgatgcccaggtcttgtagctcccgggaacagtgaactgtaagaccccaaaacttaggccacaggtagaagtttatacatccccacacacagtggcttaagcaagcagagacccaaagacatgcttggattcagaaaggtggctgtccccaaacatggtcagaattgcaaggtgacttcctgctatgccttgtcaacaacaaacaattgactaagaaaatccatggaggccgggcacagtggctcacgcctgtaatcccaacactttgggaggccgaggcgggtggatcacttgaggtcaggagttcgagaccagcctggccaacatgatgaaactccatctctaataaatatacaacaacaacaaaaaattactgggcatggtggcgcgcacctgtattcccagctactccagaggctgaggcgggggaatcgcttgaacccgggaggaagaggttgcagtgagccaagatcacgccactacactccagcctgggcaacagagtgagactctgtctcaaaaaaaaaaaaaaaaaaagaaaagaaaaaggaaagtccatggaaaccatgaatgagagggaatggaggtgacccattcagtcaataagcaatcattctcaaaagagaaggtagagggttgcagggggccggtggctggctctctgggtgagctggagagtggcagctgtgtccctagagcaggcggggatcctgcctggccagctgcactcggtcttctgggtttctggttcacagagcttgttcatggcctccctgaggctatcgactctgtgcaggctccaagccaagctggcgactgcttggcagcctcagtgaactctttctactggggacagactgagctgtccgacagggcagaacgtttcagctccttggcagctgtatatgcttgaatgtaaatcactacattcgctttctcttctcggggatattcttgtcagagtgaatccgttagcatgaatcagtttcacaggagtgagcacctgataaactgatagaggcatttctgaactccatgacatgtgggaagcccagctcgaaactcgggggctttccccttactggcaatttgattaaatgaggatgaggggatgggaggggtggtgtttcacctctgagaatctccccttcctaaactgttaactgcctaggattataggggttagatgagatcgtagatgctcaataaatgcattaaattattgaaggcctggggtgcccaagggccttcaataatttaatgcattaattaattagtttatttatgtgagacagagtctcgctctgttgcccaggctggagtgcagtggcacaatctctgctcatgcaacctccgcctcccaggttcaagctattctcctgcctcagcctcctgagtagctgggaccacaggcaggcaccaccatgcccggctaattttttgtatttttaataaagacgaggttgcaccacgttggccaggctggtctcaaactcctggcctcaagtgatctgcccacctcggcctcccaaagtgctgggattacagaatttaatccatttattgagcacctgctacatgccgtgcactgttctgggcacagagtacaaaacaatgttactatcctcttggaggttacattctggtgggggagaagtcaggtgaaaataagataatatttggaagggggaaggcccaggctcttggcatgttaaacttaccttgatatccttacagagaaaatgaattttctgagtgtttctttgaatttttcagctcaatttcacagatagctatacagcacagcttagtagactcttccaaagtagaaatatttctgggtcagagagactcggcacagcagcaggagcgctgggaagacctggggtggttctgtttggaaaggggatgagatgctcctgtactcctgctccagtgtttttggcttgaaatgagtaacatgcaaatgagcacctggggctgagtcagcagtgagtaaccccctctgcgggacgcccagccccgaggcatacacggggccgcctctactggctactgcaccccgcagatgcttccgcagcagactctgtgcctcacccccggcccttgcccatgtcacctgctcagtcagaattccagctcaggccagcggggctctgctgatgaaaacagcattacctggaagcctgggacttcagtgtttcttcccgcagcaagtgctgaggaagccgctgccttccctggcacccccttgccgaatagcttcccttctgcagagggctagggtccccacttcatcaggcctcagctctcccctcggctcacccctccttcataccactccaggcctctgtccaagacagactcccacctgggcctcctgcctcttctgagagccggcacctccttcatcagcacctgttttccagtgggttcatttcagcatacacagatgtccagctgctgctgtcctaaacccacttttatgatcctgcatttcctcagctcactattccttctcttccctgtcactatcacgtttcttaaaagaatagtctctactcctctctcccaggatttcttaatccactaaaaactagtgtcagcccccagcactcccctaaaacttctctcaatggggtcaccgaggacccatttgcacttctggtgcatgcttcacagcctgtgtttttactaaacttctagtcatttccctttgcggtgctccctcccatctgaaacattttgcttcccttggatatcttctttcttttctccctttctttctctctctctttttctttctctctctcttctttctttctttctttctttctttctttctttctttctttctttctttctttctttctctctctttctttctttctctctgtctctctctctctctgtctctctctctccctccctctttctctctttctttctctctctttttttttttttttttgatggagtctaactctgtcacccaggctggagtacagtggggctcactgcagcctctgcctccctggttcaaacaattctcctgcctcagcctcccaagtggctgggattataggcgcgccaccacgccccgctaatttctgtatttttagtagagatggggttttgccatgttggccaggctggtcttgaactcctgacctcaagtgatctgtccacctcagcctcccaaagtgctgggattacaggcgtgagtcactgcgcccagcctgttgggtatttccttgatgccgctctctggtt

SEQ ID NO: 1885034 - DNA, 4001 bp, Homo sapiens
cccaaatttactagatatggacttataaatgctaataacataacaaaaaatactataaatagttcacagtgcaatgaggaggtactatgcccaatacctggcagagggcctgttacaaaggagaggttcagtgattattttttgaaccgaatggttattgtcaccatgaccagaatctccataatctagtgacctgcccccattattatcatctgattatgagaaagggtttcatcatttggaaatgtcacaggtcattgggagcagtgtcttatgtgctgacagtgaccagcatagtgcctgacttgtggtagactcccggtaaatatttgtggaattaatcgaatttttttttttacatttatcggtttaacataaaagaaattgcaaagaatcagatgaaaagatgcatagggcaaggcatgtggaaagggacacagagctcccatgccttgtctgggtgtgccccgtgccaagaacctccgcatgttcagttatccagaagtgcatccgatctccgtcctttgcggtttttacagtggcttcattacataggcatgattgattaaataattggctgttggtgatcaacttgactttcagtccctctctccttcccagaggttgaagggtggggctgaagtcccaaccctctaatcctgccttggtctttcctgtgaccagccctcatcctgaagccatctaaaggttgccagtcaccagtaatctcattagcattcaaaaacacacttattactttggagattccaaggactttagaagctgaatgccaggaaacaaggacccaatatatatcccataaaataacagttcactccctatcctccaacacagatcccttacattaaaaaaatgtacaactcaaatggtactggcaaattattggaatcccatttaatctttaataattagtccagtccactcttatgtcatgtgaatatgtctctcagagcaaggccactcaggtttgcagccttctcattcaatcttgtcagggtccaagagcaagagtagtctcagcaaacatagagctttaccctttctggcatctggcatagttgagctgaaagacaatgtcatctcttgctctgagcctctttggaagtgttgatataatattggatttctcttattacataccatttattcattacttttttatatgaccttatttgaagatattattcatttctttaacctcatatactatttctccttctcttcatttatacctaaacttttccgcctttgctaacatagcagaaaatctgacaggacaaaaatacgtagacactactcctttagatgttaattttaagtaacttttcaatactgcccattatcctaatattcctttcagtaaataagctttgcttattctgcttggctctgagcataatgttcagattggttcaaataaaaaaagccaccatatttttatccttgggaataagaaaacagaatttcttacatggtagaaaggaaaaacgtcactacaaaatgtaattatagcattttacaatatgcatcgcacaaactgtataaaacacacaaagtacatctactaaaactttgttctaaaacaattttttaagtgagctagttttcaatgcagtcgagattactgagttaaaaaaaagattgagaaggattgagaaggagctttgcataaacaaaaactctatctgcaaataattattccttaatcctaagagctggggtagctttcctttgtttattagcttttttttttgttttttaatggaagtgattttcttagagtagaaagtttagtatcagaattggctgtgttgtatatatggtagtcacttttcagatattttcctgtctgttggtttaggggctctttctccacacccaccctcaaggctacctctatctccacctagcctctgaatatctccaccaaagagcaaatcagttgactgaaggtgagtaaaaattccatggggttggtagttaaaactattgaccaggctgggcatggtggctcatgcctgtaatcccagcactttgggaggctgaggcgggcagatcacctgaggtcaggagtttgagaccagcctggccaatatggtaaaaccctgtatctactaaaaatacaaaaaataactagctgggcatggtggcgggtgcctgtagtcccagctactcaggagactgaagcaggagaatcacttgaacctgggaggcggaggttgcagtgagccgagatcacgccaccgcactccagcctgggcaacagagcgagactccatctaacaataataacaataaagctattgaccaaaatttttatgctctgagatttctctgtgaatttgcatgaacccgggagcctagcccattaaactgactacctgaattatatgactatctacatcttttcagagggtagagtgatttcttcctcaatctaataaaatttatattactatatccttaacccataagtgggtatgttgagtacaactttaaaatatttttttactttgagagattacatgtttaggttttaatgtgtttcttgttttgtttattgtttaggcaaagtcaaaaaactaaccttatcggtctggcatttgtttaaatttttatttgcacagcaaacattattcagcgctgtgttagtattaaaatatgagaaacaccaggacaaaaatacgtagacactcctccgttagatgttaattttaagcagcagaaaaagccaaattctgcgttcagtatgcagagaaataaggaaaagaagtaacagaaagaggttaatgtgggctgagaccacttgagggcatttgagcacctttgcattccatgctaataaagtgacagaagttagaaagttggcctatctttgaagatcaacgtatatatatagatatatgaatagaggagatacattttatatctgctccagaactcattttggatttttttcaacatccttccgacaacatccttccgaaagagatcaaagttgaaactattagtaaataataaaattaagtcaataggttattaaataccacatccaagttatcaaaaattgaagtacagagtaaaaaaggaaaaagtatactacatacaatgagattatatgagtctccagacccccatttctgcaaaaagctcatcaaatattcataaatctaagtaacttcccagtaggacatctcccaaacaaagtgtaggtgaacacagaaagctgaaatacataaaaacagaatttgggtgtctactttgactgtctggaatttgttaggaagcagaaatgccaccaaaatggaaattgcacacagggaaaaaaatcccactgtgcttttatccagctaggttggaaatgatgtaataaatgcaccataatttatgtacataaatgtgtgggtaactcatccagggagtggcaagtgcagaattttagtggaaaaaaatagtgtacatcaaagaaatttgaccagcggccaacaaccattaatctcttcatgaactcttaaatatatagatgccaaataaaacttgtcattttattccatctctcaaagcaatacattcttatttatgaagttatgagagaacataacattataccttatttgacatacaacacacacagagcatacagcaaccttgagaagatttccttcataaaaatgagaacattgataaatcaacagccatacacctcaaggataatggtttaagtctgaccatagtcctcaaacttaatgtgattgtgatcttcattcatctttccatagtcagcagcccacatcacagaaaccactgtatgtgatacatcaccaccagccagcttgctaaccaggacagacttcaaataaagatagcgttgaattctttcagatgtggaggcatgagagaaaatatcagaattaaagtcaaatactttaagtatcacactaaaagaaaacatttgtgtagctgtccagaaaacctatgag

SEQ ID NO: 1885035 - DNA, 4001 bp, Homo sapiens
ggggacttatttgtcattaccacaagccaaggtaaacatgggtgtcctaggaaatgtccaatttccccacagtaataaacatctaacattataataaaaacaataacttttttttttctttttttgagatggagtctcacgttgcccaggctagagtgcagtggccggatctcggctcactgcaacctccgcttcctaggctcaggcaatcctcccacctcagcctcctgagtagctgggaccacaggcgtgccaccatgcccagctaatttttttgtatttttgtagagacggggtttcaccatggtgcccaggctggtctggaactcctgagttcaagtgatcctccctcctcggcctcccaaagtgctgggttacaggcgtgaaccaccctgccaggccaacaataactattattaagtcacttgaagattctatttttttgatataatgaaacaagtatgtatttacatccttagggatttctatcatacaaacatagtatatagcctaccaaaaaagaaaaaagagactaagacttagatcaaggttaaattaaggtcctaagtctgccacctattagcttaactgaaaatgatcccaatatcacagccttttgtcaggagtaaagagcagagataagaggataactaaaatttgatatctcataaatatgaaattcttaagatattaaaacgaatcaagataaaatccttataataaaattactgtccattttacagcatgaagataatgaggtgcaatgatttaaattaactctcctcaaagccatactgcaagttgagtggtgaaactgtgacataactcaggtctaaatcttactgttcctttcactatgccatactgaaacactctatgaattatatactactgttatggtaacagtggaaagtgaaaatatgttttattataatgaagaggcacattatgcttcccaaaaaataaggaattttaaattatgttacatattcacatatttaagttattgtagatgccacttgatatggtcgacaagtgtgaaaatgtccacatacatccttcagtattttaaatgtataacctttggtattttacaagtttgaatattagcagttagttaagcctcaagtggacttatctactttttgcaggcctacattatctttcaaacagaagggaagggctgcacgtctaacagaaacgctgccggcttctatcaagccaccactaaagcacaagaccacgtggtctctcataagcccaaggttccctactcctctccctcctttgacaaggaactggaaactagggtttctttctcttatgtggagccctgacatgccacctgtgtagtacagaccgcaaacatcctgcagcctgcctcccggaagaccaagaatcagaataaaagggaacttggacgccgacaattctaggaaaggaaatgaacagagaagtaaagccggtgagatcgtgataagccgcggcaccgggacctgtcaaaacggcgtatataagactcaaaccaaaccactataacctatcattcgggaaggcctgaggtgggagcggcactacggaaggaaggaggacgaagagaaccgcacgagtcagaaccgccgccgccgccgctccccggatacctttcagcatgccctggcaagccaagaaccctgaccctcatctagagtccaacctttgccccaacatttcagaagcggccaaaatcccgctgccccggcggccgccgccggacctgcccgcacctgtcactagcgaaagaaccagctcgcggctcccgcccacttctccactatcctcgggcaaccgcgggcatctcaacccctttctcttaccaggtgtcccctttccggagcgaggttttgagcagcgtcgcgatgtcagaccgctgggtgtccagatccgccgctccgccttccgccatcttcttccactagcggtaggggaggtggcagcgacggcggcggcacgccccagagcattatgggaatggcgtcccacggcccctcccagtcggccggtcgaaaccaaaagacaccgggagcgggggtgctcctcgggacaagaggaggccccgggggcgcactgggtgcgcggccatggtctgctgccccccatcggtccccgcccgtccagcatcttgccttggcctcctctggcccgggactgccgggttttagctttcctcgccgccgagggctctggctctctctcgctagagggatgccaccgccctgtcctcccgtcctcagcgttgccttcccctccctctttcccactgacgccttgaaaacccttatttgcgcattcactcacgcttgagggtgaggtagggtggggcggtggtgtgggggcgtggggacggctaagatatggcagaaaatgtagcagctcagtgactgggcttttcgttacgagtgggagaacccaagctcggtgaatatgggcacacacaaaaaacactccgaaaccgaacgcttggtctccatgcccttcctgggttccttccagcgctcttactcccgttgtaggtggggaccctttataggctctttgtgacgcctccccaggcacacccagacgactaagctgcagtgaaaaacatgtcccagttcatcggtgaacagggagtagaatatggacagtattgaataatgccagatactaaaggaagaaaacgtgcgagaaaccctcttgtttatacaggatagtaacattttcttagccccatcttcgtatggtgccgtacacctgaaatgaaactagatatgtctttaatttgaagtcaacgattatgttacaaaatagaaaatcgagtcgcttaaaaatcaaatgccaaggtcacacagcaggtggagaggtgagtggagaggctggttcaagagcccacatgctatacagtatagcacactcactgcctctccttctgaaagcctgaactaaaatgtaaactctttaagagctggaactgggttcatcttttgttttagcctttgtacacctggtggttagcacagtactgatggacatgtaaaaattacctaaatatttgtttagtaaatgaattgtggcaaaattacttaagtattcccgagcatgatgtccaggggtgtgattttaacataccatattgatgtgaaaagtctaaaagatgggccggaatccccacatcatttctcgtttgcccattttaaaccctaactcatttggtgagaatgcgataaaggtaggtgtagttatgctagtaggaagtgctgaatccaagtgaaagtagtgtatattggcattatgatttgtgtatatcagtattatgattatgattgcttatttctgcgtaataatactattttgcattatcatgccaaccttgaattgagagttttaaaacaactttcagtgactgctatttctggcttttctcctgacaggttaaaagattaagagtttctctaaccacggctaccctctaaaagtcacattttccccctttttccagtcactctctgaaagagaacaaagtaattttctgaagggaagctgcagaatatggaaaacatatattggagctacatggatgtaagttcaaacctcacttcaacctttagctgcaaagttcttgccctttaattgaatcataaaattgagtataataatacctaccttaagggatttttatgaagattaaatgaaacaatttgtgtttattgcctgggacgtaatagccattcaataaacactagtattgtttattgatgacagggtgaattgtacagtatgtgaattatacctcaataaagctattgaaaaaaggtgttaggggctttgaaggcaaaactgtgctctccttcattgtataaacataacataaccaagtagcaataaatcatttataccctaatgtccactttcccttaagagaaaatgcatttttgaagtgttgacagctacaaccatacaatgaagtaaaataatattttctt

SEQ ID NO: 1885036 - DNA, 4001 bp, Homo sapiens
ctcaaactcctgaccttaggtgatccaggcagataacctcagcctctcaaagtgctgagattacaggtgtcagtcaccctgtctggccccagctgattttatatcagtgttttactattgcctttttatggctctctcagaaatctctttttaaattttttagctgtggggcaatgcaaaagtgatttttagctcatcaatctataatattctttgtcctttgtgcaactgtagtaggcagcttgggaacttatggcccccaccttaacctgacaacatctctttatctccatttaaaatattccagtatcttggtactatattacatgatcctgcccactgactatagctaattggactaaaggtagacatccaaaccaaatttgccaatcaaattctttcaagattttggaatatggacctaaagagagttgaggcagtcttctcaatgactggaactgaaatatggaactcaggatctgtgaagcagccatattattcccattatattcccccaagagcagagaaagtttgttttgtttactggagaaaattaagagataaggtcctgagaggcaaacagagagtcttaacttttatttcctgccatcattccattttatgagccattcatatattcctattttttcaactccccttttattccttgagtgacttgatttctgatctttgcaacagaggatcctaaccaacactagagcacagaagatctactctttgactttgacattttgttcttgttgttttttgggtgtttttgagacagcacctcactctgttgctcagactggacgacagtggtgcactcgtggctcactgcagcctcaacctaccaggctcaagagatcctaatacctcagcctcctgagaagctgggactataggtttgtgccaccacacccagctaatttttgattttttgtagagatggggtttcaccatgttgcccaggctggtcttgaattcctgggctcaagcaatcctcccaccttggcctcccaaagtgctgggattacaggcctgagccaccatgcccagcctacactttggctttaatgttaacagaattaacatagatttctaaaagtgtttcctctctgcagtgcccttaagtgaattaaatgtttaataaccatttaggggttttcttacctttgtcttcgccttaagtgtaacagtgctttctttttatgcaaaatatagtttatctttattcatttaatcacaaaaaatgcataattcttataacaaatttctataatataaaaatatattgagccgggtgtggtgatatgagactgtagttccagctactcaggaggctggggtgggaggatcacttgaccccaggagttcgagtccagcctgggcaacatagcaagacctcatctctaatttttaaaatgaaactttcattccttcctctctggttcctcttcaccttccatcatgattggaggcttcctgagcccttcatcagaagcagatgctggtctttgcctcttatacagcctgcagaaccaggaagactacatttcccagcactcccttgcataaaactcctctcccagtctctcaggctccttctctcttcctctacatggctggaaatgaaggttccaagatggcagatgcacaggatgggagaagccctgatccctgaatttgctgcttagagaagagctgctctggtgaactctcaggccaggaacatcagcatgaataagaaacaaatctttattgcattaagccattgagagttcagggtttatttgttagcccagcagagtttattctatccccataccatgctgtggccttccttactcttcactggcatggagaatcacatccacctggggaagaacaccatgtgagatgcacataaaggtgtatgagtggcaaagaaggaacattcctactgtattgtatataagacactacaggaagggtcccttcacacttggaaacgcactcaccgagaaatcaaccaataaagcccacacctagtagaaatagaaaatatattataaaaattaaaatatagaaagttagaaataaatccttctccatctgttttcaccctctagaggtaatactgaggtttatagtttgctatgtgttcttacataatgctgatgtttatacaaccatgtgcatttcacatatgtggttgtggttttcttttacaaaaatagcatattatatattgctatgcaactttttttccacttaaaaaacataacataaacatcatcagggagaattggggagatattggtcaaagcatataaaatttcatttagggggaatacattcaacagatcttttgtacaacatggtaactatagttaataatgtactgtagccagacacggtggctcatgcctgtaatcccagcactttgggaggccgagatgggtggatcacctgaggccaggagttcaagactaccctgcccaacatggcgaaaccctgtcactactaaaaatacaaaaattagccggacatggtggcaggcacctgcaatcccagctacttgggaggctgaggcatgagaactgtttgaacccgggaggcagaggttgcagtgagccgagatcacaccactgcactccagcctgggtgacagagtgaaactccatctcaataaataaataaataaataaataaaaataatgtgctatatatagtcagtcctctggatcctcaggttttccatccatgattctaccaatctcatatcaaaaatatttgggaaaaaaaacttaaaaataatacaaacttaaaaagatagtataacaaccatttatataacacatattatataaggtattataggtaatctagagatgatttaaagtatagacatccccctcatataagtgggggattggttccaggaccccctgtagatacagaaatgcgaggatgctaaagtcccatataaaatggtatagcgtttgcatataacctatgtacatcctccctatcctttaaatcatctccagattacttataatacctgatagaatgcaaatgctacatagttattatacttcattgctttttatttgtattattttttattgttgtattgttttccccccccccacacacaatattttcaatttctggttggttgaatccacagatgcagaacccacagataacaaaagccaactatatattggaagatgtgcataggttatacacaaatactacactttttttaataaggtacttgaacattccccaaattttggaattcacagggtgtcccggaaccaatttttcttggatatggggggataattgtacttaggaattgttaagagggtagtttttaaatgttctcgccgcatacaaaaaaaaatgtgaggtaatgaatatgttaattagcttgatttagccatctcacaatgcacacatatatctaaacatcatgctgtgcacaatgagtatatacaacttttattgtcaattaaaaataattttttttcttgagacagggtcttgctctgtcacccagactagagtgaaatcatgactcactgcagcctctgcttctcaggctcaagcaatcctcccatctcagcctctggagtagctgggactactacacccggcttttaaaatttttcttttagagacagggtcttactatgttgcccaggctggtcttcaactcctgagatcaagaaatcctcttgcctcagcctcccaaagtgctggggttacaggtgtgagctacggcgcccaggctaattgatttcaaaaccaaaaataccctcaaaacatcatgctagtcattctctatcttcatgggccatatttgtcctttctctctggccagtggaccactttactcaggctcccatgccaaatgtttccgagtgggttcagccaatcaaaggtcactgcagaggtctctgcagcaaaatatcagagaataaaaggaaaaaagtcagggtaaggct

SEQ ID NO: 1885037 - DNA, 4001 bp, Homo sapiens
cccaccaccctttccatcagtcttgtctcatggggatggggaaaatgaagacagaacgctttgccttgctttgcaatccctcctttgaaggccttctgtcccaggaagccaatgttcatttgatgtggaagagggacctgtgtttaaccagaagctgtcctccctcatccctttcccatggcttacacgcagaagggagaggagatgaccagaggagaaatcaggggaagaaaaggcaacaggggaggcaaagggaaaggagaggaatgcttaaaatatacagtgaaatttgagtaggattctctactcaaagacttctctgggaagtgtccagaattgaccacacaggtgctgacggtagaaagaacacagacccaaaaccctgatctagttgcattaactccattagccctgagttcctctgtaaaatgaagactgtggaggcaccaactagaggatttctgtgaccttctcaaactctaaaatttttggcactggactgttccactttgaagggtcaagaaagaaatctggaggttgcagaaatcagggtcaggcgcacatacacgcacgcacgcacacacacacacacacacacacacacacacacacacacagatccagcagcatccttggaacatcctgaagtcaagaaaggcacagcactgtctgccccgatagaaggaattccagaaaacagccacgaggttgggccacagaatttccaaagagagcaatctacaaactgggggttgatttcccagttcctggatctcagcagtcaacacacgagaaggatttttttctgaagctgccacctccaattctgaaataatcccatgtttcagactggggccgggacggtggcaaacctgcagaccctggcagcaagatgagggcaaggaagggaaaggtcagctgggcacagtccagttctcagcagtaatgacagaaatgaaggaaggaagctcagaatgagtgcacgggggaaatgggttttgctgatgcatttccagggccggccgtactctttgttttggcacacttttcctgacaaacagccagtgttctcaacacataaatactagtccacgttaacaacaatagcatatgagaccgctctccgtaaagatgccagattggatgcaaatggactggaaataccttggagggtttcacaaaaataagacaaagggcaaaggaactttgccaaaggagatggagagcaattctttaaagttagtgggagggaggaagcaaagagctcataaatacaagcctcttaaaatgggacgcatttgcctcgcgcctactgggtgtctgcagctcagcttggtgccccacacaggacaccgactttaagtggctgcctttgcaaggctgagaggccatgagggttgatgcctgaagtgtcagcgccatctagtggaaacatggggcatggccgctttggacggcctcagcctaaaatgagaggcagagagacacgctctatttcgcatctcacaatgcaagatgagagaaaggctgttgagttttatttcatcatcgcccgtttaggtcaaaggagatgccactttggctcccagtcatcaatcaactggcaacacccaaggaccaggctgggctacatttgcacattccatttcagcccaggtagagatggagacacttataagaacggcttcggaatgttctccagtttgattctcagatgtcaaagcctgtaggccatgagaggtccctacttaaacagaacagctatcctttggtaccctctccaaagaaaagaaagagtaaaaaaataataacttttaaaaatagcttatttatgtgcagaaggtgtgagacctgaagatgagttaacagccgcagcagtgggaggaggggtgacaggtactgctcaaatgagcagcaaccttctgccacctggcaagaacaggcgttcagtgcagggctggcctgcccctgcaggcttcagagaccactgcgtttcttagaagggaaacaacggggccgggcgcggtggctcatgcctgtaatcccagcactttcagaggccacggtatcccagcactttcagaggccaaggtaggtggatcacgaggtttggagttcgagatctgcctggcccatatagtgaaaccctgtctctactaaaaatacaaaaatcagccgggcatggtggaggaggaggaggaggagaaggaggagaaggaagaaggagaaacaacagtccagagatgatgccatttccggggaaagaggttgacttgaggaaggcagccatgggaataaaagctcccacagatccttttcactaaaaagaaagcaggccgggtgcagtagctcacgcctgtaatcccagcacttgtgggaggccaaagcaggagaatctcgagttcaagaccagcctgggcaacagagcaagacccccacctctacaaaaaatatattttgtgtgtttttcaacaagtgattcaaattgctgctcagattttaaaacttactgtaactatcagtgtaaagacccatgcctggatcctgtttcatttttatatcaacttggtaaaaatgctgttcttgacaccctgtcctctctatcctccctcaaaccacatgtgatctctgaaaaaataaaattagccaagtgtggtagtgcacgtctgtggtcccagctactcaggagactgaggcaggagaatcactcgagcacagaaagttgaggctgcagtgagctatgattgtgccactgcactccagcctgggccatagagctagaccctgtctcaaaaaaaaaaaaaaaaaaaaatgccgatccagagtattttgtgattttaccttttactcctcctcccttgcttggttggtagtatgaagaccagagaaggaaagaaaagatggaaaggaggctgggcatggtgattcccacccgtaatcccagcactttgggaggccaaggcgggcagatcacttaagatcaggagttcaagaccagcctggtcaacatggtgaaacctcgtctgtactaaaaatacaaaaattagccaggcgtggtggcgcacgcacgcctgtaatcccagctactcagaaggccgaggcacgaaaatcgcttgaacccaggatgcggaggctgcagtgagctgagatcatgccactgcactccagcctggatgacagagtgagactctatctcaaaaagaaagaaagaaagagagagagagagagagagagaaagaaagaaagaaagaaagaaagaaagaaagaaagaaagaaagaagaaaggaaggaaggaaggaaagagagaaagaaagtggggggggaatatgcatttcttgagtccctagcctatgatagataatatatgtgaaaccacattgctttattctcacaacaaacctcattaggtcacacctcctgggaaagaccagaaggatctgtgtcactatgtgtccttcccccttttcagtacaaagccaggctaatcttagcgcgaagcctaccaaccaaacctttgcggcatataaacatccctaactcagcacatcatccactcacctccacctccctcgcctctgcctcacgctggtttttccttttgatgaaaagcagagcgtcaggctcttaggaagtaactccctgacttagctacacatttttacatgtcactcagtttctatgtagagggattattttttttccataacgaaagagagatttcctattgctctgccctacagagctctttcttggattaagtcaattatcatggttaggtgtcacatgtttttgccaagagacatttgtgaactaattctgtcaaacaggggatctggatttgtcctctcccacaattagaccttgggtgaaacatgaaaccggctttgagctctcctccctgcctttcctgggctgccaaaccccaagccaaggttgccactcctctgcttttctggagtaaaacctcaggccccgtgatgatcctggctctcacaccattg

SEQ ID NO: 1885038 - DNA, 4001 bp, Homo sapiens
atacacactgcagattgtcctccctgctccctcttccccagtatcttagatactgaggcacacctcctccaactctcccaacacccccttaccaagcaataccacctccctctagaggcccttatgagaccaaatgggtccctagagtgagggctcagccctccctctatgtccagcaaggcctctcagggaccacctaggcccaggaaagatcttcagaggcccagaaggtcctaaggctgagcacggtggagccactggttcctgcaccgcagctttggcacacagtgggggctgctgccagtccagaggcctcctggagtgcagaggcgtgaaggccttggacagccacagcatgggaaaagccagtactcgaggcctaggtgcccttctcttcccccagaggctcttgttgcagccaaggaacaggaaaggagctcaatttcacctccctctactcactgcccctagaagctagaaaattttttaaaggggtggcttaaagtttgtgggtctccttctacatctcacagcccatttagacaattttacccaatacatgccccaaacagacaggagccactgcatctttagtcctgttctctctttatttgatatgacaaaatatagtttcaggaaggacccagagtcaataaatagttggacaacagcaatgggtcaggagggcacagaaattcgtggcagggactatgggacagcaaagggcctctaggaccacttgctggggtccagtgccaggaaaccccactagttgagctagctagcaggctggggctgccggcctgagagggcatgcagcaggcgcaggctggggaggttcccgggttttggggggaagaggttgtggagataaggtttggaaagcatagagcaactgtgggggccctaggccgatgctctcctttcatatgcaaatcattcataagtgaaaatctagtttagtcgctacaaggaagcaccccgagtctagggccagactctcgccagcctttggctgtctaacccgtccagccgggaacaaaggagagggcgaggttagagggtccggcgagggtcctgtggcgcgggccgggcccaccttaactcgggagggccgcgctgaggctgggagccggagatacggcccaggccaaggttcgttctgcgccagcctgtacgccgcagccctccggggaagtcctgcggagcttgccctgggccccgggtaccgagctgagccgagctgaggggagatggggcagcgccgacagccccgcgggaaccctgggtcggtagggatgcggaatgccaaggaaaagcgcttttgtctgtggggcccgggagcccagtgctccagcacctgcccccgacccgaaatatagagaggaaaggcgaaaaggaaaggcgcagggacaggaaccggctaggggcgcgctctgcgggcctcccccgctgcctctaaagagcctctttgcttttcattttggaatctttcttccacttcatcctgcggttctggaaccagatcttgatctgtctctcattgagacacaagttgttggcgatctctatgcgcctgcggcgagtgaggtagcggttaaagtggaattctttctcgagttccagagtctggtagcgcgtgtaactggttcgggaccgcttgccgtccgtctctggaacataaaccccaccccaagccaggaaggggtgaatagcttgcagcgttcccccgtccccaccccagcccaggcccccacccgcggccggagggagaggaggcgagagccgcaagacaggccacgcgggccgcaggcgggccagcccagcccagccccgggagaggcgcctccgcccaggcaggaaactttccaccgcagccttcactctgcagccggaggggctgagggggggttggggggaagagggagacccaggctcggaccgaacaataagcaccctcgagatccgagcaccggggacccccctcccgcccctcccgagtcgctggaatcctccggagccgcaagcgccggcggagccggctccgcaggggagggagggagggagccgcggggggatccccgctctggagccccgcgctcctcacccttcagatccctctatttttttaactccctccctctcccccaaaaattgaatattgccttttatacacgttttgttcctatgatccaattatgtcgtcgtaaatttgggcgcacacagcctctaagccttttagtggacagttttacgagccattgatgcctggatcgtaaaatttatggccgcaggttttttttctttatttgccccgcatggcctataaaacccaggcggacccgagagcgcaaaatgaagtcctaaagtttaccgtggctcatgtgcagtttggtcatccacgggtaaatctgtggcggggccggtggctggctcagtccggcgggctgccctgtctgcgcctgctcctctttgatctccccactgctcttagctcgctcctccagcgccgggcgagccgccttctgactgtacatcccggggttcagaggagccgcttcgtctctgcccggagcgtgtcccggagcggccgcggcgctgcaggcggggcggtcggggtgagcccgggggttggcagccatgtctaccccgtggagagagttggaaggcgcaggcggtgggaaagtgatgcttaagtccaatccgccgtagcagtacctggatgcctgcacctctgaggccgatccatagttcccacaagtttgcatgttataggcagggatattggggctctgcttatagaatgaattggctacgtaggagctcatggcggggagggcccaaaaaaatttctgcaccctttttgattaagggtgatttgtgactctttgaagttgaggggttttttgttctccaaagtggacaatttataggtggagatatctctttctttatcctatgcgctcttcccaaataagggagccttaaatagagtcacgtgactcgagcggccactcataaatttggcttgatgacctccgggaggttagtgatggaagccggcgaaaagcatctcgatatgttggcaaagcccaaccaagggggagagggagtgagagagagaaagagggaagggggagggaaaaaaaaaaaaaggttcttggaattgggggtagccgggacaacaagcccacagcgacacctggtgcctatgtgggggaattgcatcctggagcgccagcttgctttccggtggctggatttcctacactgtgaaggagaagctggttgttggggcaacccctgagctagccttttaaattctatttaaaattgggaaaagacgaggccccacttataacgcacagagtgctttttgtaatgaaagtcccgttctcccaacctccagggtcttccaatcttcaaaaatggctgaggaaaggggattaagttaggtaaggtggcctatgcccaggctggagaaccaatggggtttaacttaggttccctaaaccaaaggtagaagtcccttgcctctcaggccctaaggctccactactgctgaagaggtgcctatcagcaagagaaagtagaattagcttctgaagaggtagacaggacgcccaggaggagggatcctgagtggtcagaacaagataggggggtcatgaagctgagggtgttgcaggctgtttgggatggatctggaggtgaggagccaggtggagttggctagacctcaccatgctagggtccccagagtggcaacaaggcaattttcaagtgtgtgtgtggacacggacagagccagacaatggtctagaggactgctctgtttccctgtgtgcgatccttatgtggtacctatgccagaggttttagacagaaaatagatgttaattgaggacatggagaagcaagattgaagcctccacaaatattacgtgagcatggcagaggaaaaggcccgttatgtgccctttggggaaaaggtctctggg

SEQ ID NO: 1885039 - DNA, 4001 bp, Homo sapiens
cattcttacctcttcatttccaggaggtgaaacataggtacccccattttcatctgaagacaggacctcttgcaggtcctcataccaggcttccagctcccagctggacagtgtcccgaaggagaaaggcaatgactcagctgccatctctgcagttggatcagtctggaaaagcacatctgcaggataatggggagtggctggaacaagctccatgtagcaaacagtctatgccacaagttggcaagctggtctgatgcctgtttttgtaggtaaagttgtactggaatacagccacatctgtttatttacatattgtttatggctgctttggtgctacagtggcagagatgaagagtcacgctagagactataggacttttaacatctaaaatatttactgtcctgccgtttaaaatttttggaaaagggtaggttaagtttacctgctttcaggtgtggtgatgtatgaagatacacttccttcttgaacactgtgggcaacaaagagaaatgtcagccatttttggaagggggagaggcaacttacttttctttttctttttttctttctttttttttttttgagaccaagtcttgctctgttgccaggctgaagtgcagtggtgcgatctcggctcactgcaacctctgcctcctcggttcaagtgattcttctgcctcggcctcccgagtagctgggactacaggcgcgtgccaccacgcccagctaatttttgtgtttttagcagagatagggtttcactatgttggccaggatggtctccatctcttaaccttgtgatccatcgcttcccaaagtgctgggattataggcatgagctaccgtgctgggcccttatttttcttttacctccagcctcctactggtccttccttacttctggtcttgtggggtatgcatacttggtccctgtagccatttcgaagggcagaagagggcctgactttctttatttttagttgctgacatttgtagtcctggttacataatagtaaagtcctggccaactcagctttctctaaatccaaagcaggcctcaaatctgccagggtaaaaactaaactacagggaagggaacaaatcatagcattttcctaactccattcccacagggctgacatcctccaaatgtacatttccagtctggacctcttccagaacttcagactctgctgtctactgcctacttgccatttctttttcaatgtctaataggcacctaagactatgtgcaaaggcaaactcttgctgattttccccttccaaggtcatccccatctcagatgacaactctagttgcttaagctaaaaaccttggtatcatccttcattcctcttctctcacaccctgcaatccaaagtactagcaaattttaactcattcctttttttctgagacgggtctcactctttttgcccaggctggaaggcagtggcgcaatcggctcactgcaacctccgcctgctgggttcaagcgattctcctgcttcagcctccggagtagctgggattacaggcatgcactgccatgcccggctaatttttgtatttttagtaaagatgggatttcaccatgttggccaggctggtcttgaactcctgacctcaggtgatccacccacctctggtctcccaaagtgctgggattacaggtgtgagccaccatgcccggcccttaactcattctttaaaaatgagtttttaaaacctttgcttagaagaatctaaacacttctaattccattgtttccaatctagatcaattcactaccatctctaaattactgcagaaactttctgactgcagaaggtcttcccatttcttctcttgccacccctccgcaactctattcaccatacagcagcctgagtgagccttttaaaacaggtcattcctctgctcaaaccctccaatgacttcctatttcatgtcatggaagtcactgaagggttttgagtggaggaattacctaaggtaattcctgaccacctgatgtaacactctgacctccatcctgaacattctccattcctttctctgctttagctttctccgtggcacttatattttgtttactgtaggcctcccactgagatgattttttcctcttgctcaaggatgtaccctgagccccaaactgtgtggcacacagtaggtcctcattaagtatttgttaagaatgaatggataaactccccccagtctctcttatagggaaggggcagaagcagagtggcagctgctgatccctaggggctagagatgcaatattgcccgaagtatttctctgcagggctgtcctccctggggaaccctcccttgccttccagtgtgtgggacttggctttcatcagcagtagagcctcaggtcagaaggctgcagagccaaacggggctggcctgatgcaatggttacacagagattagctgggagacaggaccgggttaaagaggcagggactaatcccgagggaaggacaataccctggggagaccccaaatggcctcctacacttaagagatccaggctgctctcttgtgcaggaggcccagagacctctacggcaaaaggaaaacacaccactccctgtccatcggcacccctcccaaaggcttgtgtctcctcaaggttcccctatccgctgcagggtccagtagccccagctaccaaggtggccatgctgacaccagaggcactgagactgagacagaattgggggtggggtagggagaaggcccgctggtggcgaagcggcggaaacggcctgagcgatggtcacccagtcttagagcgggggtgtgtcctgctgacctgcctccccgcggacaggcctaacgatgaggcctgaagttggctacgggaaagaatgaatttcccaagggcaaccgaggtccctttgcccagcagcacagagcagggcccgtgttccggctccgggcaggggtggagagacgccgtcgtccgaagcaataggggtttgtaagcaccaccccagaataagggactctccccattcctctctcggacggtccctaacttcactgtggaggagtgaggccgatcctaaagagcggacgccccaactttgaggagacgggagggtaaaaggtagatgggaatcagtactcgcctctctcctcaggttccagctctgattttggctctgtcgctgccacccgctcatctttaacatgatacgctcagtgccttagacttaagtctctgacctcgggagcgcctggctgtaatcttttaccatggccttgccctcctctcaggggcgggaccccaaaacctaccaatcagaaagtggcacgccggcattggccccgccccgtccctcgcatccgccactcaggagccccgcggcaccgcccccgtcgctccctctcgctagggggtcgacgtagtgtcggacccggaagtggctttgggtcacgaggcttcacggaggaggtgggtgagtcatgcgcgcgcgcggaggggagtgtagcggggggggaggggaggaaaggggggcggggatgatgcaatgtttggcaaccggtgtctgcacgcgcacgcgcaggggacaccgagggtggtgggaggtgcggagggtgggggagaggagagagggcggggcgccagctcccggcgcccaacggccccaacggctatcagccttggtcgcccctagtcggtcgtgagcctctttgccgcttgtctcccccagaagctgctgttccgcccacctagctttacccgccgttttacccccactataagggactcccatatttcttggcccctcccagctaatgggcacataggccttttgaacttttctttttaaagttggtatccatccactgggattgtcgacatctcgagtcttcttaaagaggtctcctggccgggctcagtggcttacgcctgtaatcccagcactttgggaggctgaggagagcggatcacttgaggtcaggagttc

SEQ ID NO: 1885040 - DNA, 4001 bp, Homo sapiens
ttgattttttttaattagaaaaaaactaaaaattgaaaatgaaagtgaattactaacactgaactcatttccttctcccctctactccaatccactccagtttcactggtttttcgttgcttctctcgaatgccagtgcccttcaaaccttaaagacttggtgttgacactttcctctgatggtcacaggagaatgatctgaatgttcttccctaggtgtggctcactcccttatctcctttgacctccaccttgaatatcaccccttaactgaggctactctgaccggcaccacactctccctgccatagcatcccctagcctccttacgctgtactgattaattttcttagcacttgccatctctaacactatatggatttccttatttattttgtttattgcttatctgccatactagaatgtgaactccacaaaggtaaggacttttttgtctcttttttttcattaaagaatcctgactgcttcaaattgtacaatgtagatgcctaataaatgcttattgagtgactgagtgaatgactattgaaactggccaagcaatgttatatagccttgtttggctacacaggtgctttagatacaagttcatgtatattttgtcgatttattgccctatctaacatctctcaaactaaggctttggtggagtcactgagcagttaatatattactgaaagcagatgaatgtgcttggatctaggcagagtaacaaaacaaagacagctaaagttaaaagtctgacccaaggtctcacattcctataaataattgataatgcatcaggggaattttaatgaatatatttgatttgttttatttacaaaatagacatactaaaagttgcacataattattaatccttttctagaagagtaaacaaatttattagagaccaagcagactgaaagtgattgggcttctttgtgaaacactgccaatatatgcaaaattatatccaatacaactgaaggaaaatatatttgaagcaattacaaatcctgtcccataacatgatgtgtggtgtgataaccaacatcatacaactttgcattatccctcctgccaatttcatctaataaaacacgactcatgtgaaatggtgtgtgccctaggttcctgtggtaattagctgtgtctaaattgctataacatgggcaatgatatttaaagttgctcttacattgcctaagagtgcatagcaaaataataattatcatgtaatttagattttcaaaatgtaaacagatcatggccacaaaaataaggggaatttcaggatgagtggctgtgcactgtctagcctggtggccagtctcatttcagatccattgtaaaactgagagacagacagcattcaggtaccctgcaggttttggttacagactttactgagtggtcaaatagatattgtgccttctagatttaggcaaaaaagaagagtggtgaggctttggcatatttctgttcatgacatattggcacaatatttctacaaatcactcaaagctaaagctaaggcaattaggagtagtgcatccatttctacttatgaaaaacttaacttggtgtttctaggataattagatcaaagtaagctcccttagggtatgatctacgttttctttaaactgttcctttcccagtgccagacatggtaccatggttaataaatcttattagcagtctgactgaagattttaaagtgatattcttacaataacgtttgcctgtagagacagattcaataccaaatttaataatggcaagctgtcaattgctttgcctttgtcatccatggtaattgggatcaactctggtgctcctccacacagaacattcaattgagatcaagccttggatgaaatctcttttccagaatgctcctcatttattgaatcagaaggagcctggacttaccatttgaaggtggtaggaaatggccaccttcaaatgggaagtctaggctccttatgatggcttatggtagcttccgtgacatggctccaggccatcccttcaactctactctttagctacaaacatgttgatgctatgatttggtagaagtccattctattcatatttatggcatagtgtacaatgtgtgcatttttcagattttaatattgtagctactatatggtttggaactgttttcatgaaaatgaactaatttagtttaagatagtgattctcaaccaaggatgattttgcttgttaggggacagttcaaaaggtctggggacattttttgttgtggtgactggatggggagggtgttactggccaggataaacattctacaatgcacagaatggcctcccccagaaagaattatcccattcaaaatatcagcaatttcaagggtgagaaatcctggttgacaaatgtaattgagtgaaaagtttacataatataatttttaagtgttctacttcgaaatgctgtcagtttgatagagctcagttaattaaatttacatcttggaaaaggcaaaactaaattaaaacctatgcccttgtttatgttcatatggctgagccatagacaacacaacctccaagtactcagctgctcactctcacctgaaccatcttttctgctgtgtcaacaagaggcaagatccttgtcagaaacccaagagttcttggtaactccctattcttcaccttgcatatccagtcaatcaccagttcttgtttatagtcccgttacatccaaagtcattttcaaatcttttcctttctctccaaattgcccctcttccagttaagacctccaccatgtccctccagaacttctaagagtgtcctggttgatcttccacctccggcttttcctccatgccttcacacaccctatgcccacatgttggcaattgccagaataacctataaaaattcatgtcattttggcaatttcctaccactttcaaatgttaagtccgggctccttgtgatggcttatggtgtcttccatgatgtggctcaagcccatcccttcaaccctactctttagctacaaacatgttgtttcttatatgtttctgtagatgttgtccctctgtctagaatgccctccatcaacctattcattctaacattccatagataactactattaatcctttaaaatgcttcttattatatataccatttcctctacaaaggcagaaggtgttgtttgcttgtttttaaattctgaattttcgctacactgtccacagtaccaaatggcaataaccggctagaattgtaatagggcatttctcctctagattgccatctttccctcttgattatctctgctcacttatctaatctccttctggaccctaaaatagtcaaatttaaccactcctacttcctggatagccttttgcaaaaccaaatctagtacaatgtcatgttcccttgactttcagaggtagaagctcagagactgcccagaatcctcaactcttctgatgtcacattttactcgatttttaagtatgtaaggactaccacatatatagtgattagttcagaatgaaaaatctatgttgaaatggtagtgctgggtgataagataggttcaggctgatgctagatcaaatcttgtatactacatatacagattttgacttcaggatctaaagtcttatgctttggttcttattcaaatttatattcttaaagcttaagatatgctatatatttacacagttggtgataataggcacctctgtaaatagaaaacatgacttctcttgagaagtgatttggtgtcactgaagggcaaggtcaataatttacaattcagagtaaggttggctgtgataaaattagcaactaatgattttgtatctatgagagaagagaaagaaacccaagtaggaaaggcctatgatcaaatgtgattcatttgcaaatttattgaaacagcccatacctcctggctgaacttagaaagatgtagttctaataccacaattg

SEQ ID NO: 1885041 - DNA, 4001 bp, Homo sapiens
tatagcactctcctttacccagttttatttcttctccttggcacttgtagttgtttatgtgtgtgttcattgtgtgactctcattagcatgcaaatgccattagattttatttattttgtccattagcactggcacagtgtataaaacaatgtttggcgtaagtctggtgcacaatatttatttgttaaattaattaattaagcccttacttatcatccatctctcccattagactcgtaaggaccacaaaagcagaaacttttgtttctggtattcctccagcatcttgcatatagaaggtgataaatgaatattgaatgaattaatatttgcctctgtgtgtattttaatctccctctcctagtaggttctaattaccacaaaaagtagaattatgtctctttatcacaccagtgtgtaccaatcccacaatagggtctggcttatgataggtactcattaagtgaaggatatcaaggactgggaccaaagtcaataagaacttacaatgaccatagccacccagagacctttacagggttgatctcagatcttaatggcagatcaaaaagagttttggataggcacagggccatgaaaatctgtaatcaccttgttcatccttttggggcccagcctagaccttgaaaaagcttacttcccagagcagacccaggaagctaggtgcagacttctgagtttcttactttcagatatatctttcaaatttggaaagcagtaaatcttaatttcgatccctagctttgatttgtttgcttaaaacatttgccctgaagactatatccatgtatgatgtcaaaaggtagcaaacaaaaataattcaattgtaatataaaaatctccactaaatagtagagcaacttgaaaatatctcttatcatcacattttcatgctttttcatttgtaaaatgaagataccaaaaaagaactagcagctctaaaattgtggattatatattcagatttgctgggatgcccttgggaggctttgtcaagcaccttcttcccttcctctcctttgcccacctgccacaattcctcttggttaaacatcacagttttagtgagctattgttactgacggcaatccatcaagtgtataggggaaagctaggttgagaatctctggcctatgttatcactatcatcctttccatggttaaaatactgtgaatctatgaaatgcacctcagttcactaggaaatcactatattttaacattgcttaagttactgctatcctgagtttacttacaccaacttaacattatttttttattgtactgtgagtcagggactatagcagacactgagaattcaaagatgaatttagaaatggtctcttccctcacggagttctatccaatagggatagacaaatgcaacagagtgtgataaatgctttaatggggccaaagcagcaagtcaatttagagcgcatcaaagggtaccaaagcagcctgggagagaggtgatctggaaaatctcccagtaggtgaccaaaaactgagtcctaactctaattaattgaattatagactgctaaagctgcacagtgttagaatcatctaattcaaactcctgatgtggcacagagagaatctgatgtccagagaggctgatgtatgcagagtgagtatcagagttgcagctaggacccagatatgtaatactgggttgcctctttaaaaatgcaccttttttgaagggaaatttttagaaccttttccttcatcagtttaataatgaaagtaattaatcatatttgaataagatacggagaacaatatttatatatattgactttatgctcagtggtgatgccaataacccatcatctcttggttatagattttccatgagctgctgatgaattttttcagactcatccacagggtaaacctgcttgtctcctgagctactgcatgtacgtaattacactcagaaggacaagtagagtttggctgtgaacaagagcaaactttaaaaataaatcttagtccgattagcacctcctctcatcaaccgactgaggcatctaagggctaaggtaaaacccaacattgaaatatttgtattattagtagtagtggtagtatataaaatgacccaggtatgcaatcttcttggagtttttgctcctaacatagtcacttgatttgggatgtttaacgactgtgattttgtaatgggacaatataagagctcattacattaaaacataaatacttgggaagctcatagtttctgatagcttgccatctgtttggttcttaccggcaatggatttatcctgcttagtgcagatgatgatattgtgggtaaaatcatggattatacaatggatttctgaggtctttaactactgttattaattttgccagcttacaaatcaacattttctaatataaaatcaattacattttatttttcaactcttaccctaagaaaggttgctatgggcaccacagaacatctgttctggcgccaacagattgcgttaaagtcacccacagtctctccaaattaaaaacctcaaactgagttcactggctttgttactgtactctcagcaggatgttcttttgccttgcccatcgttcagtttaatcctctagaaagaaaatttttagaggtacatcggactaaatcattttcttctgagtacaccatttccaaatggccgcccagggtcctaaatccggcggctgcggagagggactagagggtgtcctcctctgcagagccgtaggactcgagcgccttcatcactggacgctggagccaggaaggaaacccacacactcagggacaggtataaccccacaggggtgcaccagtgaggccccgatcgcagcggaggactccatccctgagcttgtgagggcgtcctggggaggaagcgaacactttccccgttcaagtcagagagcaggactcactgggtggcaggtcagaagttgaattttaacccgacctgcgctttgtccccgcgccttccgcagcctgggcgccgcggtggcaccgagctgggagaggacacgagaggctggcgcgggagaagccgagagttgctatcgaccgggagctgccggcggcgggagcagacgcgaccctcgccgctttcgatctcgaagccgcggagagccgatctcggctgctggggctcggctccccgcgctctgccttgccctttcggcagagggcagctccctgcctgctgcagccccgccactgtgcgcccggcagcccaggggtgcgcccagcccgccccccgagtggccgccgggactccagcagttggaccgaccctcgccctccggcgcctggacaaacttccttcctcccgggcccctgcgccaagcaagctgacaggcggctccctcgccggtctcctctgggctctggccgggcgagcttgctctctgcccctctccaaccccgagcccctggcgcctatagccgtccccgcgcagcggctccaacaaagccagaggaccggagacgacccggcgaggggctgggagtggcagcggggaccccagagccagaaggaggcgtcccctcggcggggcgagtacagtgggaaggggcagcgggaacgtagcggggagagaaaggggaagaaagtgttctgttctcggcgcgaacgccttcctggctcgtcctcgttccccttctcctcctgcctgagcgcgtcccatgtcccgttgggaattggcaggcggggaagggaggaggggagaggggacgcggtggcctggcgagcgagccgctcccttacctctgtccagggtgagcggctggaccactgtcaatgtcgccatgtctgccgtgggagccgaagtgacgctcggcttcagcatcagcaaccgctcgtagtgagaaaaaaaggaggagattgggggcgggggtggagagggaagacggaaaggagggggaggagggggaaggaaggaaggtggtggtggtggagaa

SEQ ID NO: 1885042 - DNA, 4001 bp, Homo sapiens
gttaaagccacctggaggtcaggtcaggtcttcctgacaactgagtgcttcaaataacacaacagcagctaagttccccacatcaccttgagtgtctggagagctaggcctatgacttctctgtctcaggatccctctcagtgcccagaaaacagtggacatcaataaatgtaacaccaataacatcttcgttgagcgctatgctaagcacatcaggtatgttaactcatttattccccagtgtccatctctcagtgttttatacatacgggaactgaggctcaattagccgagcgtggtgtcgtgctcctgtaatcccagctattgggaggcacaagaatcactcgaacccaggagatggaggttgcagtgagccgagattgtgccacagcactgcaacagagtaagactccgtcttaaaaaaacaaaaaaacagaaaacaaaacaaacaaacactgaggctcagggaggttaagtcacctgcccaagttcatgagaccaaggagccgggaagcaggaaggggaaggcaggagtgtaactctgaaacctctgctcttaggcactggctttcagctgaactgatacctctggaaaacagtctcaaaaaagtccacttctcctcccaacaattcagacctaaaaaccatttggcggggaagggcagggcaagcttctgagttggggagggggtgtgggatcccaagctgaggtgtctgttggcaagcagggtgcaaagggcatctgtgcagggagggggctgcaagggagacagagactgctcacaggcaaggaatgaaatattaaacattaatgttaatattaatatttataattaatatatttatgatatatagcatatatacatattatattaattaattataactatattaatataattaattataactatattaatataatcaattataactatattaatataatcgattataactatattaatataatcgattataactatattaatataatcgattataactatattaatataatcgattatattaatattaatataatcaatattaacaaatatatactatataatataaataatacctaagtttatataatatgcataatgttaatatttattaatatttcagggacaatgggagtcatgaatatggagagacaaaactagaatgaaccccaaggtgctgcatcagaattgaaggtaccagtctgaactcatagttttcaacctattgaaataaatatagatgcacgtgtgtgtgtatgcacgtacatacaaatgttccctaattctgcccattgagaggcctgtggttagcaacaccccaacagcaataagcagacctagcttggctcctaaatttcattttccactaaaaggaaccagagccccttggataaaggactgattccacaggtgggtagggagcatctgttgccagaaagcaagaaagcacttaaagaatgatgtggacatgtcaaagggacacagaagccagcctggatgagatcccactggccctaactgtccacaaggacaatttgagcaaggatgtcaacaatttaagagcagattataaaccactgaataaaacagaaaaatacaaagaattgaaacggacattgatggcagacaggatattaacataattttaaagtatctctccaaggaatgcttctgaatgatgaaggggaaaagaataactgtacagtggaaaagcctggtaaaacccaccttagtgaccaaagtgaatgtcaccatagtgggacaaaaggaaatcaagtgccaccttatgggattcaacgaggacgcagcatcccttgggtgatgttccagccaaatacacgtgcccggtggaatcacacaagaacatcagacacactcacactgagggacactctgcaaactgacagtactgggcacaaacatgtccaggtcatggtcgaccgcagtggctcatgcctgtaatcccagcattttgggaggctgaggtgggcggatcacttgaggtcaggggttcgagaccagcctggccaacatggcaacaccctattctctactaaaaatacaaaaattagccgagcgtggtggagcatgcccgtaatcccagctacttggggcgctaaggcacaagaatcgcttgaacccgggaggtggaggttgcagcgagctgagatatcaccgctgcactccagcttgggcgacagagtgagtttccaactcaaaaaataaaaaaataaaataaaatccaggccacaagagtcaaagaaagactgaggaaggttccagactgcaggagagccaagagacaggataactagatgcaatgggcagtcctgaattggatcttttgttatgaaggacaacgctgggacatatggtgactcttgaatggggttagaggactagacggtgggaatgcatcagagtcagtgtcccgcgtggatggctgtgttgcggttctgtgggagaatgccctggtctgtattccaagggtaatggagtagcaggttgacaaattactttcaaatggttcaaaaaagaaagttcttttcactgtacttgcaattcttatgtaagctggaaattatctcaaaattaacgagaattttttatcgacgtagtattttacatatttatggaaaacatgtaagtatttgttacatgcataaactgtgtaatgaccaagtcagagtatctggggtatccatgaccttgagtattaatcatttgtatgtgttgggagcattacaagttttcgagttaccaatttttttttttttcctttgagacagggtcttactctgtcgcccaggctggagtgcagtgggacgaccacggctcacgcagcacagcctccacctcccaggctcaagcgatccttccacctcaaccacccaagtagctgggactacaggtgtgtgctgccacccccagctaattttttaatttttttgtagagacagggtctcactatgctgccagggctggtactgaactcctaggctcaagagatcctcccacctcggtctcccaaagtgctgggatcataggcatgagccaccatacccagccaaattttttaaagttattttttaaatctccacttaattcgattttggtaaaacacgacctgtaatttttctttatcggtaggtaataaaagcttcagatgattttactgatcactggtatgggcatatttcatgactttgccctttcatctcttgcatagttttaccctcaccaagcaagaccttccctgcctcagcactgtttgccctcttcgtgttttccagaacagaagtggccctgtttcgtgcccagagcagaagagaacgatgaagagctctgctctcccaggtcttcctggtctgtgtgtgtccaggttttgagggcctctcacatacacggctctggaccacgtaagatctaattttagcattttcctgctcggagaccacatgtttggaacagcaggggctgacctgcccgtgcaggcctcctattgtgaagggcacgcgaagccaggataccgcagccctgcaggatgtgactcagcatcctgtctcagtgctggggcggccagcagctctggcaccaagtgctgctgctgacctcacctcttaagaccacaaatacccagggtaattggtgggataggcatgcagcatcagctctccctgttaagacaacttgcttgtccatccattatgctgggcttccttgtgaacaccacaggtatctatcaggaagagttcttccgaggaactgatctgctggtattttcaggacaccaagaatcaagagattggtcttgtttctctctttgctttgactaccaggaaactcaaagtcagatctgtggccaaattctggtaaccataccaatgctatgtcatgtattacatgtacaaaccttccccttacttcatcttattttcttctgctttcttcgtgtcccgattttctcactaatgttacattctattgttctct

SEQ ID NO: 1885043 - DNA, 4001 bp, Homo sapiens
caggaattcgagaccagcctggccaacgtgaggaaacccccatctctactaaaaaacacaaaacttagttgagcatggtggtccacacctataatcccagcttcttgggaggctgaggcacaaaaattgcttgaacccaggaggcgaaagttgcagtgagccaagatcgcaccactgcactccagcctgggcaacagagcaaggctctgtctcaaaaataataattaaaaaaaaaagtaaaaaaccaaaaatctctaaatagcctcaactcatcatgaagagtttaagtatacacaaaaaactaccaaatatttatctagtaaaacaaaaacaactactcaaatatttatggtggccctactatgcctaagaaggtactactgagatataggaataataaatatagtccagggcccattgcctcagagaagataacacatatccatttaaccaatattcaacaaacatttattatgcaaactgtgcttataagagtggctaatccagtgtacactgcagtcaaactatgaaaagatagtcaagcttcttagcttttcctattacaaatgacagggataccatgtcctaaaactctgatatcatttatcatttcaaatagtaaaaaaataaatattaacacctgactttacttgtataatttggcaacattatactgcatctaagaatttcatattcttcatggtatggctataaatttcagtttaaaacttacagaaataaccagacagttttatagtatcagactcttcacatcataatttttatcagctgcaacaaaaagtaaaacaaaactgttttactgttactgttatccttgccaaatataacctctgtaaaaagtatggtgaaatatgttcatacatataaacatgactgcaggcgacagagcagtctttaacttataagcaacctaaaggtcatcttgtattaacgactctgctaaagacatcttgacagcacgatatgctaaagatttctttccaggctttcaaagaacctatctgtaatataccaaactgtaatttttctaccttacaagaagaacggttgggtatttacactttttacaacattcatccttatattgttcaaatatacagtgaacatgtgctaatttcataattctaaaaaaagctaatttaaaaaactacccataatattattgagtaacatgtaattatcatatatactgttaaaagatgaggtttttttaacaaaaaaattagccgggcttggtggcgtgcacctgtaatcccagctacttgggaggcttaggcaggagaatcacttctcctggcccgggaggcaggaggttgcagtgagccaaaatcatgccactgcactccagcttgggctacagagcaagaccccatctcaaaaaaaaaaaaaaaaaaaaaaagaggggggcgggagtggaggggggcgggggttcaagcagctaggactgatttggtattaaagtcattcatttccattcattcatgtatataaacatacacatatatacagacatttatttagttctgaagattaataaaattcaagtatttcctgaatttctcacttagtgtgcaaataactcaaccgtctcccctacaattatattttgcttttaaaaaaagccaatattaaatacatttttgtggaactacacaaagccatatattaaaattatttataattgttgatggtgaaccttataaatgggattatacttctctcctacaaaatgaggagtgctactgcaagtggctcaaaaaggaaaaagagaaaaattaagtttgaaaaactttcatgtcaatgacaaaagtgttttatatagtaaccagctaaagataaaatcactgaaaaagtgatgtcaagttgacaatccatactaaaaacttctttgcttgttttatttctatatctatctccatatatatggagatatctatatatatatatatatatatacggagctagatatagatatatatagatataagtagtttatcttgattttcttattttgggaaagaggagcataaaagaaaggagaaattattggaatttaggttacctcctaagaaaggaggctttgctttaagaagatggggaatgtaatactctattcgtctaaccaatcaataaccacactttgaaatctttcacttgtcttcaactagccatgtagatctgttcctcagtattgccttcgatccactcttaccactttctgtcaccttactaaagcatggctctgatcatgtttttaaactcactaaaaatagtctaatgatcttataactgtactatttttgtcccacctatttgttcagttttctctgtatacttccttctatttcctacccactaacaactcattgtttgagatactttgatcacatccggtattcatacctttgctcatgcaccgtaccatgtgcccagaataggctaccctgctcccatctctgcttattactatgtcatgttttccataagactttcctcatatccctccaagtagactaacttccctctttcctgacttaaggcattcttgattatgtttatattctagaacttctcatattttgtcatgtattatagttagctatatacagttaagtcttagaccccactagattaattaaaggctgatcagaaggaattgtctagagctcagctgtcatgacctattgttaaatatattcccccaacaaccctagaaaggaattctgcatggtttagataatatgtttgattgattaacctcatcttccatctgtgaaacatgcttcccgcatttttcttttttaattctcatttgacaaagaaggctggctctaaaaagaacagctcaggctatgcccaaaaagtcaaatgattactaacaagcaagttacttaaaaaacagtatccggtatttgtgaaagaagagttttacatttcacctaaatgccaaatctcccaataatattaaatcagaccttaaagggtgggtaacatttagaataagtaaacagggagattaaggaaagacgctgatacagatgacctaagcagaagaaacaacatgaataaaaacacagaaaataagagttaggcattgagaatggtttggctagagatgagtaagtggacattaagttcctttcatatgcccctatagtgcctgcagcttagctggcaataaaaaatgtttaataaatgaatgataaaataacatatttttaaagggctgaggaagaaatggaagacagaaaaagaaaggtgtgatatttctttcactttgccctctgatagttacatttttttaatgtatccatttttaatgaatgaataaattcatttctctggaagtggatcaaatacaaaattagacccaagtatacacatttaataaatgcacacatggacagatttagttgtcaaaagaatggctctaaatgcaagaatctctgtaaagacctaattggaatcagagctgacgctgagatcgctgtgataccagcatggccctaagccaaatctcttttctggctgaccatgcaggctgtgtcactggacattaacttcacacaacatgtaacaaaccaccaagtgtctagttctcttgtgtccgcctaaggccagagcctaccttcccttacagcagtgccagcttatcaacgtactcaaattttattacaacaaagtcttggaaagcaaatccaagaaggcaaaaaataagtcatttctactcttcttgttacatctagatcttgtcataatttagtaaactaaacttctataatcaatgaggtgggaaagactcagtgctccaggctggcattctaaacctcctacaaccgggtctgagcttccattctgctctcgtgttccactactcctccactgcacctctgccactcaacttcgctaagtgttcctatacaagctcctctgacacttaggataacctatgtttctctgacctcccacagaactgaggc

SEQ ID NO: 1885044 - DNA, 4001 bp, Homo sapiens
caggtactgtgccagccattagggatccaaaaatgagcaggacatagacctttccctcagggaacctgcagttttgtggaagaagaaatataatttaacaggcaactccagtatcacgtgatagtgacctgaggtttgtgtaggtgcctcagacccccggaagatgccatcagtatccaaacaaatgccccaaagaaaccacataccaatagaagaatagaatctgtcacaattgccagccacaaagcacaccataaactacttagtgcatatgaatagcaaagtgaggtccaccatgggattatcagttacacaacaggacaaggagaaaacctctctgaacccatttggaagagctggcagaggagccaggacctatgacaggagaaccaccctgagatttattcacttacatataagctccatgagggcagtgagctttgctggtttccatctgcactgtagccccagctcctagaatagtgcctgatacaaaggaagccattgctaagtatttattcaatgaatggaagtttggatggatggattcatttaactcatatcaagtaactgcagtgggtgcctgtagcagagaagttgtagcagaggagtaggatagtgataaaggcaggagacatggtacctactaaaaatctgtggaatcaacaaatgacttttcacatccatcccttttcataggagcttgaactggcagtgactccattgtgcaatttggaacacaagaaaaagcatggattttgaagtcagacaaatgtgagttcaaatcctggctcctccagatctggaaggacctgatgggaggactgggaggacttgattttagcaagttagtttcctgactcagtgtcctcaccttattataagatgggatccacaccttcagggtgactctaagggttaaccagaaaaaaacatgcaaagctctagacccagttcccttcacccttaccccatttttctggcattagggatggttgtgcacagctgctgtggatccccaattccttgaatagccatcctgagtgcttcgtcagtgctcttttctatttctcttaattccgtatctcttttcagaaaccttctccaagaagccttcttcatcctctcaaaaatgcatagtaatctattccttcttctcaccctttcagcatttacttcggttgcattggtgtgtggttcaaataacagatgtcactgaactgttgacttgggtagatgccctgtcttccttattaaactgtgtcttactttgtaccttagtagctaatgcagtgctttgattctagcagatgcttaataaatgctactcatgataaacctcacttcctgtactcatcagtcctcaggtcattaaagttgttttacacagggtgatgtgccaccctataaaactacaatattatgcagtgagtcacagatcattacaactcccaagaagtcaataaaattgattatatcagaaatcccatacctgtttttaaaaacaacaaaatgttttctccatgtgtttgggcattataaaatgggacaaaagcctgaagcttagtaaataggatctgcctggaggattgctcagagtgcattacaaaaatgagagtaaatgaaattatgaattcatgtttgctgatcagagggaacacccggagactcattcttgctttcttatgtatcttggtctccacatcatgaaactataaaggtatcctcttattacccatagaaagttgcaacatttaattcatatcaactaacgcttattaatacacccactagaaggcaaatctagtcaggaagactgaatcactcaacagaagatttggtacttcccagccacagtggcatctgcttaccacaacgttaatcaggtcactgccagcttatctgacttcatctttgaggtgtccaaaatagttatactctagaaagatggtctagtcaataagatgattggtcaacaatctttctagagctcccactctgtgctaaccaacatcctatgtaataggatgaatataacagaatgaaaagaaaggatccttttctcaaaaaacataccagtgatggaaaggtaggatctaccaatctataacaatttaagagcaccttaaggcagcgattttcacggatgtgaagagcgggcttcacatcattggcatcagcatcacctgggaactcattagaaagcaaaatttctaaccccagacctattgcatcagaagctgggtggacccagcaatctgcgtttttaaccagctttccaagtcattctgatgcatactacagtttgagaaaccctgctttaagtcagctaagcaagttcaaatcaacataatacccacagattatatgtgcggagtaactgcatgggcctggtgttaatcagagcttccttaatgacccttcattgaatgtattggtgggggtccatattctaagtgaaaaacagtttaacacagagtcaattcttgatgatctcttttgtgaatcagagagctctgagcagccagataccgtacagagcagtggtgggcatgggttctcccaactgcttaccgagggcctgtataaagcctgtcagtcagactaagacttactgtggttttaatctcacttcgtgcttttttggaaaattgtaactccatgtttctgaccttggtctgttaatctcaccctgattcctgatgattttcttctttgattagttgttcttcaacatggaatctaatgtgaatatgattaacccaaccatactgactcaccaaaaaaataaaataaaacaaaagacatgagcctattcctctgctggacaagaaactagaggtttacccttctattacaagctccttggagaggaaaattcagtaaatcctctgaaaatggttttcttcagtgtttctatccatcatcataaggagtcattatcctccctttgttaatttattcggcaatgtttattatagctgaattattgattatgtggcttcataggggtaatttaattcaacttaatttataaggaaacacctgctctgtgtaggatgacacattaggctctgaagagatggcccttacacactcagggagtatgacagacagagtaatggtcccccgaagatgtccacgtcccaattccagaaacctgtgaatatgttactttacacgagaaaacggactttgcaggtgtaattaaattaaggatctgagacacagagattttcctggcttatatgagtgggcccagtgaaatcacaaaggtctttataaaagacatgcagaagggccagaatgagaggaagagggtagtgaagagatgcggtgagacagacagagagagggagatctgaaatgtcacgttgctggctttgaagacggaggaagaggccatgagccaaagaaggcaggtggcctctagaagctggaaaaggcaaggcagtgagttctccccaacagcctccagaaagaatgctaaggaattctgacctccagaactgcaaaataattaatttatgttactttaagtcactaaatttgtgataatgtgttacaaaaacaatagaaaactaatatagggagtttacaacctagtaaaagagatgaaggctgggcgcggtggctcacgcctgtaatcccagcactttgggaggccaggcaggcggatcatgaggtcaggagatcgagaccatcctgcctaacatggtgaaaccccgtctctactaaaaatacaaaaaattagccgggcgtagtggcgggcgcctgtagtcccacctttactcgggaggctgaggcaggagaatggcgtgaacccgggaggcagaccttgcggtgagccgagattgtgccactgcactccagcctggatgacagagcgagactccgtctcaaaaaaaaaaagagataagacaagcagctttgatataattcagaaagtgataaatataaaatagaaatacaaagaaattgctgtggaaatactgataaag

SEQ ID NO: 1885045 - DNA, 4001 bp, Homo sapiens
agtcgtcatctggtggacattcaggaataaaaacccagtcggccccacaggacagagaggtgacaagggccaggtatctgagatgagagtcagaagcatcctgctagaagttgtactctacaaatagcctcacccatacccaacaagttctcctagtcctcatagttgataaaaggtctggagagcctccattttattcgtggggcaagggtaagagcaccggggcccctcaatgagattctgtctctaacggataccttccatttatgttcacctgccacagtggcttccagcctcagagcactacccactctttacaccaagcacgtgcctgagcacgtacacacatgcatgtgtggggatgtaacagaggggatggaggccggaaagggaaccacaccacaaggagcatgtgcacctccagatctgctgctactgagagacctcactggactctctggggaaaaggaaagggctatcgctaggtccacggaataaatgggtcagaatgaggatcttacccacagtggcggcccattacttctaacacaaatgtcctctggtggctgcaagagatagacatatgacacagtccaagtgaccctatggccaagatcaagccaccacccacatctaggccaattaccctctctgggagatacatgtatgctgccaggccttctagcaggcttcctgagaccaggaagacctaggggaaatactttagccacaaggtatccttcctaggcctgagaaaacacagcagtaaaaagtgtctaaacagaggctctgttccagggaggaaccgggtcagggaagggaaggaaaggaaaggataagaagtgaagggagaattggactaactggaatcctttaggattaccctggggtaaactgttacccttctatcctcccatcctacattgcctccccccaggtccccttatctctgagctgtcgtggtcatagcagcacctatactttctatgatatggttggaaagcgtagctcatgtctgggctccctagatttgcccagtctgaagaataaccatttaccccaatgatatgaaagacctcagagctgcatatttggacagtgggccagacagtggcaaaagacaaatcatatatcattaagggaacagtgcaatttcagtgctctagataatttttcgttaaaaatagtgttctagccccagaaaactggccattatagtcaccatagctcaaacgctttagtcttcaggagcttctagccctttagcctgtcctagctgccatcttcttacactgcctacctcccaagtccccttacctctgggcagtggtagtgatggcatctacaatttccatgatccgatgcagggcagagtcagtgccaatggtcatatcggtgccacagaagtcattgtcaattgacccaaccaggcccacaatgttcaggtagctggacttcgtagcctcctcatctgtgatcttacctgacaatgagaagcaaaccaggagccactgggtgaggcacctggcatgcctaaagaggagatatctagagagagagaaactctagccaaaaggaattgtagacaataccagaaaaaggagggcaaagactgcctatttgtgtctgggtaacatttttctccaatgggaggtaaaagcagggcgggggcgatgtgtgtgtgtacacgcgtgcacgtaccgacacaaataagcaatactgatgtgaaaactctcttacctgctttctggaggtcactcaacaagtcactccactcagaacggaaggtgtcagccccagtgaggctgccatcacccccaatgacacagagattggtgatcccacgcttcaccaggttgtaggcagctcggagtcgtccttctcgttcccgaaagtccttgcaccgggcacttccaatcaccgtgcctccctttggaagaggtagaagtcagctccccagagacagggctcaacatgctgagatatcccctattccaatgctgtgatggcctaacataactgtgtgactccctagaaagttccttgacatccttaagagtgatctgtcccttccaaaggaaagggaaatgatgctggctgaggcatcatagggtcattcccatattttgctacacatctgagaagactgctaagaactcctttcattgaaggctttgtcatccatgactatcctaaagagaacaagtgaatacatacatgtatgttggcttctcaaataatctccaactttcacatcttagaagcagtgacttcagtctttagaaattctccctaatggcctgacattactggattgtgtccaaattattattaggagttcatcccaatgtgttttgtagtatttttcctctctctgcactgagatttctaactgtacccaggtactgccaatcctttccccttagctccttgcaatccatggtgctagcagcagaagctgcaatatccaggtattcacaggaaaaatagctctaggtaaagaaagccttatagataccccaagagaggtatctataagtccctgggaaattaaggctttctatccctgagagaaagtatacttacctgagagaggtaagtatacttaggttttcatatcatatgtactcctgggcagccatgactttgggatactggtggagaattctggctcattctcagaccactttatggcaggcaccattacttagcacctaggtagagccttcactagacactgcatattaaatttttgcccatggatttttagggaactgagctgaaaaaagggggatacaaatgtaatttacaaattttcagtaaaccagcaaatgattgtatttctctcactcactgtgggctagcccacagtggatacacatgagaagcctaaaacaacatggagcaagtagcataaaggactgtggaaatcctcaggatactcttaggatttttttgagactccgaaaggctgtctcagttccttcgtcctttaagtggtctggtttcaggtcacctcatctccatcacatgaggactggcagatttcagctccacttctggctctggctccagtcctctggtaaggttattttcagggccagaccttccctgtgaccctagagtaagatctgcttatgtgtcagtccccatagtcttgtttatgacctttccataaagagcaaagcatcctgtgatcactcctccaccctctccctgccccaggaaaccagggtggtattttcaaatgctaagagtaaagggcaaatagggtccctctcttgtcactgaattccttcccatgaaaccacatgacagggaatttaggagaccatgagcccaaaacagagtgggatgaaacaaggacagagcaaatatgggacagggagttctctggaacataccagctgaagcatcatcgaaacgctctcccaggtggcttccttgatgtgatctccaccatccaccaggccttgataaccctgtgtgacacattatacctgttcagcccgttaggcttctctataaattcccaagattaagacaggatccctgggaagagattctctgagagtcaagccacctcctcccattagtgagtcctggatgctcgtgagactatcatatttaacacagtccaaagaaggaggcatcaacttttgcaatactctcttctactttctcccatttttgaaatactgggatgtggatatccttcctaatagttaatcttaattcttatttttggctcatcctatctcctccaacctgcttcctagggggccaatgataacagatggtcttgataaccatggagaaaaggagaaggggaagttggtgggagggaaggaaagaaacgcgacttgctctaaaagattataaaatctgatacaagaaagcaggtggaccttataaaaagaagagtgggtgaagcatgagagggtactgggagaagggtgcaaaagaagatttgagaacctcagaaagttatgcaaactaca

SEQ ID NO: 1885046 - DNA, 4001 bp, Homo sapiens
gggtgtctctcgggagtgggctctgcctggggaggagggagtgtgcttctccctggcaccaccccccagggtcccgccacaaccctgtacctcccaccctgcaggctgcctgcgcaccatccacactgtcctcgtggtgctggttgaagttctcataggagtcccagcgcacggctggctcagtggtgttgtagtcgacagagaccgaggggtcgttccgtggagtgctgcctgtggaaggccactcgggtattggggagcaggggagaggcggccctcagtccccagcccatgtccctgctcttacctttgatcttctcggggctggaggagaagacaaactccacggaggcttggaaggggaacctctcatctatggggagtggacagtgaagaaccaggcccctggcccataccacactctcctgcctgcctgccacctgcctgccacctgcctgccacctggactccagccccaggccacttgtctcagactcaccagtccaggcctcgtcaagctggtccttggggaaagtgagctgtggtccgtggatggtgcaggtgtggaactggactcggaacacgagggtccggtctgtgccccggccacccttgtgataacatgttacctgggagaaaggcaggaggctgcggatcaggcctcatgtcctcttctgcgcttccaccctggggactgcctggtcacagcttctgccctgcctcgatctcaaggtgatctccctactcgctctccaatctgtctcaaattggtgactgtgccgttacaccaccaacccctgccccatctccaggattcttcttgttgacaggacccccctcaccatgacatcgcctttgaggaggagggctggctccaggctgatgcaaagctgctggggaccagggcctgcaatgtgactgtggggagagaggagaaggcagagatgaaccagaagctcctgcgtgcagaggcagctatgcagtcagggggagccaggagaccagagtctgagccctgcccaggtgtctagggaggctggagaagcaggaatgcaggagcaagaggggccctggtcatgaagtgtcaggggcctgggaatagagcactcactagactccagatgtgtagacaagctgcatggactggtagattttaaggaagggctggaagcctggaggggcagaggagaaggcacaggaggggtgctgagtggagagggcctgaaggtggttctccctagggagcacatctcaggcagactcacctgtgccaggttcaaaggctggcagcatggggatgagcacatagtgcaggaagagagggctgctgttcattctgatggagccagatagcagcccactgaagtagctgatatatctggtggagggcgtgtcaaggagaacataagccttttcctctggaggtcaccttgtatcatttcaaccatccacccttagaaggctcgctcttctgctcaacacttccttcccatcttccgggtcaccagaaagttcttccttgcatctaacctcaatccctcctgctcccctctgcctcaaagctctttccccagagctctgcttcactttatagtggcaggccctgactgtccttcaggttctctttatgactgatctcctcgtctatttattcccaggtctactgccttccaccctactagcatgaaagctccatgagagcaggggctttgtccactttgaattctcagcacctggcacggcgcttggcacactcagtgaaagtgtgctgcatgaataagagagtcttggccttggtagccatgaagggagctgctcctctggcccatccccacccaggctgctcaccgacgctgggagggctgcagttctgtggccaccttgtcctcgcagaatttccgcatggtaagagtggccagtgcctggtccgccctggggatagcaaggccagtgttggggattagggattaatcttcatcctggcctcccatccctaagccccaggggatggaggagaaatatgattctctaagtctagaagaagcccagagtagtggtaatgagaatgagaagcaccatgtacagtcactttactagttgttgggcctcaggcaattgttccctgaactttagttttttcatctgtaaaacagggcaacaaaaccatcttatgggttgaattatatccccccaaaagacatgtacctcagaatgtgaccttatttggaaatagggccgttgcagacataattagttaagatgagaccatactgaaggagggtggaccctgaatccaatatgattggtgtccttataagaagagaggaagagacacagacagagacacacagggagaacaccatgtgatgacagaggcagcgattacagtgatgtgtctgcaaaccaaggaatgccaaggcttgccgcccaccactggaagctagaaagagacaaggaaggattccatcccgagtctcagatggagcaagggcctgctgacagcttggtttggggcttctggcctccagaactgtgagagagtacatttccactgttttttgttttgttttgtttttgttttttttgagacggagtctgactctgtcacccaggctggagtacagtggcaccgtgtgggctcactgcaacctccgtctcctgggttcaagcaattctcctgcctcagcctcctgagtagctgggattacaggcgcccaccaccacgcccggctaatttttatatttttatatttttggtagagatggggtttcacctggccaggctagtttcaaactcctgacctcaggtgacctgcccacctcagcctcccaaagtgctggtattacaggcgtgagccaacgcacccggcccatttccactgttttacaccaccctgtttgtggctgccccaggaaactctacagaccatctgctgcagactatgttgcagtactagtgataaaagggaggtggaagtgctaagctgacagcaaaggactctcaacgaagaggtgggctccaggggagatgggttcctaaggggccagctggagaaagggccactggggaagcagctactcaggcgctgggagcctcaccctgcagagatcttgctgtagtgcatgtaggcagaaacgatgaccccaagcttgcccttgtttccctgacagacagagagacagggatgagggtctgggagctccaggctgacctggaacctccaggcaccagggaacccgaggtcctggcccaccttgcagtatagtacgaccacgtgctgtgggtcagcactgagccatgtctccatggctttgcagatggagcacagcttgtccaggggtggagcatgcagctcaggccagccgaagtcttgaacctggggagaatgcaggggtgcaactggggccgggggccaccaacagagagagatgggcagggtggaaaggggacagggcataggggtccgggggcaaggctgggggtctgctggttgtccatgatagcctcggcactttccttatccatacaatgggctgatacctgctgcatcacgttttggggtgtctccagtaatatatcatgggagagtgggaaagtgcttaagagtgaagtagatgccaattgctactattaataacgaggaagctgggggcttctggggttggggtggcttggtttaatggttgggcaggccatttccttcataccttggggtttaagcgggtcaggtcatgccttttctctgaaaggttgaagagctgaaataaagggggagggctttagacagaaatgatctccggcaatgaggcacgaggtggaggtggatcctaagtaagaatcttcctctaaaataaggtgcaggccggtcgcagtaactcacgcctataaccccagcactttgggagaccaaggcgggcgggtcacctgaggtcaggagttcgagaccagcctggccaacatggtgaaacctcatctctactaaaattacaacaatttgccg

SEQ ID NO: 1885047 - DNA, 4001 bp, Homo sapiens
aaaagaggggaagttattatcccgtctccttgttagaatttcacccaatttccacagctgtacattctctcaggattcctgcctggaacaggtaactcctggctccctcaagctagtagacaaggcctaattatttactctttctctcccctaagaatctgactctgcacataagaaacctgattaagttaaacaactgtacctcttatttttaagaagtcattactcggccgggcgcagtggctcacgcctaaaatcccagcactctgggaggccgaggtgggcagatcacctgaggtcagaagttcaagaccagcctggcctggccatggtgaaacctcgtctctactaaaaatgcaaaaaattagccgggcgtggtggtgtgcacctgtaatcccagctactctggaggctgaggcaggagaattgcttgaacccgggaggcggaggttgcagtgagccaagatcgcgccactgcactccagcctgggcaacaagagagaaactccatctcaaaaaaaaaaaaaaaaagtcattactcaaaatgaccaagctgagtatgtgttaactgctatcaaacaaacactctaggcaagtacttttttttttttttaattttttttttttttgaggattctcactctgttgcccaggctggagcacagtggcatgatcttggctcactgcaacctttgcctcccgggttcaagtgattctcctgcctcaacctcttgagtagctgggattacagatgtgcgccaccacgcccggctactttttgtatttttagtggagacggggtttcaccaggttggccaggctggtctcgaactcctgtaggtaaggactatttattaaatgtggttaattaccaaagctgaaagtgagtagcaggactgacctataagggtccagggctcagagagtgtgactaaagaatcctaaattctggagaatactgctttagattgcagaagagctgagataggcaccaatgatagaatgtgagcctaaggtaacaaaaactctgaactctgaagagtatagcagaagcctttttttttttttttttttgagacaggatctccctcttttgccaaggctggagtgtaggggtacgagtactgctccactgcagcctcaatctcccaagttcaagagaccatcccgcctcagcatcctgagtggctgggactacaggtgtgcgccaccacgcctggctgattctttttgtagagatgggagattcattatgttggtcaggcaagtcttgaactcccggcctcaagtgatcctcctgcctcagcctcccaaagtgctgggattacaaatgtaagccaccatgcccagcccacagaagcctcctacccccacaccaaaataacccctttcttcagccaaacttttcaatgatctgcaggtgaactattttgctgggagagaatacatcttcaattctacaaagaacagtaataaggaaacaatttacaaaaacccactttataaccaactttgctaaatcacatctctacagctaactgttccatcaagcacacatagcctagtatgtgctaggaacagatcccaattaatagaaatcaactttccacagtgtcctcacagcctcctgcccattttctagttctctccacattcccatctcctgagggaaaatgagccccaccccagctcactgctaactctgaccccttaccaagtcctacctgttgatgaagttgcccaggttgttaagcagctcagaattattcttcagcagcaggtccgtccaggagaaagcactgtcctggccctcaggccgaatgtacagcagatagaagcgccagatgtcagcagggatccccgtgtcctgggccatgtccccaaacactcccacaccgcggctcttagagaatttcccatcctcatagttcaggtactctggacagaggagaatgagtgagaaccatctgctcacatcacatccttcccctctctagcccactaactcttccttctttcctctttctaacctcaactatgggtgtctagcaacatttctccttaaggggctggtatgctcagattttgggagtcccttcctatccattctggcccttttttctctttgcttatatctactaaagagttttagctttagacttttgctttcttcaggttcttgttcgtttctctaggttgagttctcattttaattatttcctatttcagctcaactcctaactcaagatagcagctctccaagatctttttccaagtactgcctcacccctcatttcctatgaacaccccatcagtagtcttccagggtacttacctgtagcaatgaggtggctgaccaaggtatagttatcctcagctcctagggctgagcaaggaaagactaagctatggaaaggaacattgtctttggccatgaactgatacaggtccacctaggggaatgtggttaggagagatttcctgagacctccttcaaaggcccaaggaagaccagacacccaaccctaacacccacaccctaccgcctaccctccccatgcacagcctaaccaagaactgctcacttgctctgggttcttccaccatctctcccactggtctgtgtagttggctgtgatggacagatagccaatagtggcatcaaaccagacatagaatacctggaggtcagaaggaggtaaacatgttagggaccaatccaaagtctcaaactgaaacaagacataatcagcagtctactctgctagcccagggtttcaacactaaggctgaatgatatgaataaaaaagggtttttaccttgtcttcaaaaccttctaagggtacaggggttccccatttgaggtctcgggttatgcagcgtggcttgaggccatcccgaagccaagaacgggtgataaactgggcattgggtgtccagtcactgccaggcaatgtcctccccaaccactcctccagtcgcttctccagctgagataacggagaaagagggctgatttaggaaagtctcatatatggttagcataaggataaacacatataacctttttggagcacaatttggcaatatataactttttttttggagacagagtcttgctctgttgcccagactagagtgcagtggtgcaatcataatcacagctcactgcagcctaaacctcctgggctcaagcaatcctcctacctcaacctccccagtagctgggaccacaggtgcacaccaccatgccagactgtaatttttgtagaaacagggttttgccacattgcccaggctggtcttgaactcctgagctcaagcaatctgcccacctcagcctccaaaagcgctgagactacagttgtgagccaccctgcccagccttaactagatttttaacacacagccaggggcagtggcttgcgcctgtaatcccagctactccgaaggctgacgcaggaggatcacttgagggcaggagttcatgaccatcctgggcaacacagcaaaatcctgtccctaaaaaaaatttttttttttttaatttttaaaaatatggaacacttcacaagtttgcatgtcattcttgtgcagaggatgtgctaatcttgtccatatcagggtctcactgtcacccaggctggagtacagtggcacatcatggctcactgcagcctcaacctcccaggcttaagtgatccttccacctcagcctcctgagtagctggcactacaggcacgtgccaccacacctggttaatttttgtatttttagtagagatgggtttcaccaagttgcccaccctggtctcaaactcctggggtcaagcaattctcccgcctcagcctcccaaagtgttggaagttggaattacaggcataagccaccgtgcccaaccaattttttctttttttaaatacagacagggtcttgctttgttgcccaggctactctcaaactcctggcttccagcgatcctcctgcctcagcctccca

SEQ ID NO: 1885048 - DNA, 4001 bp, Homo sapiens
caaccctgtatcaacaagattatgatttctgcactgcagtgagtgtgttgggggtggtgcagcagccaggggaggtaggaaactgggtaaggacaatgcccaagttggcaaatttagtttgaatgtcattgtttctctctctacaagccctcttgtattggggctgtgttggtgggaggtgggggtggatagaggctggggaattagccaagtaggattttagtttgtaggacactggtcagataacagtaaagtttctagggacattcggcataggtattagtcactagcaactttacattcacaactttgcattcttcacgttttatcctcagatctgcaagagccagagccccacatgccagatgtgtggagaaaagtttcttaagcattcagacgaagccctgaaaatcctagggggtgttggactcttctttagctttacagaggtaacattctccagttccctcacacacatcctttttgagactgagaattaattgatacttatctctctccctttgttcctacagatccttggtgtttggctagcaatgagatttcggaatcagaaggatcctagagccaaccccagtgcctttctatgagactttggatccttctgacttttcttctgctctctctaagctttctcttcctcccttagggaatatctagggtctgtaaccgttttggtttgagaaaaaggaaaggccccttgtcacatcctctaaaattgatggaatagcaagactttatgccttgacatattttagtgggagccagactataaggaataaaaggaaaaactttcttcctctctctccaagaggatatgggaagcttctgtgagtgcataggatgggggctggagtcattcttagctgtttcccttcctctgtccatatactggatcacctcaacataccctggtgtggctctaagggtaaatcagggatagggccaaggagaaaacaaccaagaactctttcctgtaataagcaggatccagtttgagaaagtttagcgaatataaaagtaaaagccatttaaaaatctatattctttttttttttttgacacagagtcttgctctgttgcccaggctggagtgcaatggcatgatctcggctcaccgcaacctctgcctcccgggttcaagcgatcctcctgcctcagtctcccaagtagctgggattacaggtgtgcaccaccacgcctgactaattttgtatttttagtagagacagggtttcaccatgttagtcaggctggtctcgaactcctgacctcaggtgatccacccgcgttggcctcccaacgtgctgggattataggcgtgagccaccacgccccgcctaaaatccatattcaaagaagcaatttcagttcctttctaagctttgtcagtcaaggggctccactgacttcctaggccctgtaatttaaccagtctttaaggttttgcaggaaagtcccttcttccaagtggtttttccaaatcgcacaatggcaaagccaaacagaggaagaaacattaaaaaaaaaaaaaagaccattatttctttgttttgtttttcctgtataaaaaaggaccccaaatataaaggtagggaaagggacaagagggaacataccccttagtgtagagaaatgggaaggagaaggagaagcctcaaaaggagaggtgggaggggaatgtcattaaggcagcaaagtaatctctgtagaaagatggaggaggaccctccatagcctcagagataaaggcaaagattgccctctcagtgtccagaagggaaatggcagcttttcttccttccatggcagccactccattgctcactccggattaccttcatccttatgtagataagagtgctgcagagctcgaaaggcagagattcgcttgtgtgggttaaaagtcagcatttcctgaggggagaggcaaaggtcagaaaaccatgaagaaaacagacttctgcccacccacaacaatacctgggatgagctttcttcttttttctttttttttttttttgagacggagtctcgctctatcacccaggctggagtgcaatggtatgatctcagctcactgcaacctccgcctcctgagttgaagtgattctcctatctcagcctcccaagtagctgagattacaggcgtgtgccaccacccccggcttatttttgtacttttagtagagacgaggtttcaccatgttggccaggctggtctcgaactcctgacctcaggtgatacgcccaccttggcctcccaaagtgctgggattacaggcgtgagccaccgtgcccagccaggatgggttctcttctatatccttctctgtgggtggctatttgcagctgtaataaaaactacagcccatctaccaaccaagtttcattaaccacagtggccagggccctgcatactgctctatttctttccccagtctctatttctttccctgtgcccacagccatctccagtaccagcagcagctgtgctcccgactcctccatctcaggtaccaccgactgcactgggcggggccctctggggggaaaggctccacggggcagggatacatctcgaggccagtcatcctctggaggcagcccaatcaggctgtgggggacaggagaactctggtcaggagggtcctccagttcccatccccatgggcagagccagttgccatcctgggttcagcagaaagaggactcagaatagaaaatctttttctcccatgttggtcacttactcaaagattttgcccaactggtcggcttcagagtttccacagaagagaggcctaaggtgagaagggatataaggtagcagtcattttcaaagatatcttagttgaatggttactgcttagtggctcaaaataggaagtatagggaataaaggccaacaattccagcactttgggatgctgaggtgagaggactgcttgagcccaggagttctagatcagcctgggcaagcaagaccttgtctctttttttaaaaaaaaagaaatgccaggtgcagcggctcacgcctgtaatcctagcactttgggagtctgatgtgggtggatcatgaggtcaagagatcgagaccatcctggccaacatggtgaaaccctgtcattactaaaagtacaaaaattagctgagcatggtggcgtgcacctgtggtcccagctacttgggaggctgagtcaagagaattgcttgaatctgggaggtggaggttgcagtgagcagagatcgcactactgcactccagcctggcgacagagcaagactccatctaaaaaaaaaaaaagccagtcatggtggcgtgcacctgtagtctcagctactcaagaggctgagatgggaggattgctttagcccaggaggtagaggctacagtgagctgtaattgggccactgcactccagcctgggtgacagagtgaaaccttatctcaataaataaataaataaataaataaataaataaataaataaataaaaaataaagagaataaagggatatgaagttcctaattccagaacatttcagagctttctgctatgggcaagttagtagtacgcaagtaaaagaatggggccagatgcagtagcttatgctactttgggaggtaggggtgggaggattgcttgagtgcaagagttcaagaccagcctgggcaatatactgagaccccatctctataaaaatattaacaaactagccaagcatggaggtgcgtgcctgtagtgtcagctagttgggaagctgagatgggaggatcacttgagcccaggaggttgaagctgcagtgagctgtgatcatgccattgcaatccagcctgggcaacacagcaagccctggtctcaaaaaaaaagaatgggcaaggtatggatgtggtttatgaacaagcgatttggggaattcaaggtagtccagggtatgtgggtcccatactttcgacgaaacatctctgcaaagatac

SEQ ID NO: 1885049 - DNA, 4001 bp, Homo sapiens
ccgggttccacgggggttaattaagaaccattggcaaattcctctacgaggcatcctcatgggctctcactctccatctctctccacacagcctctctctcctgtgttcactctctctgtgttatgccgtcacccaggaacatggacacacacagaatctcctgggacacagacacaggctgacacacaaggacacacctatagccacagcacacactaacacatgcagtttcccaaatatgctgacacacacacacaaatacacacgcatcaaagagagacactcacaaggacacatcatcacacacaacagacatgcgcgtgctcaaagaagccacatgctctcatgagcaaaaacaccccagacacaccaaagacacattaacaattataacagtagcatcaagtacttagtgagcatatacaatgacccaagcaccattttaggcactttacacataatccattttttttttcagagacaggatcttgctgtattgcccaggctggactcaaactcctgggctcaagtgatcctcctgcctcagcctcctaagaggctgggactacaggcatgtgccaccatgcctgactcatgtaatccttttaataaccctataaagtagatgttaattgtacagatgaggaaactgaggcacagtcaggttaagaatacagtcagttgcccaaaggtcacaagtagagacacacatacacagtaacacattcatagagactcattccaatattcaaacagaaagagagacatagacacctgggcctgtatatgtgggtgtcaggtgaagtgaaaattatgctcgcaagttcaggttcatgggtggagagggaagtcaccctggagcagacctgttattatgtaaggaatcatgaatctcaccccttggtatgtagagatctggaaataaggcagaccaattcacataatgaacccaaggctctctgggagagccaggatggagactgctaatataggacagaagggtaggttggggtggccttgatgaaagtctcttgtcaagaaatgacactaggaccccaaagaggcacaaaccaggaggaaagagaaagatgaattgattaatcaggcctaacacaagaacctcagggttgatcaccgaagactggctcttcatagcatgtggctggggtgggaaatccccctagaatcacctggcatgctttggaaaccaatggctgagtatgaatgttaaattttatcttggtatgtggccccactgcagtcctggtgatgactgcctgttgatatgttggctggctcacactcctaaaagtacccagttttgggactgaaaaccagcaggggcatcaccatcccaagcatgcacaaagctgctatgaccggtgttcaacagcgacacctggtggcagccaccaaaactgcatgctgctgtattgcctcaaactccctctcccccatgtctttgctggtgcatctggaaatcagaatgatctttggtctgaggaagttcctggcattcttggataattggggataagggaggcctccaaaggaagatactggaactcctggtaataaagggtatatggaaacgtgggcttgaaaagtaaagaactgtagctgtatttttatcctcagctggtgtagcaggtcatagtgattatgctcaccgtatgcacagagacccacacacattcacactcccagtttcaaatggatgcacacaatcaaccacaaagtgtcacccacatgctgaaacctgcaaactcagccattcccgatctttccctctgccctccctgctcacttccccaaccccatccttaccccactgggcccctggggagagcagcaagccaggcggatggagctgttgacagaggccagctgttcccggagactttccacctcccgctgggcagcctcagctcgctggggagaaggggacagtgtgggcgagaggtgagcccactctgcacttccaccttctccctgcactgtttcaggcaggggttggggaggcagacctccgagggcctcaggtcctgccttcctagtcccggaccctgtcctggagctatgaagaccagtcacagagccctgtctgggctggggacaagaaatagcagcctctggggttactcctgagctgagaggacaggaagaaatgcccctctgaggaggttctgggttctcgtggggtgcctgggacccccagaggagtcagaacattcctgctctatgaaggcaggatgagagaggctctctgggtgggactggcaggttttcacacatttctagatacttctgtctgccacattaacttcaggcctggctagtctgaaggcaagagctgttccaactctcatgccacctggtatggaatgagtcccagacacggcatctgcaaaggtgctttcccaggccacaggttattgcagcccctgggcaagtcacttcctctccctgggtctcagtttcttttcttttcttttttttttttttgagatggagtctcactcttgtcacccaggctggagtgcagtggcacaatcgtggctcactgcaagctgcccctcctgggttcacgagattttcctgcctcagcctcccaagtagctgggattacaagtgcacaccaccacacccagctattttttgtatttttagtagaggtggggtttcaccatgttggccaggctggtcttgaactcctgacctcaggtgatccacccgcttcagcctcccaaagtgctgggattacaggagtgagccatcgtgcccagctcagtttctctttttgaaatggggagcaatgaaaacatctaacacaaagaggttttgagtggttaaaatcagaatgcagcagttcactaaactgggtctatggtcgattttttttttttttttttttttttttcgagacagggtctcgctctgtcacccaggctggagtgcagtggtgcaatcagggctcacagcaacctccaactcccgggatcaattgatcctcccatctcagcctcctgagtaactgggattacaggtgtgcactaccatgacgggttaatttttgtagttttaatagagacgggttttgccatgttggctaggctggtcttgaactcctgggttcaagtaacccacttgccttggcttcccaaagtgctgggattacaggcatgagctactgtgcccagctggtagatttctttttcttttctttttttttttttttttttaagacagagtcttgctttgttgcccaggctggagtgcagtggcacaatcttggctcactgcaacctccacctcctgggttcaagcaattctcctgcctcagcctcctgagtagctgggattacaggtgtgtgatgccaggtctgtctactttttgtatctttagtagagacggggtttttccatgttggccaggctggtctctaactcctgggcttaagcaatccacccacctcagcctcccaaaagtgctgggattacaggcatgagccaccacacccagctggtagatcttaattcttaaaaaatttctacctggaaggaagcattcaaatgttaatacatttaatcttgtggctttggagagaaatctgggctcacattctgactttgcaactttccggttatgcgatcttaggcaagaggcttcatctccccagcctcggtttccctattaataaaatggggattataaaggcaactatctcatagggttgttctgcaaatgaagtggtttggccaaatgcaatttggtagatatctttgcttggtgcctggcacatataaatgcatcaataattggttaactttgttaacatcatgagggtatattacttgagccattacttagagaattaaaagagctgtggctgtatttttgcctttggctggtaatgcaggtcatagtgattatgtttaactacataatgacctggacaatcaggatgctatgcccaatgtatgcatattgagacccata

SEQ ID NO: 1885050 - DNA, 4001 bp, Homo sapiens
attcctccctcccccagcccctggcaaccactaacatactttctatctctatggattcgcctattctagatatttataatactgtaaatggaatcacacagcatgtggccttttgtgcctgggttctttttttttttttttggagtctcactctatcgctcaggctggagcgcagtggcatgatctccactcactgcaatctccgcctcccaggttcaagcgattctcctgcctcagcctcccgagtagctgggactacaggcacctgccaccacagccagctaagttttgtgtttttagtagagataaggtttcaccatgttggccaggctggtctcaaactcttgacctcaagtgacctacccacctcggcttcccaaagtgctgggattacaggcatgagccaccgcacccagacagtctgggttctttcactcaatgttatgttcaagattaatccatgctattgcatgcatggctactgatatggcttggctttgtccccacccaaatctcatcttgaattgtagctcccacaattcccacgtgttgtgggaggtaattgaatcatggggccaggtctttcccatgctattcttgtgacagtgagtaagtctcacaagatctgatggttttataaaggggagtttccctgcacaagttctcttctcttgtctgccaccacgtgagacatgcttttcacctttcaccatgattgtgaggcctccccagccacgtggaactgtgtgagtccattaaacctctttcctttataaattacccggtctctgcaatgtctttaccagcagtgtgagaacagactcatacagctacttcattcctttctgtggctgagccacatttcattgcatggacagatcacattctgtatccattcatctacagacggacatttgggttgtgttcaccttttggctgttacaaataatgctgctgtgaagattcatatacacgtttttatgtgggagcacgtttttctttctcttggataaatacctaggagtggaattgctgggtcatatgggggcttcatgtttaactttttgaggagctcccaaattattttccacaatgagtgtgccattttccattcccatcagcaacataggagggttccgatttctccacatccttaccaatactttaaaatatatatacatatagcccagcctgggcaacatggcgagatctcatctctacaaaaaataaaaatgttttttaattgtccaggtgtggtggtacacacctgtggtcccagctactcaggaggcagaggtgggaggattgcttgagcccaggagttcaaggctgcagtgagctataatcgcaccccacagcacttcagcctgggtagaatatttttttctgtctgaaaaaataaaactaaaaataaataaataataaaaatatagccatcctagtgggggctaagtgtgaagcagaggctaagcttttaggatcagtgtcacaatcatgggtccctctgctctggtctcctgccctgaggcagctggggaggagccccaccactccgctgcctgccaagttcaggtgcagggcctttgcaccacagagaagcttgatccttcggaggtgaggtagcaggacctctcaaatcgacatcacaccctgacccaggagaaactgagcccagctccccaaattccaggatggtgaccaccagattccagtaggccctggctttgaggaatctctgttgggttgtgaggggctgctgggaggctcttaccacacagtgcccgcctggagggcctgggacaggtaattggccttgtccaaatcctttgtgaagacagctgcggccagcccgtacgtggaattgttggctctcccaacaacctcctctatggtcttgaacttcaggatctgcatcactggcccgaagatctggagtgagagagcagcgtaggagggttcggcaacacggaggcacctgccatcgagctctctcagagcagaacagatgattccagattgggggataagcccccagccatgctctaacagttccaggggaagacaacagccatcaagctcagcagaacacagagggaatggagctaacaggggccaacttcctcctgtgcgccccgggctttacatacagtatcccatttctaaacaatcctgccaggtatgttattcacacgtgacacgtagatttagtgtcaaagaatttaagtcagctgggcattgtggctcatgcctgtaatcccagcactttgggaggccaaggtgggagaactgcttgagtctaggagttcgagtccagcctggcaaacacagagagaccctgtctttactcaaaaaaaaaaaaaaaatttttggccaggcacgatggctcacacctgtaatcccagcattttgggaggctgaggcaggtggatcacctgaggtcaggagttggagacaagcctggccaacatggtgaaaccccatctctactgaaaataagaaaaattagctgggcgtggtggtgtgcgcctgtaatcccagctactagtagggtctgaggcaggagaatcgcttgaacccgggaggcagaggttgcagtgagctgagattgcaccactgcactccagcctggcgacagagtgagactccatctcaaaacgagaagagaaaaaataagccgggcgtggtggctcatgcctgtaatcccagcactttgggaggccgaggcaggcagatcacgaagtcaggagttcgagactagtctgatcaacatggtgaaaccctgtctttactaaaaatacaaaaattagccaggcgtggctaaaactggagacagagtcccgctctgttgcctaggctggagtgcagtggcgcgatctcggctcactgaaacctctgcctcccaggttcaagcgattctcctgcctcagcctccagagtagctgggatttcaagcaagcgccaccacgcagggctaattttttcttatttttaatacagacagggttttgccatgttggccaggctggtctcgaactcatgacctcaggtgatccacccacttcggcctcccaaagtgttgggattacaggcgtgagcaactgcacccagcctgtactaaaaaatttttttaaaattagccaggcatggtggtgagcacctgtagtcccagctactcagaaggctgaggtgggaggatcatttgagcccaagagttcaaggctataaggagccatgattatgccactgcactccagcctgggcaacagagcaagaatctgactgaaagaaaaaaggtcatgggaaggagcagacaatgtcattcctagactcctggctctgagggccaggacaccaaggcctgcaggccatgctgaggaatgcagacgatctcccagacagagggtacaagctgaagaggagggacaagatcagatacatactatgaatagcgtgttatgggcactggttctgggtataacttgagatctggccccaagccagcagatgggtgacagcatcaggatgccaggctgaactgtttacctcacctcccgccaagaatgtttccagagcactggccccaagtgctcacctcctccttggcgatggtcatgccatcctgcacatctccaaacacagtgggctggatgaagtaaccacggtcagcagcaatgcccccaccacacagcagcttcgccccctcttgcttccccgtgttgatgtagccgaggatcttcttaaactgagtttcatccacctgtgggagaaggaacccagagttatggagacatcggattcagacctctcctaggcttcaggcttagaattatgcaggcaacaagacaactgggaaatggaccaaggtcataagaaagcaagatcagaagaggaaacacacagggccaatagcagaaaacacaaaaaaggcccaacttcctcagcctaccggagaaaaggacatcaaatcaatctttacttttcaactataagattaccaaaaa

SEQ ID NO: 1885051 - DNA, 4001 bp, Homo sapiens
aaggctaagtgagccccgctcaggtcccacacaaccccagcagtggtcccgatggacggtctgcatctctctaccagccttctccctctactcagagggccagagagcagctccctgcccctcccaggacatagcttgggggaggattcgcagcgtggtcggccaggctcctacctggatctcctcctggtacatcttcaggctcaggtcgctcttggtccttgatcgccgtcccagaaacaccatggaatgttgctaaggaagagcagaggctgcagggctcggctgcagatattcaggtcccacccctggtgccacagttggcgtctcccacttctctggcttttgcaactgtgtcactcaaaatgttaccaatatctgagggaagggattatgccacccacactgaaacctgcctccctccttcggaccagggcctgggctcctcacctggtatctctccatctgggagagggtctccagcagcctggtgacatccgaggaggccccccgtgcctcccggtagagctccaggacggcaaccagctcttctttggagatttccttctcaagggtgatgccaccatcaactgcagggatggaaggcaggtgtgggaagggcccggggctgcagctgccaacctggctgggtctcgtacctccttgcccccttccgcagggggtcttaaggttctctctctaaaccgacactgcattggtgtcctgctctcctcgttggccctcctttcccttcccctccctctgctgtgatgtcaggagcgcaggtctagctggcagctgttacagggccagagggtttcaggaaggggcctctaagcacagagaaaatggtcagatggtctgatagcacagagatctgaggatgagaggtaacaagtgtgggcacagggttttctgtttcttttaagagacagggtctcactccgctgcccaggctggagtgcagtggtgtgatcatggctcactgcagtcttgacctcctgggctcaagagatcaagtgcagacagttttgatggagaatttgggaagaagggagggtcagcacacagaaagctgtgcaatctgggaagagtgaggcagtcactaaagccagcaccatccagttgcagcaggaatacgattcgcctgtgccataagcaatatttacaccatttaaatcaagaaccgtagtgtgaacctattattgagaaacgtggagatgactaacagaagaaatagccaagaaggagaagcctctggaggacgggagggaaaggcagggcaggggctgctgctgccacataagcctttctctacttcttgatttttctccaactatgacatgctctgtcttattttaaagttagattacgttttctgacattaaatatttgaaaatcaatgcaaatacaagatctagaaagacaagccagatagataagctggacagccagacagcagaaaaatgacagcctgatggctggctggacagccacccagacagacagacagagctgggtaggcggcagatatcaaatgcccaaggcatcatccctgcacagaccttccgagtcctggttcttgcggctgtagttcattcggaagacgaaggcctcgaggataaaggcgacaatgatcgtcatcaccacctggccagggatagggagggaggggcagaggcaggggaggagggtgggtaggtgtccgtggctgcgcagcccacgcccaacagagtccggccagatgggacccagccccactccctgacgctgcaggctgaagagcaggggcagctggtgatgtggaagacgaaggacaaagagcgttctgtggtccgggacctaccatggtcacaatgtaaaaggtcatgaagtagaggcggctccagtgggaggtctgagaggtgacgccttcctggagaccaagggaagcagccagtgagggggtgcccatgcagggcaggtccccgtctacacaggctgctccatggccccggctcttcgcagaccccaccgtgatttgtggctggttgtgagagatggaggagaggaagcttgcccctctgggcctaacactaattcctgactgctgaaggagccctggccactcccctggacgactggatccagaaccagggcagcctttatcccagtagggctgggagtcgggaaagtttaaggaatggaataaagagatcagcaatgctcgccactttgtcactagagggaaaagtcatctctacagtgggcgagacaggacagagacccagagtctaagtggcatctcctggctgctggggacatgcagggagatgggagtaacagccgagtccagccaacactgggaggggtggctcctggggcccagccatcctgtggcctccccactgaacaccaacacagcatgactcaagacccccagccctgcaagctacgggaagaattatatactctgggttgggggagacccagggccgaccccagggctggcgggaagatacccccagagctgcccgagctcttaccatgatgatgtaccagttgttgacaactgtgagctcaaacagggtcactgccgagggaagagagaaagaagcatcctgatgagaccccacttcaaagtcaatttcaagtggcctcttgccacctatcctgggtgccatgtgctaagatgagagggtcaccatatgaccgcttgggttgtgagctccaggaaagaccaggcaaggcactcctagggcgctggctccacaggacatcatggcctgcccccaagagaacacaccctctgcctcagcagcctgtgccacatcagactatctggatcttactgggtgcagatctggggtgtcatgggggcacaccctttttctggagaggcggtttggctgtgttcgcctcttcatgggagtgggcagagggctgtgtgcagtctgagccagggggcagtgcagctgcagcagcagtggtgtggctgggtcccattctgcaagtggcactgtgatgaggggaccccgcccagctaaggcttgcaactcttgtcctccccggtactgagaaaatatcaggaaagagtggaatcaggcaactgagtgagctccaggatccagcctggactgtactgccaaagctgggcagaccaagtcctccacctgggccagggaggcttccagaaagtgtggcccagacacttgctacaccacctctgggacccgtggtgacaagggtgacaagggtggggtccccagggaatgtgccccctgtgatttttcccactcaccaaagctgttgaggatgttgtcaaaattattgagataatagtagccttcctccaccacggtcctgttgcccacggtgtggttgcgccagcggtaggcatctgccactgtactcgtgctggccggagcacaagggagaaaggagggagggtcacaaggcgatcagtcacctccagagaggacagaagtctgaaacaaaccgagttctggccaaggatccttctgttctgcccgcagcctggtttcctgcctaaccctctccacctcatgcctgggtccctgctgaaggaatgcccttggctattcctgcctgctgggcttggcgggatcccctggccagcctgacccacctctgtcacctggaagttgtctgctgcaggcagggccttctctctcaccgttgcttgcaggggagggaggagaggcaagggcctcctctgcacctgccccatctaggatctgctcttgaggctggacactaggccacagtcccagggaaggaattccctactggggcttccccaatacttggcctgagcaagtatttgaaaaggttggccctgttttgaggagctcttatttgccactttccttccaatcttttatggctgttctgttaatatccatgctaatgtttataaaagtctagtgcttgggccaccagggagcctcctcccacacgcatgcatcagacacaagagtgaggtctggagcttgcactaa

SEQ ID NO: 1885052 - DNA, 4001 bp, Homo sapiens
gtacaaacgcgatttttttttcccaacagccgaatcccaaactcggaaaacaaaagatcaccctcagaaaagccgacacccaagtccccgcctccgcaggctgcgggtggagaggcggcgccgccccaggatcggcgggagctgtgcttgagttctaggaactgatggagagacggacagcggtgcgctccgctcggagaggcgtctgcggccccggggctaccgcgcctccacctccgggggatttcgggacggggagtagtcgcgcgcctcgcccggcccgaggccccccagcggagtagtccggctccgcggcggcccggggggcgtggggggcccggccgccgtcaccagggggggcggtgcgccgagggcggcggcggcgggcggggtccgcgccaggagcccattgtgcagcgcggcgggcgagaggcgcgggaagtgcagggctcccagcgagggcagcagcgcgccgtccaaggcgggggcggcgggcggcaggtgcggggcccgcgcgcgctccagctccccgcgcaggcgctcggggctgtagccgtggggctcgcggtcgcggtaggggcgctccgggggctccaagagggcggcggagcccggggcgggggcggcagcggggaaggcgcgacgtggcagctccaggccgcggaaaggctcccacgcgaagcccggcgcgcccaggcgctcgcggcccaggccgagctgcaggggcgcggggtgcaggccgcccgccgggggctcggaggcctcgtcctccccgcgctcctccttgaccttcacgtctccaggggccgccttgctgtggggcggggatgcgcgcgcgggcatcttggcggcctcctccttggccggggagcggctctccttgacccgaggttcggcctcgcgctccgcgggggccccggaccggcccagctcgctctgggcccggagcaggaggccgctgacggggtggccagcgggggtggcgggcgaggcccggctcagcaggcgcgtcttctccaggaggtccctgggggcggcagggcggacccgtcactcccgagacctccgtcctgccgcgcggcgcagccccgggatgttcccgttgcttgtcggggcctccagtttctgggtggccggtgacccctcagcacccacagctcccgcacccccacaggctcccaaaacctacgcgtcctctccccgctgggcggcctggaaaccttggccgggagacggaagcgggatgagccgcctgcagcgacttcggctccccacgggcccctccctgttaggacaggggggcctcccggcagccgcacccccgaactcctccctcaaactccgtgggtcagggcgcggccacctggaggtctcccggatggcaggtgtgggtgcctgtggtggggtcttcaccctcctcatccttcctagccccagggcccaggcttcactccccaccgcagggaggagtcgccggggagcagagctttggcccccgtaccccggggctcagcagagctggacagactgtgagtgcgcagcagtggggcgaggagggtgagagggaatgggggagggggaacggggaaggggaacagggggagggggaacggtgagggagaggaaacggggagaagagggaacgggggagggggaaccggggatgacgggaggggggaaagaacggggtaggggtgtgtggtggggatacggaacaagagggccactcaccgttcctgctcctccttgccattgtccggctctcggtcatggttggtcagggctgacacccgctccgcgtccacggacttgggccacgggggcggagccgggaaggagggcggtgcccggtgcagtcggttccaggcctcatgggggctgggcaggccgtgcacggaggagccctccttgggggcaaagatgctgccaccgggagctgggggcagaggccggggagcatgaggttgggtctgtctgctccccagccactccccaggagaacccggtaggggttttagaagggtcccaggctgacactgagaagggggtgccccaaggaggcccagcccagagaggagggaggtcagccaggcatcggggttcctgcagaggacacaggcatgggggaggggcgcgggcatcgggggaggggggcacaggctgggtcactcacccagtgcatggctgcccaggcccccaaaggcgtggctgctcaggctgcccaggcccccaaaggtgctcggtctgctgaaagggtctgtgggggcaaccgcgggacccagaggtctgtgaggcgtgggctgcggctcccacctggcccagtgggggctgctgtagaggctttgggcctggtgggtactgcctgcatgacccaaggggctccctggggctcggggccaccttcccgcccacctaattcccccgccacaaggctgctgaggaaccagccaggctgcgtgggctgaattcagagacacccacctgtcagggggccagtgggcaggaagctgccaggatgggctgagggtccaaatgggttggaggcaggatgggcggcacctggggggggcagccaggtttgacagaagccaggagagagcaccagggcctcccatctgcagctctgttcacagggagcaccccaatttcctctgtgaaccttcacctcccattctctcgcatgccctgaggggtgaagcgtgtccagtcagagtaagaggtggaatctaccccacaattcggaggaggtttgacttggagccgcagtggcagccatcctgggaccccaaggggggcagggagggaggtgctgagtgcgatgcaaccctcggagcaaaggggctgcaacttgggcagagacaaagtccaagtaacatgcaccttgatcggaccactcctgaagcctttatctcagagctttcacctgggagctgatagatggtcctcacttcttaatgtggtgctgggcctcaggcctggatggacacggttctgtcttggaggctgcacatggcagccccttgtggcattcctgggcacaggcccagcccacagcaccacgtcaacatcagccctggccccccaacaacccttggagagcaaccgtgtggggcctgggcccgggccctgggaggggctgctgcaggggattcagtgctgttggtcaggggccgtcctccacatgggtccagagagcaggtttctggtaaagaccagcagggcgtcatctttaggttactccgactccctcccagccctaatcttagggacctcaaagatggggtgctcatgcctcccatgtaggacgcggcaagttgtattcagagcttctggtctccactgagctgtggcatgaaagctgatgccactcttctaaactagagaggaagacagcctgccccatgctacgaaaacacagcttgtcaaagcgtgtgcaggaggagatggagagtacactgcctcaaatgcccgcactgggagaggctgaggaattaatattctcaaccaccagatcaagctagacagggccagaaaagtgagcgacacacagggaaacacacagagaaggcagcgaggtcagagctgctcctttaaaaatactggtgaaattggccgggcgcagtggctcacgcctgtaatcccagcactttgggaggccgaggcaggaggatcatctgaggtcaggagtttgagaccagcctggccaacatggtgaaaccatgtctctactaaaaatacaaaaattagccaggtgtagtggcgcctgcctgtagtcccagccacttgggaggctgaggcaggagaatcgcttgaacccgggaggtggaggtcgcagtgagccaagatcgcaccactgcactccagcctggcgacacagcaagacttcgtctcaaaataaataaattaaaataaaatactggtgaaatggacaaacttctggtgagattaatgaaggaaaaaagacgacacagccaagcaacattaagaattgccagggcctg

SEQ ID NO: 1885053 - DNA, 4001 bp, Homo sapiens
gctgggtggggctggccagaggggcagaaggacccccctggagtctccatctggacttgagtgtctgggtcactaaagcagaccccaaattgagcagagcacctcagtccactcttttgaaaatgggtgtggccctttcccttgtcctacgtcactgcagggaggaagggccatttctgagcattttgtgctccttttttgtggggtaggcttgaatcatgtgctttcctctcaaccagagtctcggaggaggcccccacctgagcattgtcccccatctctgggtgtcttctcaccccctgcggctgggatgcacccagctaggctctgtgaactaaggtcgggatgaacccttaagtctcctgctcccgaggaggcctcagatgaaaactgtcagaccagggcccaaagagacagacggcagatagggaggtatgggaggggcaggggaaccactgtgggcttttcctcagaaaaaccaagaccgggagcaagttctaaagcaggaagatgaacacataaagctccctgtgtgtctcacgtgtttgggcaattggcccagccacctctatgtggagggaggcctgctggggctgcctctggagcaactccagctcgaggctggagggcagggctggccacaggcttgtctgtggaggcgctctgctgaaagcacgagcgctctgtgtggccgaggtcattgtacccccggcttcctgctgggtggttctgtgatggggaaccagctggggccttatggcattagaatctggtggccatgagggacaatgtccaagaagatcaaattagacacaaactgtctgggaactaaactatcctacaaatagaccacaaacaggcagcaaaagaaccaacccatcacgaaacgtacaaagacaaaaggttaagtcttccaggaggccctggaatgtggacgaaagtttggaaaagcaaaatgttgccaactcctcacgcagggccctggagggacgggccgcagtggtggcttcccaagccagcagagtgggtgcctcagtgacagcctaattctggggctccctcccatcagccactgagggggtcttcacggtagtgaatggcacaacgaagtttctccagcatgatttccagagaggagtactggggaagcttgatcatgaacatgcaggtctccacgcggatgtagcgagagtctggggaacctacaagaaaccgagccagcatcagagggttgggcccacatctgtgaggctcccagggaagctgggctggcctctgcttccaggtttgcctccttgggtagccccaagccaatcctggggcccagcaggagggggatgagggcctgggaacctgcgagatgttcttggagggaaaaggggagagagctgctggacagcgcatgtgccaaactgctgatgggtttgtctgcccagcaaattgtttctttttttttttttttaaccatttttctgcatttaaaagttagaagatttgaagcattctggattttcagcttcttttaagatatgagaaagtatctaacagcaggcctgtatggctggttcctgccgggccctaatcctcaatgatgtctgagttttggcacgtggggctcctgttcattgttctcccttcacatggggcctggcagccccagttccaaacagagaaaggctagtgtgtccctacttgggacatggccaggggagggcggtacctgctgtgccatctgggggggcgatcttcatggggtacgggggcacatgggcagtgtcgggacccccatctttgcaggggcaggtgaacgggatgcgctcctggttgcaggcaaacttgatgaacttgcacagctcctcctgggtgaacatctccagggccccccagaagaactcgatgtgctggtccgtctccatcagccccacttggtacatggtgtgggcctggggaggagaggtccaggtgtcaggagccctggagccccacctacccagtgcctccccagccctggggtctgcaggccaggcccaatcctggggcagggtgcaacgtgtgggctgtgagcacagggagatgacaatgatgacaatgatacaggtctgtggcaaggacagagctgagacaggccactgccgatgcctgctgctggagttgagggtgacagggaggcacgcctggggctcaccacctccccgcccagcctggccctgggatgtctaccttgaggaactcgaggttgatgtaggggaggccgcaggtgcgcagctccatctccagtgggctgagcatggtcagcagctgcagggggatgatggagcccaggccggcccgcacggccgtcacgcactccacattctgcagctcccgcagccgcaggctccggatggctgccgcgtagatgtccttgttctcccacctgcccgggtgaggagcacaggtgagggagaacaccgccgaagaggctgggtctgggggccacacccactcagctggaggtcccggatcctctcttgggagaggcctggggcccagccgccctggtcatcccagtcctttcctgcctctggtgccgccgcctcagagctgctgttttcttagtaaaccccttctgctgaggaccctctttcttggcacccaccatcctgcctcatctccctctcctggtgaaatccacctgtcacctgacctaggtcctcgtgtcattgcccaggaacagatgctgctgtcataccctggctggctggccgggccagcccctgccagcccctgacacgcgcacacactcacgccacaaggatgtgccggccccggctgcacagctccacctcctcgcccgtcatggtcaggtaggtgaacctgcagcagggcttgttggggctgtcagggctctccgtggccaggtgctgggaggcgatctcagcgcacagggcctccagctcggtctcatcattgatctggagggtggaggcagagcgaggctcattatgaggccatgggaggtggaaccctgatccccaggtggctgggtaaaccccaagcgcagctggtggggtctaccctcggccgtgtagatgagcatgtgacacagctttcgccaatcagaacctgccatcagttcagggccgggcgtgtgacccaggccaggctaaagagacccacattccaggcctcttcccacgtctgtttggaggcagcgatcctctctcactggcatggaccgactatgatgggaaaccctttaccactggaggccacctctgcccgtgcgctgggagagactgcttgaggctaattatgcttgcttttttttttttttgagacggagttttgctcttgttgcccaggctggagtgcaatggcgcaatcttggctcgctgcaacccctcgcctcctgggtgcaagcaattatcctgcctcagcctcccgagtagctgggattacaggcgcccaccaccatgcctggtcaatttttgtatttttagtagagactgggtttcactatgttggccaggctggtctctaactcctgacctcaggtgatctacctgcctcagccttccaaagcgctgggattacaggtgtgagccactgcacccagaccgctttttcttttttttttttttgagacagattctcgctctgtcagctggagtgcagtggcgcaatctcagctcactgcaacctctgcctcctgggttcaagcaattctctgcctcaggctcccgagtagctgggattacaggcacccgccaccatgcctggctaatttttgtatttttagtagagacggggtttcaccaccttggccaggctggtcttgaactcctgacctcgtgatctacccgcctcagcctcccaaagtgctgggattacagctgagccaccgcgcctgtcctctttctttttttttttttaaagcaatctggatcagaggcctgagaccaataccagatgatactgtttgaacacctggatttggccctgcctgaagtcaaacccat

SEQ ID NO: 1885054 - DNA, 4001 bp, Homo sapiens
tgggaggtgggcggcctccccgccaagcttcacggggcctgcaggcagagcagagctggtcagggggtgtctgctggccccagggctgctgggcccaaatcccagccccatgcctttgagcctcatgatccagccaattccttggcctttaggcacctctgttttcctatctgcatgatggggccttgagggtcctcactgtgcagggcttcgggggcctgggtactgggtggggcgtacctggctgcttgggccgcagctccccctccaggtggctcttgtcgagctcttccaggtgcttggggagccccttgtcgtgggtcagactgggtgagctcacagggctgacgggctccaccccttcggggctgtagctgctgccgtggtaacctagggcaggcggggggtgcagagtcaggcaccgggcccagggtttcggagcccgaggggcagggctgccctcccagctggctgggaccccgggggggtcaaggggaacccaagctaggggtagggtttgggctcccaaagacagtaaggcagagaggggtgttggggagagacagggaggccaagggagaggtggagagagatgcagagcccgggacagagacagacagagagggagacacagagagagattaggcaagaagggacagagatgggttcaggtggtggaggccgggcgaggccagcgtgagatgggggcagcatgggtctctggggaaggagtgtgtggggcggagtgagaagtgggggtgtggctgggagtgaccctgggtccccggggccccgcctgggctatagcctcggccatcccagtccaacagagaggagccatgaactagggccaaggcaggggtccagaggcagagggctcccctttttctggggtacaggggctggggacagggcaagatgcaagagccagacccagctcctcctcgacagcgcaggtccctgccccgcctcagcttctccttgcaccgcctgcctccacttcccccagtccgacagcatccaggcagccggcaggtgggggcgtaggcccgagccctcccgcagccccatccctgctccctggacacaggcgcaaagagggagatgggggcgcagtcgaagtcagaatcacagatccattcattaaagaaaaaaaagcaaaaatccaaaaaaaaaaaaccatggtaaaatgatgtgcaaatgatgagcgcccccaaaccagaggggcaggcgcggccggagtagtcgtcagcgcgtgcaaaccggcgaggacggatgggcttcaaaacaaaataccaaaaccaacaacaaaaaaaacgggggccaaagtaaaaagcagagatctgaaaatatctttggaccacgagacggggtgggtgcgggccggaagtcttaccatcgcgaggggagccgttggccagcgcacctccttctcgcgcccctttatcgtgagcaatttgacgcatgataatcgcgtctatgaaggtggccgctgtcagggtggtcttacccagagaacggagttccagttcctggatggaaaagggtttactttgagtcttttcccggtgcgggtccgaggccgaggcaggtggcgccggcgggtccgggctggcgtggtgaggtgcgaggttcttcgcaggggtgcgggcgatggtggcgtggccagagacaggaggcactaggggccggggctccgagcccttgctgggggaggaggcgggctccagcccggagcgggctgggggcttggcgaggaaggcatggccggtgtctgctcggggccgctctggccgggcgacccggggggcctccttgggcagcaagacgggctccatgagggtagggtagaccccatcgagggtgccgcccagtgggcagtgggtggcaggtgggaatgtggcagccgggcgaacgggtgaggaggtggaggtggacctgggggaggagagaaggcggtcaggcagtcatgggagctgccctcttcctccaccaccctcgatgagtccccattgccctgggataaatccacatcccctgctgctcccagagtgaaactgccctcctgactgtaacctgccagactctgtgcgtcatggtttgacccatcccactcattcgttcattcattccttgcatcattccaaaacttctgattaagcagctactaggtgccaggcactgttctagacactgtgaatacagcggtcataaaacggatgcaagcatcttaccatctaattcagaaaacagactacgatcacattaacagatatcccaagctctacagagcctggtaactgtgtggaggtagtcaatgaggtaccaggagagaacggcaaggaagctgaggcagggctaggaggtcttcagggagggggcacatgagggagctgggcctgctcaggatacccgaagagctaaaaaagccacgtgaggagtgagagagcaaggggaaggatgccagggggcggccagggtgggcgttgagaacagagaaagctgctgttcccagctctgtgagtgagaagctggggcacagctgcccctgcacagggctggggctggaacaggagccggctgctccacccacgtggccttcccggagccctgcgtttccatgggggcacccccatctctcgctaactctacctcccagagcctcattcatgagcgggcagtgggcaggcactcgttttctccattatatttttgaatcggctgtcacgggcatatcccacagagcctgtgtgcggaaccctgctccccacagccagggattagtgcttcatgcacctgctgggtctgagtcaggggtgacaaagtcgccactgcttttgggaaacgatgccatttttcataattgaaataatgattaggggaggtatgacttcaggcatccaagcggcaagttggggcacaagtacttttttgaatgaaaattcattttggaggagtaagttgcctctaaataggtcctggaggctgagtgcggtggcgcacgcctgtaatcccggcactttgggaggctgaggcaggcagatcacttgaggtcagaagtttgagaccagcctggccaacgtggtgaaaccgcatttctactaaaaatataaaaattagccgggtgtggttgcacgtgcctgtaactgcagctacttgggaggctgaggcaggagaatcacttgaacccaggaggtggaggttgcagtaagcagagatcgtaccactgcactccagcctgggcgacagagtacaactccatcaaaaaaaaaaaaaaaaaaaggttccgggcagggaagggtgttgaggtgtgaccccacccccctggtgaagcagctctgcccacagtctctggagtgtgtgtcaccagagggcactcaggggcctctcccatctcagagaaacttgggactttgtccaggcaagagggacacctcttttccttgctggccttgctaaatgtgggggaccgggaaagtctttcctcacagtccccattcagtctctccctctccacagattctattctcaaaccaaacaacctccccatctactcatcccaccgcccaactcatcgtccatccactggggcctccatccactcatccccacaattactcatccaaccatccattccatcatccacctaaccctaccacccacccatccacccacccacccagctaacccagccatctatactctcacccacccacctacctccctaaccctaccacccacccatccacccacccagctaagccagcgtctatactctcacccacccacctacctacctaactcagccacccacccatccatccatccacatggctaatctggccatctatccttcctcccacctacctacctacttaacccaaccacccacccacccatccatccatccacccagttaacccagccatctatcctcttacccacccatctacctacctaacccgatctacctaccacccacccacccacccacccagcta

SEQ ID NO: 1885055 - DNA, 4001 bp, Homo sapiens
tttacaatggatccatggtatttattaagttcatattcataaagaagttaattaaaacaaaaggagagccacccacggagataagagtaggtcacaaaccaatgaatatgactgatccagttacaagaaaataaagctgattgatgtaaatgaaaatactaattggatagtgcaggtgacagcagcgaggaagctgtgaaggtgtctgctcacgcagcagttgggaaggttggcctgaggctttcaaaacccagaacggtttaggatctcagtcaccacctctgggaaccaccatcatcactgttcttttaatgaggggatctccagtccccgccctacctttcggcctcccccgcgtgttgaggggtgggggctggacagtgactctggggctgggatgtgacttcgtgctgggcccccccaggtgaagctgttcatgcaggacctctctgccatgctggccggcctgggtcaggctgagcctgcagcccctgcctcctagccctgacacaggtgagcagcgggagagggaacccctgagagaccctgagataggagggcccacatttccaatggggtgtggactgagtggctcttcctgaatccgtttcctcattgggaagatgggagggctgtgcctgttcagagtgctgtgggcctgccatgaggggcacatagcaagcactccataaatgcaggccctgatgaggaggtgatgggaaggtcaaggggctatgtgtggggcaactgcctctaaaatgagatcagaccaggccctccctgccagggtggttggggcatgaaaaaaaactctttgtcaggtctcagaacagggtccatgctagatgagagatcaccaaggccccctccactatggactctgccaggtgaggggcccagcctgagaatccagctgctggggctgcccttgaccttctcagaacctcaaacagggggtgggtggcaagaagacagaggacaggccaggttctgacctccaggtgtggaggggccgcgttaacctcttcatagccagaggggagcagctgtgtccttgccccctgggctgggcatcctgttcccctcccccagcccactcccagctgcaaccatgtccagtgggaggaagggggaccaactcccgcctctggcacctggtttgtgctctgagcttcactttcctcatcgctaaatggacaaggcagcagaactcaccctcaggagacccgcaactcctctgccacgttagctgggattttagtacctgggtctctccattccagttccccaagtagaccgcactcctggccaccagcagtgctcaataaagatttattacattaaaaattccattgccaaaccctgaggcactcagggctctgaccggtgcagccatgacctctgaacccagaacacatggaagcagcagcagctgagttgccaactcaagtcttggcctgcctggctttgctggcgaactcctgcacacccttcaaggccctgttcaaatgtctctgtcttaggctgacgcagctgctgcccttctgtggccatacagtgctccttttcacagatgatggctcctgcagggagtgcccccagtgcccagcacagggccaggcacacagtggtgcacgggaacgtctgctgatgcccaccctaaggccaatcaaggagccacggggctgggtcctggtcctcacatcctcttccgcatcttgcccttcttggagcgggcaccccggccgaaggcgccctgctgcagctcctggacgcggcggcggttgcgggcagagagctgcttgaggccaccacgctgcaggaagtgcagcttctgggcccggcgccgctgcttcaggatctgctgcttggtcttgagttccgggcggactcggcctgcaggggtgcctggggcgtggggccgggatgcacctgctgggacagggattcagggagctcagctgttgggatcactcccaagatcccctcctcccagaagcttgcagactcctcccctgcccctactcctgttctgtgcttattgctgtggcccagtgtctgtacacagtaggtggctaataaagttttaggcagcctcatggagtggtcaataacacggggccagaaccgctggggttcaaatcccagctgtgacctcttggaccgtgggcaagaagttaacggctctgtgcctcagtttccccatctatgaattataaatcacagcacctccctcatgggtgaagagtaaatgcatttccatggtgtaaagtggtcagaatttcaaggcctgtcccatagtgggagccttttgggcatgactgttactattaaaaattctccaaccaaggagtgtatgtctccacagcacacctacggcacgccaggctctgaggccccccatagtaaccgatacagacctcagcctctgtctccatggacaccatgctctaggcttgttagatgaaaaaagagtgtagatgaaccttcctttaggtgggagaggaatcaaagaaggccagagagggagagggacttatctgagatcacacagcaaagcagcagcagcagcagaggtcagcgaccctgccccagccccacaggtgggcatcaggtagtccattcttctagttctccgggaggcaagcaccaccctccctggctcccactaagccctgtgtcctcctcctcctcttccccattcataacagcagcctccccagggctcctagagggatgaccattaaggtggtcccagctgtctccaatggagccagggtgcctcgcaggacctatcacctccaatgaggacagcaaaggaagaacagctgctttttcccaaagcccacaggtcgcccccgtctccccagcccctgcacgcccactgcacggcaatgctcgcagcagaagctgctgtttcacctaggtaaaaacaggctgagaagtgaggtgtgggtggtccccacccagccatgctgacaaggagacactcccacagatgggagagctggagagggaggagccacagagaacaggcccaggcaaatgcacgcaggctcacagagacacccaggggaggcagtgaccagccccaggaggtggagggacacaagcaggggctaaggccatctgagagagacccaagacatggtcccaaactcccctctccccagggaagactccaggtgggagccttgggcagctgggtgacccaggttcagtcatagccctcataaggcacctgtttcctggcctgtaaaatgggtattcgcagtcaccttgcctcccaggtcatgtgtggccttccaggacagagcctgcctgcacccagcaagcgggagcccctccctgataacagcccttaagcacaggctctggcagacagagccggcttcaaatccaccttagcttgttactggctgagggacccaggccagatcaaagaggtccaagtcctcagatgaccaaatgtaccacttgccaacccacatttcaaggaagtatcttcctcaacatcccctgtgatcgcctcctcccagaaccaaagctgcttctgactgcgtctttggtgacatgaacttccccacagcattgctaaaaagaacgtcactcctaaggatgccacagggaatcaattcatgctcactgtcaggtcgaaccacatgcaaatgccatttttgcaggtgaaaatggcctgcatttgcacaaggttccacctcccgggttctctaggattttacacaatcggcttaattaggtgaacagggcatctaccagaagttatccctgtagcttcatctgtgaagtggaagggggtcggggacaaggcacctgaggggcatggcacttcccagcgcctgtcaggcggtgctcgtgaccatcagaggccgggacagtaggaagggggaaactgtgggtgtgggggttgggtgggggggatcatggagggacccagggttttggcagcataccccaacacacccagctctggggctctgcag

SEQ ID NO: 1885056 - DNA, 4001 bp, Homo sapiens
cggagggtgggggccgggagatgacacggggcgggctgcgcaggctgggccccagctggtgccgcagctcccggggggtgccgttgagccccttgctgaagcggtggggacgctcgcagatgcccgggggccgcttgggctcctcgccctcgctctcaggctccgacttgatgggctgctggttctcgttggccaggctgttctccgtcctctggatctcgtggttgagctccttgctcagctccctgctcagctccttgttgggaagccgccgcttccggcgcatcttcaccttcttcttctcctccgggccctcggccccttcggtgctgggtcccgcggtgggggagctggagcgggagtggtcgctctccctggtcttggggggcgcctcgggcagttcgtcctcgggttcctgcttgaagcgccggaggggcttgttggccagcgccatgcggtcctcggcgttcttccaggaccgccgctgagggcgagagcggagacgcgtcagcctctggggctcagggctgcgcccgcccaaggcctcccgcccccctgccacgggactgtggcccagggagctgcggtgcagctctaaccgctcaggcctggggcacaggagggaggggaagatggtacctttttcctgaaaagcttatcttctttgccaggtttgagctgtcacgaaaaagaaaggacgcagagcttgctccccgggctcgtgggatttggtctcctcgacaccccaccccaccacgagtccacagtctccagaggaggggctggagggaggccttccccacaaatgccatctccacgtctgaccgacagacgggcgagccctgcctgcagctttcaaggaagaagctggaagtaggagtacagttgaactgttcccacccaactgacctcccaccccacagacctggagatgtgcagccgcccattcaaatcatcctcggctctgggagccagttctggagcacagccctgtgggaatccccggcccagcaggaatggctagagctgggagagactcctggcgccaccttgtggctggtgacagcacggcccgtgggtggagcagggccaccaggctcctcagaggttccctggactcacagcttccatcccaaccaacagaggctctaggcacagacagcttcccaggccccaagccagaaccacgagccagagatctggggccgagacctgggaagcctcaggagaggcagcagtggggtggaggaccagcggggtggggtgggggacagcccaggactcgccagtccccggggcctcaggagggcgtgcgtcgtgggagcacctgctgctggaagtaagtgagactggatctccaccaggggctgaggctgctgcctagagggggcctcggcgagaggtgagaggaggaaccgggggacgtttgaagcgatgaggcctaaaggggggtggagtgggaagaggagtgactcgctggttttcccctcctttctttggggcagggctctcaggacttaggtgacctgctcagggcagcaagaggccgggattatcccaagctctacctgctgcccaccccctgccccatccctccaacccagcacccgggaccagccagaccaacccctttgcctcccagcccctcctggtccgtacccgcttgcgtccactcagctcctggggcttctcgtatttccgcttcttcctcaggtgcacgtcgtcagactttctgcgcagaaggccgtccggcggcaccttcttcgagtgctcatccgacctgcgccggggcgcctcctcacactcactcctccgcttggcaggttcctgcccttccttgttgtcccggttcatcttctgctccttgagcagggagccgggcaggttggaggcgtacttaaagccagggccacgcttttgcttgtaggccaaaaagagagaatgaacagaccaactgtatacctttggacttgcccttcctcctccccaggccgacggcaacccacctgcctgaaactcctgggacaggctggtcccggccaggcccaggcccgcccctctcccgactgaccctgggacttggagcccggcactcactttcccggtcttgccggcgtggttacacttcggacactcccagcagtttggaagctcgtcgttgaccacaccctctgactccttaatctgcggggaacaccaggactcagaagagggacgggcggagaagatggcccacgggcacaaggctctgtgacgccacgtcttccagaagcagcagcaccccctccccaacgtcacatctatcccgtttccaggcaaaagaaaacacagctgcagaggctggcagagacgggcagctgtggatccaggccagggttcagaggctgagcccctttgcttctctgggaccctgggcaagacactccgtctctgtgggctggtgccctcggccataaaagttagtgtgcccatctcactgggggggtatgacccaggtaaagccatgagctcagcgcctggcatgcagaaaggactctgcagaggactctactgggtgctgggggaaggagtgtggtgtggggccttgttctcccagaagcctggagccacctggaggcgcttcctctggcccagctacaaacaagcagcctgtgtttgccatctgctgaggctctggaaaccctctctggttctgacatcctgggaggtgggggtgtgtttattcctttgatgacactgggtctctgaggtactccaggccctccttgccccgggcttatcccttgacacacaggatcacccagactcaggggtcctccaggaattcactgcacgacctgcatcccaccatctcaccagcatctccagcaaccctacctgccccagagcgtcagcaccacctgtccccactgggccactcaccttaaggcatccagggtggatgatttcattgcagatggagcactccatgagcatgaggttaaacttgccttcctcctcttccaccgtgtcttccttccccgcctcgccacacacaaggcacacggcggtgtggggcagcactggctgaggagccagggagaacaagacaagtcatcaggggtggggagcacggacccccaggggggccagttcaagggcaatgagctgctccccttgggcctgccaggagacccccggaaagtggcccaggcacattcgctcactcattcattgaaatacgtatcaggctactacctccacatgccagatactactcttaattgctggggatacagcaaggaacaagacagctcaaaatctctgccatccagagcttacattttagtggagggaggcagacaaaatggacagagcatgttagagacagagacatggggaaaaattagagggctggagtgaggggcagaaggggggctgattttaaatatggaggtcagggaaggcctcacattcagaaaagccccaaaggagcaggggcgtgagcgcagcccagatccatgcggatgagatgaagctgcatctcaccagtgggtattcaaggcacagaccatggactgcgggctcccaagacctttacagaaaggttaggaggtcagaactgtcttcagaataacagacgttatttgccttttgcacagtattgatatttgtactggcgggtgaaactcctggcccctcagcaccaggcaaggcaaggcccccagctcaccagcagccatggggtgactcatgccatacgcttattaaaaagatcaccaggccgggcgcggtggctcacgcctgtaatcccagcactttgggaggccaaggcgggcggatcacaaggtcaggagatcgagaccatcccggctaccacggtgaaaccccgtctctactaaaaatacaaaaagaaattagccgggcgtggtggcgggcgcctgtagtcccagctactcgggagactgaggcaggagaatggcgtgaacccggaagacagaggttgcagtgagccgagacca

SEQ ID NO: 1885057 - DNA, 4001 bp, Homo sapiens
tttaaaaattgagatatatttttagaagaaacttgccagagggattaatttcatcctgaaacggatattcaaataaattaattctgataacatcattttaaacacataaaaacgtaaattgaatcaacttaagtgccttgcctccttacttagtacatatgaagagtgggcagtttacttacaggatactgcatttagtcataaaaggatgttattggtactgcgcaagcttcagttatagctaaatttatataatttgaaaagtccctttttgtatgaacagttggatcactgctctagctttgttcaaaaactagttacattagtaagccaactggatcagtaataatcaagtccagtttttccattctttaaagaattttatataaactttatacagacaagacaactttatatcaactttaaaagttttatatagacttttacataaatgagtttatataaacttgggtttggagaaacatacaacctcttaatctagcagtattgaaggagccataggttacggtctgtaagttttatagctaagtcgtataataaatatttatgagtacctactctgtggaaggtgctgtaccaagctgtaggaaacacaaagctgattcgtgacattaagtagcaaaaatctaataggagaaatgaggaataataaaaattctaaaaatgtgtaagagaaaaggcatagagaagcacttacattttatgaaagaaaagatcatttttgaaggtggtatggagatgttatttgagatttttggagaatgggcaagtaggattttagcaggtatatttgaggataaaaagtgttctaggcagtgagtctgaaattaataaaaaaaaagttcagttctggctctgtaaaaattatgaagagacttgctatcctaatccctaaataatggttaagaggtgaaccagaatgattttattctggatcactttggtagttttttctatcttgaaatagaaataataagaagctttacacctaaatatttttatttctttagatactgaggacagcatgaatgatcatgaagacacaaatggttcaaaagaaagtttcagagaacaagatatatatcttccaatagcaaacgtggctaggataatgaaaaatgccatacctcaaacgggaaaggtaacgtagaggagaaatttaactaggttttttcaagggaaacacgaaactacatgaattcataggtcatgggtacagttagctgttgatttcaatcattcaggctttcagcaaatcaaatatttctttcatgtctacatacacagttactgaacagtgtcccattttcaattctgtcatgtccctaaatgttctcctctctcccacttattggaggcagataaaatagaatttagactgttttttttttttttttttttttttggggacagagtttcactcttattggccaggctggagtgcaatggtacaatctccgctcactgcaacctccgcctcccaggttcaagcaattctcctgcctcagcctcccgagtagctgggattacaggcgtgcaccaccatgcccagctaattttgtatttttggtagaaatggggtttctccatgttggtcaggctggtcttgaactctcgacctcaggtgatccatccgccttggcctaccaaagtgctgggattatagacatgagccactgtgcctggcccgactgttttaaaaaataggtacgttgtcagaactatcaggtttgggtgtatgaagctgtaacttttttttttttttttgagacggagtttcgctcttgttgcccaggctggagtgcagtggcgtgatctcggctcattgcaacctccacctcccaggttcaagcgattctcctgcctcagcctcccctggtagctgggattacaggcacgagccactgtgcccggcctgaagctgtaacttctcccatccaagtactaaccaggcccgaccctgcttagcttccgagatcagacgagatcgggcgcgttcagggtggtatggccgtagactgaagctgtaacttctataatgttgcagtaaatttaggtcgtattggtctgatataggtgtaataagaattttccaaaacaaatcctggtatttggaaacagctatttttacataattatagatactaagatacatttaaattgatatttttttttcttaagtagttttgtcttcttagaacttttaaaactcattgtcattgctcatcacttggtctgaattaaaattcacacgttttatatcattttctattggtaatttttctgtcattttatagtttaaaaagacttatggaagtaataaagcttacaaataaatatgctattaaaatacatcactaagcttagaacttacagtttgagaattttgtccttatgttttaaggaaaaaaaagcacaaatgctgattattgcttacataggctatgtatgaccagctatgccgctggtcagtaccatagccacaagccatgtgctcaggagcacctgaaatgtggctggtctgaatggagatgtgttgtaaatttgaaacaccagattttgaagacttagtatgaagaaaagaattaaaatttctcatttaaaaattgattctatgtttaaatggtaagaatttggctatattgggttaaattaaatatattaaaattaattttattttattttatatggctactagagaatctaaactgacatatgtggctcacattatattatcttgcttgactgcatttatgcagttcttgtttactttctccagtatggaaaataggcatggcggtgaaagacagtgtgtttcggcagggagtttgagtggtattgctgttacaagtggctttgcaattgcttgattaatccattggagtttcatttttagaccccagacccttaagggaaaaattgtttttataatgaagtggcagatgtgtgcttctttaggcaggctttttagtaaactcaaaacctgtatctgacactgtgtatcccaaataataaaaaagtcaaagtcaccgtatgttatcatttctctcttttccaagccttatgtgaattcagttttttagttcctgttttgctttttgttttctggtgtctttattcatggaaatgctagggcagagaagtggtacttatgtcgcccacaaaatatgcatggtggaatggattttccaggggcactgggttattaagagttttcatcctctgtggggtggtaggaacatccagtgattgctgttttatatctttttaaaatttttttaattttttttttgagacggagtctcgctctttttgcccaggcctggagtacagtggctcaatctcggctcactgcaacctccgcctcctgggttcaagcaattctcctgcctcatcctcctgagtagcagcaattacaggcacctgccaccacgcccagctaattttttgtacttttagtagagatggggtttcgccatgttggccaggctggtcttgaactcctgacctcaggtcatccgcccgcctcggcctcccaaagtgctgggattacaggcatgagtcaccctgccaggcactcttttacatctaaattagatttgtttctgtaaatagttgtcaaggcttctctcacttgtatttgagcttttattctgactctgaggtgtggacttttgatagcacacattgtgttaatgttataacatatatttaagagattaaatagtcataaagtgaagatgtgttcttctgaataggctttcatttttgtaggttgttaggaaggtgatggttatagtttctgtaatttacctatgattttctcttcagattgcaaaagatgccaaagaatgtgttcaagaatgtgtaagtgagttcatcagttttataacatctgaagcaagtgaaaggtgccatcaagagaaacggaaaacaatcaatggagaagatattctctttgctatgtctactttaggctt

SEQ ID NO: 1885058 - DNA, 4001 bp, Homo sapiens
atttgatgtccaagcattctgacccagccatgacatcaccgaaatataaagacaagcacacaagcgctctgagttatcatattcctatgctttctttacatcacagaagactaggggccagttcttggccagccttttgagaggaataaatacttttatactaatttttttttcagatactgcaaaaacaaacctccgcttaaggattacagactgcaagttttgattagagaagtctttaataatattttttctatctatttacagaaagacaataagagagcgtgaagtaaaagacgtccaccaacttgccttaaaagaagtccaccaacttgccttaaaagaagtccaccaacttgccttaagtcctactcaggctgaggagccaggcgtcaaatccagcttccaagcttagggcacttagcactcactcgcttccttgctactttcagccaccacccaaatttttaatgaatgaaaggttttcaaagaataagggagagggcactgatttcataacaaatcattataaatgcgctttccacagctattgcttttcctcttaggaagactgaagatgctgcttaaatataataggatttccaaaatggtagagaggaaaacacaaataggaaagtgatgcaactataccatacccaaacgttttcaggaaatatactaaaacatacactattctataacatatactatactatagtatacactatactgtgcatatactatacaatacactctactgcaactaaaggtaaataattcatatcatgggttagtttacccaagggcatataaagactaagttacacaaacaaaataaatcataaaaaatcattttgctctgatattccctccagtgtttgaccttcaaactttaaaatggcctaagaaaaaaaatatatatatacttaggagataagctgccctacaggctttatgaatgtcatattggccttctgctactaattaacctcattttatgcatgtgagccaaacatctttccttcttgagcttagcgaaactgctctttcataacaagactgctgagatctgtcaatagctcactattacatcaagccttccttcaggtatcacattcataaatgagcacactgctgatgacaacagctaacacttactgactaattaacatatgtcagaggttactagacctcctaagtacatccatctcctttactatttcagataaccctaggaggtaaatatgtagtagaatgtgtggcatagagtgaatgttccataataatgttattgttacagatgaggaaactaaagcttaaagagattaagtaactaattaggtaaagactggatttgaacccgagcctgtctcatgctctcagccaccactccaacctgacttcctcacacatgaaaacagtggggatgttggggccagacgcagtggctcatgcctgtaatcccagcactttgggaggccaaggcaggcgatcacctgaggtcgggagttccagaccagcctgaccaacatggagaaaccctgtctctactaaaaatacaaaattagctgggcattgtggtgcatgcctgtaatcccagctactcgggaggttgaggcaggagaattgcttgaacccaggaggcggaggttgcggtgagccgagatcacacaattgcactccagcctgggcaagaagagcaaaactccgtctcaaaaaaacaaacaaacaaacaaaaaaacaaacaaagaaaacagtggggatgttaactacaggaacataacacagtagcccaaacaggacagcagtctcaggaccccaattacaggggagccaaaaagagctatataaaaacaacttgtacctaatgcaaaaactaaaaatagtattttgggtggagggaagaagaaagggcaagaaggagacaaggaaaaacgcaagtgaacattttctcccatccaagtactaaccaggcccgaccctgcttagcttccgagatcagacgagatcgggcgcgttcagggtggtatggccgtagacgcaagtgaacattttcttaaaacccacatcacatgaaagaacacatgcctactatatctgggcctaaaaaagcatcaagcatacctcagggctcagggccaagctgcctgccaaacaggcccatggactggactatgggaaccccaaccagttcctacaactaatactccagggagtaataacaccacagccttggggcataagaacacaaaagacctcaagagttgctaaagcaagattttcatgcattctcattcttagagaataacaatgacctacactgaaattttaaaaaaggactctaaaagaaaaaaaaaaaagaaataaagctaaatgtctgacatcttattacccctctgggaggacatcattctacactaaggatatacaaagtaaaaaagtaaaaaattaatcctgcaggtaaagggccacgtctctcctttaattccagtgttatgcacacattccaaggcagatgctatcagtgttccttccaatgttccaatgagcccatattaaaaaaaataataatctgtctgaggtcatgaagtctggggacagaaacgcaaattaatatccaacctagcgtcatccaaatggcaaggttcgcttcagggtagcatactggaagctccttgagaacaaggaccctgtaatccccctgcaagctcaaactagctatccaaccaaaacccaaatagccctctctagagatagctatgaaagcaactgcttttccctctaatacaaattatcagcaaataaatgtttatagcttaatgcttaaaacttacctaggtagagccatcaatttttctaaagcctaatgtttaaaatttacttgggtggaataaatatacttttatttaaatatcaactttctaacagtacaatcctactctggaggtttaggaggaaaaaaaaaaaaaaaggaaaaaaaacttggagctgctgcccgaagtactgaatcagctctggaagttgtcatcacccctaatgctgccttaaagaagattccatacattatcttcaacttataggtgccaaatcatttcccatgcttaatctcggcagctggagactgaccaagtggaatcaaaagctcaggatttagagtgaaaagacccctgacgttcaaggccgagctttcccaatacttgtgagaccttggacaattcacttagccaaataactctcattttctcttctgtaaactaggaagggacgtaaatacctgtcccacctgcctcatggatgcgtcgttgctgccgttaggtggaggggatgatccacagagggccactcgccgtcccgccgcccccgcccaggtccagccaagacagaaggcgccggagtccctgcggtgctgggtccgcggcgctcgggaaggatgctcctctcgccagcctcccctcgggacagcggcgaccggcgttctgacattccccgccgtaacacctgctcggcgccctctccccgcgcgtctccgggttcgccccgcgcccgagacccctgccccgctgggcgcccctctcgccctctggtggcacagagaccccagccccaagggactgcaccctcctcggcaccgggcgcctgcagctgagtctgggttgaggccagggcccgaccggcctcgcccccagagcctcgcctccccttattccaacaccggcggggactgggtggtcgcaagcatgcgactccttacccggcagcttgagcgccctggacagcacggtcgccatggctgaggccccggtgcgcgtgcgcgcgcccgcgttctgccgggaagtgtagttccgagcggcggtgcgtggggctgggaccgggaaaggtgggacccgcttgctggggacagagctgagggaggccaagccagagtacacgctccgcaggcttttctcccaccctacctatgcaggtcacctcaccactctgagtctcacttgcctcgtcag

SEQ ID NO: 1885059 - DNA, 4001 bp, Homo sapiens
ttctctctgcctccctgccttgcacctggcctccttatctgtctcccagacttgaaagatcagtgtatacacatcaacgcggtagaccagggggagtctgacaatgaaaggagagacagccatgagatcagggtgggactggtaagggagctcttctctgaatccaaaatactttatcaccaaagatttcatgaaatgacatttattgtttaaaaaagcgtgagtctggaattagatagtggtgatggttgaacaagtttgtgaatttactaaaaccactcaattgtacgcttaaaaaaaaaagcaagcttgagctgcctaagtcccgctcacacacactggacttgtactaaatgctcaacgattccattctctcagactatggaacattctgtcacatttttttccttcaggagatttccctaagaagagctgtttgcaaaatattgcacttaatttgaatccagggggacctgatgtctcctggaagaaaacgtacactcacatgccttcctgcctgcagcagatggcgggagtggtgggacaaggggctcaacagcagtttccatgaacattgtttccatcttcctctttgttatacacacagagacacagatttaaaggaaagtatcatctgggctgaaggcggtgaatggtatcccccaaacagggatgtgaacttttgaatgttttcagctcagaggcagtatggtcgtcctaatacctcaggacttatgttcagtgagatgttaagagacaggtggcaaccttggctcaaacactggacttaatttattttattcttgctagtctttcacttctcaaagacgatgctctcaatcttcatccaggtgaactgctcccactaatctagccaccattcagtcacaccctacgtcctcgtttcctcatgctttcagcgttccgacacctcagtgcacttgaactttagaggctatggttcggttgtccttcaaggaaaaaactgcaacatgaccatcatttgttttcatttcctgagtaagctttgcagtccctcacagacctgtgaataagatgaatcacataaagtgaatcatatcctccaggggggcttatcacaatcaagatttgccaaaaaacagccaggcatggtggcttgtgcctgcagtcccggctgcttgggaggctgaggtgggaggatcccttgaagcaaggagtttgcaaccagcctgagcaatatttagcagagccctgtctcaaaaaagaaaaaagatttgccaaaacacaaaccttcagagtagtgctcacaggattccaaattaatgttaaagtcacagtctgatgagggatttgaaaacattcctgcacactctgaaggctgggcatttgctagccagttgagacaaaatcaggtgttggttgcctgggtatgagaaggtgaaagccccattcataaatccctatgccttcccatttaaagtgtaacaaaacccctcaggtagacttgttggataacaggtgtgtgataagatttccacgttacagggtcatacacgactgactgctgtggacactgagtacatgacgggacctatggtcccctggagagaagcagggtggatcacacggggaccataggccacagtgtttaacactgcccaagcctgtgattcttcattccctgaatcatgcatatccttgctttttataggactcacagaaaacaaccattagcaattgtgaagctcaattctgacagagacttaggagagagacctctttcttcaggatcaccaattatgccaaggtctcaatatacagaggtttaccacgctgggctggtcaggtgggcaggaaatcggtctgattaaggcagtgagcaaggtaggagagctctgaaacagattcgtgttaacgaagtacaaggactgagttggcaactgctacggagttaagagaattgtagttatttacaccacacagtcctagtttttcttacacacgagtccgcacaatcattcactgtaaaatttggtagtatgcacagagttttctttaaaataaaaacttgaaagaacttgaaggcaggaaccagtggcttcatcttggtattatcatcctttctatggcacacaggatatggtcccagtttttacaaaatatagcaagaagagtcacggcaaagaaggtgccaagaatgtggcagcgactcttcatcatgggtgagacgaacttcgcgatggtggacacacacactaagatgacagtcatgaaggccaggatcacgttgatgcacctccccaggagaactttagcattcacggtgtctgtctgcagagcttgctgctcttgctggtggagctccagcttagaaatgcgagtctggcaggattccaaggcttcctgtgagcaagagggagagcaagggtcaaacggtgttgggatggtgagcaacacgtgagtgctcgctcagctgtacacaaaagccccagctcagaaagcccaatgcccaggcggctgcaaatccccaaaccgatgatgatggtgatagacaaagatgtggaacaagaatcccaggctcattttctcctgttgttcacgagtagaagagcatgtggatacaaccacaaaataccataaatgaggaagtatggctaagttttttgactttacctgttttttttgagatgtagtcttgctctgtcgccaggctggagtgcagtggtgcgatctcagctcactgcaacctccgcctcctgggttcaagcaactctcctgcctcagccccccaagtagctgggactacaggtgcgcaccaccatgtctggctaatttttgtatttttagtagagatggggtttcgccatattggcaaggaaggtctcgatctcctgacctcgtgatcggcccacctcggcctcccagaatgctgggattataggtgtgagccaccatgcccagccgacttcatcttttttttttttttttttttttgagacagagtttcactctgtcacccaggctggagtgcagtggcgtgatctcggctcactgcaacctctgccttctgggtttaagcaattctcctgcctcagcctcctgagtagctgggattacaggtgcacgccaccacgcttggctaatttttgtatttttagtagagacagggttttaccatgttggccaggctggtctcaaactcctgacctcaagtgatctgcctgccatggcctcccacagtggtggaattacaggcgtgagccaccatgcccagcctgactttacctatttttgaaataaagtgatataaaatattggtgcctgttggtgccatcagggacaaagcagagaaggagggaggttccactttgtgactactccacctttcagccaaggagtgtgtgggatctccaatggtcagtccttatttccaccgctcaaagatttttgtccatcagttagagattggcggaggaaggcgagagaagggaggggaagggactggggctgactgtggggcaactgtgctttcacctgctctctgaacgcggtgttactcaggacaccatccgaggctatctccctggatctcgtccatgccaagtcttcaattactaagacacagatggctacaagtgtatctctaggccagttcttcttctgagattgactcacagatctccatgcctctttgacatctccatcagagcttcctgaaagcacctcaaatgcaacacgtacaaatgtggcttcatgtattgcagctacccaacacctgcagtcaaccctcttcccttccagtgtccttcttctcagagtacagcaccatgatccacccagttcctcataccagaagcctaacgggcataccctgatacccttctcatccaacccgtcgcccagccacggaggcaacatccagtttctagctcaattggtccggttctctctccacccggtcagcaccccaatctaagtcaccgggatctcctgcctgcaataaccttacacgaatttcc

SEQ ID NO: 1885060 - DNA, 4001 bp, Homo sapiens
ctttttattgttcctaaccctcagccctgttatcatccattaccatttttgcatgtttctagtctttccaacgatctccaagctatctctgaaggaagataatatgttttctatttaaaagactcatagcatcctgcaagtcagatgcactgaaatatttgtttttacactatttatatgaaaaaaaacaaaacaaaaaaccacctatttatttgaaagtaggttacttatagtatacttgataacacacttcctagtaaccaaaatatttgtttaccattagctatgaggatgtatctttatagcacatggaaagacatttatggtatgtcaaattaaaaaagaaaagaaaattgtatgtatgtaatagtctttaagaaaaattgtctacatgtttatgtacatggaaaaccaactaaattgtcataaaaatgttaatagtattttctttattatatcaagcatgttttatttttaaaaatctgtcattaaaaaaatgtagaagcaaattcagataaacttttaaatgaagttacaaaatttaatgtgaatacttactttacaactttgccatacttggaaaatatctgaaacaaaagaccaaatatttacaatttattttaaaatcataaaacatcaaatttttaggttgcagacattgaccaaattctttgttacagtttatgaataatttcagccttcagtctataagacaggccctaggaaaaagttttttttggttactagaataatatacttactgttgttggagtcacatgtatctgtctgtttctaaatttgacaatggagtaaatacagagaaaaaaactcactctacacatgtggtagatctaaggcatacatactggacagctgctgtgttcctgaggtatacccatggcaactatcaactccatcatagtgccagatacacctgtgcttcaaatgtcaatcttatggagcagcacttttccaattctaccctcaccactaccttgttattcctattaagcaatccctgtttgagaaggcaaatccttagactgctttatttaaaaaacaaaacaaaacctcataaaataagcttttataatgaaaaatccatttctatcagtcttcttcctctgcccaccattaacatgttggtggaactttatacttggctctctcttctgttacttttactttatcctatgcaatctcatttatttctacagttccagctcattacccatatactaagagttcctattatataaaaagtcttttagaatgtgttagtatatgcaaccaataataacgaattttttcgttctatgattaagctgtataatgctggaatgtaaaataactggatagcagtgttagcaacactgggttctgaaggccagtacagtcttctatataatacttactaatggcttcttgtttcatgcagagtgaaagccagagtccttaccatgatgtaaataggtcgtataaggcacctcgagtgggcttacctaagattacccctctttttctgaaatgtttgtcctctagaatttgcacaggtgcctcttactcgtttcaggtctttattcaaaagtcaccttctcaataatggcatttctgaccgccctatgtaaaatttcacttccattcccaacttaacgttcaatagcccacctttcctgcgttattttttctccttagcacctaacatcttagcatctccttagtatctaacacataatttgacttaaatgttcaataaatatagcttctatttttttttcttttttttttttgagacagggtctcattctgtcacccaggctggagtgcagtggtgtgaccttggctcactgtcgcctcgacctcctaggctcaagcaatcttccaacctcagtctcccaggtagcttgtagaggcatggtggcacacacctgtattcccagctacttgggaggatgaggtgggaggatcacctgagggggcggggaggctgcagtgagccatgatagtgccactgcactacagcctcgtgcctcagtgacagaattagactgtctcaaaaaaagaaaaaaaaaaaaaggaaaaaagaatttgccagggagaactatttgcttaaggttatctgtatctcaaatagcagtcactcgataagatttacttacccggtacaagtcattgtttgtcagggaaaaaggcaagttggatacatacactgtgctcttacttggagccaatccaccactcatttctaaaagtgaaaacaaacttatcagcaatcagtctaaaccaggattctttttttgttgtttgagacggagtttccctcttgttgcccaggctggggtgcaatggcgtgatctcggctcactgcaacctctgcttcccaggttcaagcaattatcctgcctcagcctcccgagtagctgggattataggcatccactaccatgcctggctaattttgtatttttagtagagacagtgtttcaccatgttggtcaggctggtcttgaactcctgacctcaaatgatccacctgcctcagcctcccaaagtgctgggattacaggcatgaatcaccacacctggcctaaaccaagtattattaattccaaataaaaccaatacatcagaccagtctgggtattatttggaaaaaaacaaaaaacaaaaaccaataaagtattaacaatcaccgatttaattatgccagatgtgtacaccttccttacattttaggaagttaggaacaatgactccagcaggctgaattaaggaattcctttttcccagtcaccacttaaaaaaaattcttttttggttcttcttctttcaagtattctttataccaacactttcagtgccagattgtatgggtagggagacgggttttgaacagatgaaggaaaaaccctgaggctactcctaacttccactcagaccatgagcaaaaaaaatgctctattgaatatgtactgtatatgtacattacctgcaccttgctcacccaggtcagaaagagcatggggactcagacagaaccttagccactgatttttgctaatacacagtcatgctatgcttaatgaaggaggtatgttctgagtgttacgtgatttcacagtgcagacatcacagggtgtactgagacaaacctagatggtctagcctattgctcctaggctacaacctgtacagcatgttaatgtagtgaataatgtagacagttgaaacacaatggtaaatatttacatagctaaacacagaaaacgtacactaaaaatatggtacaatgtattacactcttaggagaccactgtggtatatgtggtttgttgttaatcaaaaagttgttatgctgtgcatgcctgtactatggctgggtaccttttttgcttgtcttaatattttttttctctggagtggtgtgttaagaggaaaattttcttttccccttttagtatgatgttaaggagtaaatttaagctttatgtatcgacaatataaacttctttcgaaacgctaattttgcttattgccaaattatgaaatgatacattatataaataggcttggtgcctcgaagagacagacctgtaggtatgtgtgtatatgtatataaagtttacaaatgtaatcagtaattttcacatcttatcttacaaagtcagcaaattaccgtgaaaatatcaggctcaaccaaattcaaatttctgatttaaaaagagcgtgcggtgtgtatttgagatgggaagatcaaccatcacaaatggaaaaatactgactctatggcatgccaattcgtgaaggaatgagaaaactgcctcatgtttggtgttatgggggaattatttagaaaacttcaggaactcaacatagatacgtcgctttttaagtttctcatttgaaactatgcgttacacgttctgctgagagccgcgaaggcaggcagaggttaaggtcctggaataaaaagggtggcgggagagaggggcagagcgttt

SEQ ID NO: 1885061 - DNA, 4001 bp, Homo sapiens
gggaagcggaggccagaagattgcttgaggccagtagctgcctcccaacatggtgagacccccgcctctcaacaaaaaaattaaaaaaaaaaaaattagctgctgtagtggtgcacatctgtagtcccagctactccggaggctgaagtgggacgatcgcttgagcccaggagttcaagctgcagtgagctatgaccacgtcactgcacttcagcttgagcaacagagtgggaccctgtctcaaaaatttaaaaatagcataaatattccaaacgcaattatatggaataagttggaatggaagataaaaagcagaagccagagaaaaaaagtaaagtcgtctcccatcggaaaaattttggaaacaacttctttaaaagatgagagaaaatgttcccttgcttgcaaaattaatgtcccactcaagtcaccagtaggaaattctgctatcttctgtgcaacgatgatagctttccctacgcttatgaaaatcaattctgattgctagaaaatatggtggaaaatagaatccctctgtactgtcagctcgcagaattatctgaaagtgttaagtcaattcctgctagggcactccggatgacagttctctgcacccttctggatgactctttagaaaccatattccatccctaattctggctgtctagaatatatgaaacatttaactcaacataaaatgataatagccaactttcaaaggtcaaaggggaccagtttataaccttccctcaacacgtgttcagtacaaacttccgggtgcacttacaattggctgcgcaattcaatggataaaaacgttgctttatttgtctctcattttctggcccgttcttttcccacgtttctcaaccagcgactccccaaaacaaaagcctcccacagtaaaccgagcacgcacataaaaagagcttctctgtgcgaggatcaagttagtggtccgcaaacattaaccaaacagaagcacaaagcaggggtgggaaggggaggagctggatgccagggtcaggaaagaaacaatcagaagggtttaggaacatccaaatctcctcagcggttaaaccgaccccaaaccacttctgggaaaccaccggtatccactgctttggggaactctggatgctcgttatgccaaacgctctcaaagtaagcaaatccccaactgccgttcccctccatgggtaattcttagggtctgggaggtgagctcgcccgccgaggcagaactaagcgagtcgcctggagaggcgtgaagggagcctgcacgtgtcccccgcggcttccccaccgccccaagagcggggcatgtacgagaccgcgctgtggggttcagatttaggaaggacgaccgcgtcgcctgcctccctccctcgcccagagccgggagcaatgctggggcacgaaagaggacttgggaaggatccggtccttactttccccgcgggtcccggacccgcagcccccgggttgtgaggcggaagccaaaggggcgaacccagcggagccggcgtgcacagaccctgccccgcggtccaagaggggtgcctccggcccgggacagcggggctcccggagcccgaaagccccacgagcggcgacagcggggcccggcgctgacgaacagaggaagcgagtacaacggagccgccgtcgggaacatgcccccgagggccccggagcgcgcggccgcgaggagcggcaagcggcgagggaggccccaagccggggcgaggtggctgtccccccagcctggccccgcacggccccccgagggtgggagtgggaggctgtccgggagggggagtgtggaaggagaaaagggccaagggaaggacttactttccccgcgggacccggcgccagcacagctcctcccgggaggtgtgagtttgaaggaccagaggcgactggagcggaggcggcggtggcggcggcagcagcggcgtcctgctctgcctacctccccgccgccatcttgacgcccctcccccagcccccccgccccgccgggaggggcgggggaggggcaacggatgaggcgccgcgcgcacgcagcgccctcacgtgacttcctccctcctcccccacccgcctctctgcgcccctctccgccccgcctccctcctaggtgaaggaagatgatttcccccccatcttgaccaccccccagtcttcgccgccaaaaacggactccgccggctatcctcggcccggtaccagttgttggatccaagagaattccggaacccaaacggtccattaccgcggctctggggtgggcgaggggtgagggggccgggtttccgcgaagggggagggggaaggcgaaggccacctaggagagtcacgtgactactgtttccgccggcgctcacggagagctcgcggtaattccgtttccccgcccttttttccccgcggcctgtcgggaagaaggtccgcgtgccagggctatcgggaggtcggccggagggccgcgcgcatgcgccccgcgcctgctttcaaactccggttaggaagggcctggagctattttcagaacctgttagggtggggagctacggcccaggaagttacctagcagcgtttctgtcacttggaagatctcttcattacctagttagtcctagaaacaaaatgtttacatattcattgcttgttaggctcgctcaaagcactttattggcagtgaaaccgcaagtaacccggagccctcggcgcgaccacggctagaatcagagcctaaggcgtgtgagctcagccatcccacgtctgtcttcacgctcatacgcaagcccgacacaccggggctcccacttaatgaatactgaagagtagggctgtccctaccgcttctcacttccttgttttcatcttttcgttattattaagcgacctaacacaataaacatattaccttgttggtaacccttttgtaaagtcattctgaaagtgctgtttgactccgttgcttgggtaataagcacgcctgggtgattcttgccccctactggctgcgcatcctacaagcctagtgctgaaagcaaaccaagtagctggaacagttggaggttacagtgtgaactcttccagagacaaagtattcggggaaagaaaggaaaaagtaggcacagaaagaataggaaacttcagtgtttgtacacatagatatgtattatatatctatgtatacatttataaatatttttaaagtgctaactaatcgctttactaattacattatttcatttaatcctctcacacacatagaaaaaaaacctataaagacaaaaataaaaaatattttaggccgggcgcagtggctcacgcctgtaatcccagcacttcgggaggccgaggtgggcggaccacctgaggtcaggagttcgagaccagcctggccaacatggtgaaaccccatctctgctaaaaatacaaaatttagctggggcttggtggcgggcacctgtaatcccagctactctggaggctgaggcaggagaatcgcttgaactcaagagacggaggttgcagtgagccgagatcgtgccattgcactgcagcctgggcgacagagcgagaatccgactcaaaaacaaaaaacaaaaaaaaccttaggcacaggccaggtgtggtggctcacgcctgtaatcccaacactttgggaggctgaaacggggatctcagccaggagtttgagaccagacttgggtaacaaagtgcaacctcatctcgacaaaaaaacatttttctttttgagacggggtctcgctctgtcggtcgcccaggctggagtgcagtagcgcgatctcggctcactgcaacctctgcctcctgggttcacgccattgtcctgcctcagcctcccgagtagctaggacttttttttttttttttttgtatttttagtggagacggggtttcaccgtggtctcgatctcctgacctcgtgatccacccatctcggcctcccaaagtgctgg

SEQ ID NO: 1885062 - DNA, 4001 bp, Homo sapiens
tgaaaacttagatttggggttcatgacaagcttatgaagccattttgtagattgggaaaataagcctccaagaggttagataaatttgcaaaaacattcccagaaatcaataattaaattctgcttttatgaccctgcagtctgtctctgataaagtgactacttatagagtgtttctgtttttattttgttctttctattgttggtatttttgcctggaaattattcaatgggtttatgaagtatttattcttctataacttagtgtcctagtacaatgtagcaccgtgctttgctaagtgcttatgtattctataaattttatttcataaatttatacatatacatgtattccataagttttattctataaatttatacacatatgtattccatacatttcagtgcccgttagaatgttttgcgtaaagtattgtagctctaagtaatattacattatatatatatatattttaaactatcatggactataaaaaatggttgtaattgtctcagtaaaactaggcttaggatcacttcaggctatacacacacacttgtgtgagtgagtttgtgcatcacacatgcatgctcacatggctgaattaatcatatgatgacttttaagtgatttaattaatatggctccaaaataattagttcatatttttacatttcagttgtcgctgtatcttgaaatgtcattaataaaaattgtttagtttttcattgatttttcattcattagccactaactagcacagtcgtatgagtctgatgttgttttatggctatgaatctggtctagaaaaaaaaaaaattattataatgaaagtacttaatattttttccaacattttgcaatagaaatctcatttaactatctttatcattttcaatttttttatttatttggaattactctgatttctcacttaatattttctttctttgtttcaatttttcttcctttttctttttcttttttttttttttttttttagcatttcaagaaatagataatatcaaggacatcaggacaccgggagtgggagagattggactgggagactcagcaggtcaggacatttacattaccatttgctggtcattcttttgccatcagttttacaattctcaaatctcttgccacttgcttatttcttccatgtgcttgagttgttcttggtttgcaaattatgaataatactctaataatgtaagaagttgagcatttgggcatcttccttttatagtttgaagatgaaaataatttaaaaactatcaagaatagaaacaaaatcttacataagttacatagatgcctgaatttatattttttctatatttttttccttgtataaactgttttgaagtgaaacttcttaatgactttcccttaatgacttttaagaatcaaattcttaaaacatgtagaatgttaataaatatgtaattgtagggaggagcacccaggtcatgaaaatcgagtttcttctcttctctgccatgtactctgtgctggtgtccacctctaaaagctcttgacactcttcagagtcaatctgtttgccaacgctaatagtaaccagagaatattgactaccatgtatgaaatgagagttaattaaatcaatttctatgtaaataaaagatctcaatagtcaaagagtctcctgggagcattcagcagtcattgtgcaaggttagttttagtcacgtttctcagtaagctagagccacactggcctttgaagtccccattgccatgattgtggctaatggctgtgtgttcattcctgggtccagggaagtgtcttggttgtttcaacaatgctcacaactctcactattattgcttagttatgagtgaagacttggtggtcccctccttccttgtaatccttccttccttgtaacccctcccgtgttactgcttccacagctcccctggagtgtgtcttagctcctacacatccaggtcttctgtagaacaactaccagtggctttttcagttttcattatacagagagataaatgtctttgtccttcagtgtgatcagatctcttcaattaaaatgacttactcctaaaggaactaagcttaaagttattctatctggatgcctcagagattttgttatgttttagcatgaacattaggacattagggattggacacatttttattggcatgtaccttgagagaacactccttacccgcttaaagggaagataaatttcgactatatcttcatgcaatgcatatgcttaactctctgcttttagctaaatggtaagagtcctgcaaaaagctgtatttaaaatgatacgccaaagtaagtgtgtctgcactgattcttgcagagttaagaaccactcttcaatgatactttgataaagagtattctgataataaacattcccaaatttttagtttgcaaatattatggaaataaacattaaaaccaaataagttgaagctaaacgttgtggatgttcttgtcatccaacaattatataaatattggccttaaattgaatacacttgttgtttggctttcacatgtttggaagcaaaataaagaaggaagggacaaacatctcatagatccctgtagtcttatgagacagaaagaaacttggtccaatcaacttatttcacaagtctaaataactctcctctgtcacatggaacattagtaacagaactaaatctatgtttcttggcatgatgcaggtctactacattatgctacctcacaggttatggaacacaaatcattctgtatactacattgtgcacacacataaaaataccatcatatttgccattttgccaacttatcatttgataaagaatgctattggtactaacacttcactttggattatactaatattcaaagaaatcaagaacttaaaaatgtttttgatagagtcatttccctggagaagttttctgtttagctagatgaaataaaaagatgattatccattcattaattcatttattcatacaaggaaaattcctactctcccagagctttcattcctatggaagaaaacataaagtgaagattttgatgtgtatgtcagtggggataagtactaagaagaaaaataaagcagagatactagagaacactgaaatacctcctcagatacactgtctagggaaaggctctttgataaggagagaatggaatagaggactgaatggagtaagagaacaatttcaaaatgtgggggaagagaggtacattcaacaggaagagtcagtatgaagagtgtgcttggtgtgttgaaggaatggcaagggcagtggcaggaagacaggagcagacaagtgagagatgacgctatggagggtgagtggtgttcatcatttacagcctggtagaccataataggaccttgactattattctgagggagatggagatcattaaaggaatcttagcagatgaggagcatgttatggttcatatgttttaaggatcagtctcacttacaagttgtgtacatcatttaaaaaatgtccctttatagacagaatctaaattatgagtaaaaatagatttaataatgattagggcaacattgtctaaccaggatattgactgatgattgtgttcaaggggctaatgttagataatacagctatcctttttcttttccatgtctttaattcacagaattctcttgagtttgaattacggtttttggctttgtataataacattgttttataatagggaccttaatgataatgatatataatatttaaaaattgtgtgcattcagttagttacttggcacagctgaatttctcatttgtttgccatttatcatttcaaccctaaccacataactttctgtaagtccagaaagaagtcctgaattttatctcctatttgaaagagaagatgtttgaaaattatgtaactcttttattataattatcccaatccatgagactatttatgagcaggaaaga

SEQ ID NO: 1885063 - DNA, 4001 bp, Homo sapiens
attttcagttggtgtgtagagaaatgtaattagcagatcatttttaaaactggagattagagcagaaatatagctatgggattaaaacaagtcagctggtggcagtattttctcttgtaacttaggaaacagttaacctctcaaagtacctttacatccaataactcaaaaatgttactactatttgggcaatatgtagttgtggataaaatttactttaaaaacacaagatataaagtatgaatagtttatctgtataggacattgagcatttctggtgtgcttatccgcttaaagtttaaattaccagcagaatttgttatactttggggtgcagattaacaaccgttgattctccataaaaatgttagagtgtagtgggttggaagattacctcggttggttgaatgaagtgttttggaaaataaaatcataatgaaattagcatgttatgattagtttctccataaaccaagatttgacacagcaccgcagaggttttcattatttaagaaaacaagcacttaacaaagccctgaatttactctgcgttgctatcaagaaaagcaaacttcaagagccaacattcaagcattttctgcatcttaagattcaagataaggttcttcaccgcccttcccacaatgaggcggctccatcctgatgagatcagattaagtaaggttattctcaaggctaaaccaaacccaatcaaggcacatatattagatcacttttgaatgataaaagcatcaaactcctgctgaagggtttggttggtttaaagaactgccttatttgtttttcaactgagcatcagaaaaccatagaaaactgcgattacattatattcaaaactacttattctgtacaaatacagatcagttttcaacgaaaagtactaaaactgaccacttacttccctcagtgaaaataaaataaaaatacaagtatcttgttttccacgcagacttcagggtattagagcactgagtattttcattagttatccaaactaccttttttctctatgcaaaggtattttcctattaggagtagtggccactcaggaatcaaaatgagtgttagtagattttaaactcaaatctagaaaccactttcaattcctagtcctcttctcccatacaaaacctcaaagatgtaagtaccacataacattagaatcaaaggccataaaaaccaaaaaaccaacccaccacaccagcagaatctgagccccaaggttaaactaaaaagaaaaaacaaaaaacaaaaccattcacagcacactgtacatagaatttatttgtttgcctcatacattaaaaaatcggaatagtgcaattacctacaaataatttcaatcttctcattcgcgagttgcaaagtttaaagagaaactttaaattgctttgggtttacgtttttaaagacacactcagatttactaagagagcatatcagaaaccagatctaaaatgttaaggcataaactttaattatcaggtctacttcttctgcccctctaatgccagttctgcagatcgctcacaccactccaacctacagctaaagaatgaagtaaaacaggtacacactaaatttggcatttaactgctgaaagaagtgttagaattttttagggtgaaaaagttatctgtatcaattatcttacacaattccactccttccttcaagaaaaggaatccaatggcttagctctttcccaacctttaaaatgcatcgcggtccaccccactcccctcaattccttctaggaaaatgtgaaactaacggtttccgtggtggccgcgccggccgggcgccgaggcttcgcgggctgtccccaggcagcgccccggaaaacaaaggggattcccagccattgtcctccgcggcgctgagcatcaccagcactagcaaggcagtagcttgcgcagttatctccacagcgggcaatgtcacaacccgaccaacagcacaaactactacctcagccagggccatggtgtcggggaggcacgggaccacgcggagggcagcaaagcggctccggcgctcctccgtccttcctcgccgccgacgtcggcccgccgccccttcttttcctttgccttccccccgcgccgcgcccggagaccccgcccagcacccagcggctcggctactcccggcgcgccccgagagctacggggatgagaggcggcgccggcgcccgggtgatacagccggcgttctgtacgtcagccaccgctctgaagagagaaaagcggcggtgtcctgcggagagagccgctccctccactgcccgaggggagcgcgtcgcctcagccgctcgaaagcaggaaatgggcggcaaaagcgcagtcagacaccaactggttctggactgcccccgagaggcagcgagcagcgctcccgcgcttcgcccgctaggagctgccgccacgtcccgagctgcgccgctcgcgcccctccctgctccgagtccccggtgggggctgggctgcggccgagtccggtacccgggcccccacccgcgccgcgctgtcgaacccgccgccggcccgctctcggcgccgataatcgccggcgggcatcccgcagaggctgccgccggctccgccaaacagcagccaaggcatagccgggaagtccccaggccacccgttccccagcacccttcggggaattcccgttcagctctacaggaggcgaaaacggaacaaacgaaaaccccttaacagtgaaaccgggcccggcgatggcccgggtggcgactgcgacgactcgacgcgtgcggacacaagacccgtctcgcgctccgctgctcctgtgcgtccggacgaaccttagagatcacttaaggaggctcgcgcgctactcctcaccacgtgaccgccccgccaggccgccccccgcgccgccatcttacatccgggacagaggcggcgtcccctttccctgccttggcaggcgtcagcgtgctaccagaaatcagccctgaaagaggggaccccgattccacgtcaccagagtgctgaggcagcgggcgatgccctccatcggctcagcgggggggagtggagtcccaaacttttttcggcctttgcccgcaaagaagatggcggcgcatatcgccgcctaagcggacacgttgtaccctggccgtggtttgaagtttccggcacctcctttcccaaccagcaaggacacaaccatacgagccccacccacgcggggtggctgccgtgctacattccgcagaaaacaggcgggaaagctgcggcacagcccgctttaaacgcaagcttttgggacttctggttttggctttttctttttaagccaagttagggagaaggctgactgccatggagccacttctgcttttggcccagacaacttacgggattttttttttcctcccatttagagattttttgtaggaagttaacaaattattttaaagaagtagttagggcttgtcagataaaatacaggacgcccagttaaattggaatttcagataaccagtgttttggcatatgtgtgttacatatatttttaaaattgtttatctgatattccaatttaactgcacattctcaatttttaatgactgtatctggcaaccctatcagcctttacccctgaaaatccagactgcttatgacaaaagtaaggaatggagggaaatgaaaagcatgtttacctacaacttagaattgtctttgcccagactttgatccttcatggaggccagagggccgtggtctagaacaaaatttggcagcaactcataaagatatccttgtataattccctttctggcaaagtaagattttttttttcttaagctatcacgatgtaattttggacaacagatcctcttggccaagagtttaattgcaaattaaaaattaaataactggctttttgtttctattctacatggtataggcgatgggacccaaacaatttcttaaagtagaagtttt

SEQ ID NO: 1885064 - DNA, 4001 bp, Homo sapiens
taaggacttcatagtttttaactgtaagcacaatctcatcatcttcctgactctaaggaaacctctaaaatttaataatcgattggtattgtttgccaagttccctttttcttttttatttattttttgttcttttttatttttctagttccctttttctttttttttttttttttcagaaaactaactttaagatttatttttctaactttttttcaagagggaaaacaacacactccttggggaaaggtgaggggttgaaaagacaggccctgggtaaaaattcttatgccagcacctggagttgacaggcctgcctaggagagaacacaggcactgccacaccaccacagggaacagctgctgtctggggtcagcagaccagttcacacgccacacaaggttgctatagatccaagtcataaaaatcttccagctcctcatgaaacaagtcgctctcatcttcagagtctgttagttcatcgtccccaactgcagccaaaagcataagcaacaactcacccagctcaaaggtgacaacctcttcttcatcgttgtcaaaggggctgctgttctctctttcctcaatgagttcccagaagtggttccttcattgggccgggtatctgcttgatgttcccaccttctgtctctgtggctcctctctacggccatcagggtacacatgcttataaaaaccgttccctccaaacgggcagctcccatgtccttcatcaaaatacctgcacgccttgttgctcattgcctccttgtatttcagaatgagtttctgcttctcttctttctcctccacacagtactcacttggaacgacaaagttagatgtgatccgacattctgggcaggactttatgatcttgctctcaaactgcttagcactcctccacttgcgaatgcacttaagacagtaggtgtggttgcagttggagaggatcccgaagcggtgctgtctggggttggctttctcatagatcatctccatgcagctctcacacaccatttcctcgctgcgctgcacagcaaatgagagctccctgtctttctcatgggcctcaaagcatgattttatatgctgtgatctctgggcagcatccatcagatgcaggacctgcagccacacatgtcacacgaatctccatatacacacaagttctcccgatatcggcactctcccactgcagcataggggcacagctgcttctttgtttccacggcagtttgctctttctctgattcttccttggtcactgagccctgcaggggtgcttcagtgcaggaaggcgcagtgcggccacagtagggttgcccaggaacaaactcaacagcattcacccagccctctgaacctgctcctacagttacaaagtttgaatttcttgactcagcttcacccgtattcatttcaacaagtggtccgactatccatgagagacttgaggaagcagcaagggatgactttgtagttagctctgtagcagttgcttctttctgtttcaatggcttgctatgttcatatctgcagcagtctccataaatacagtaccctggctgcaaactcttgtacactacattatacggactgtcagagaggtcatgcaacttgcaacagttatctccttccttataaaccccatgcataaaatacctgcaggtgacctgtttagtccagctgccgccgctgccatcgctgccgcggccccctcgcctgccccctggggacagaatggtgactgtggggatcctggtaggggaggccgctgctgccgccgccgccgctgccgccactgccgcccctgatgttgtggctgttggtctgagagctgcagcctccgccattactgtttatcccacacagaaaaggccccggaacttccgggatcacatagttccggtccagctgctgggagaggactgagaggcccggcgaagggaggggtaggacactgaggcacccgctcagtccctgcctgctccacgtctagttcccctttgctaagtgcaagtttgctaaaggtttttatcctgtatggtaaacttcatcaaatgcgttttctgcatccatcaagatgtttatttcctaatcttcttcaacctattaatgtaacatctttaactataacccatccataaattcctaagataaacacctacatagtatgatctatgtagtatatttcctttgaaaactgctgaattcatttgccaatattttctacagaaatcataggagaatttagtctatagtatttttttctgatctgtattttatatgaagatcacatttgtctacattctctatttttaaaatatttttatataagatcaggattatctgttcttagaatgactggtagaaaatattttgtaacacgggttcgtattaagatagctaggaaggatagatggatgataggcttgagcagagggattttgattaataattcatttcttcaatgtttgatgatttattgacatttcatgtattcttgaatcaatttttgtaatatttttctacaaaatatcaattttacctaggttttcaaatgttcgtactattctcattcttttttaacctgtactatatctgtaattatatccctcttctttgtgcttcacagttttatacctcaatctttttaatggcttattaaaaatttttttgtttagttttcctttttatagactgcttttatagaacagtttttgttcctgtttaaccctatatttctgtttttttttgttttgctaatctctactctcacttttattgtttcctttaagctactttccttaggcttattctattgcttttccccagcttcttaaattgcatgtgtaacatatatcttcactctttcatgtcttttctttgctggaactcatacattttggcatatagcaattacctttaagttcagttctaaatacttttaaattttcattgagatgtaaacaaaaagctgctaagaagtgcagtttgtccccaaacatatagttttgtttgttgtaaaatcgcatttcatcaataaatcctgatttcactttttttctgatgagagtatgtggagagttatttaaacatgttttacaaactaatatgtagtcaatttttgtaactgttgcatagtacttgggaagatattttttacatgtgttaggtatatgttctaataactaactgatatggttaggctttgtgcccctacccaaatctcatcttgaattgtaatcccataatccccataatacccatgcgcgtgtctagggagagaccaggtggaggtaactgaatcatggaaggcagtttcccccatgctgttctcatgatatgagttctcacagatctgatggttttataaggggctcttaccctttcgcatggcacttctccttcctgcttctttgtgaagaaggtgcttgcttcctctttgccttccatggcgattgtaagtttcctgaggcctccccagccttgctgaactgtgagtcaattaaacctctttcctttataaattacacagtctcaagcaattctttatagcatatgaaaacagactaaaacactaactcatagttgtattttgctaatttggcaactaaagtattctagtcttgcaacagcttttctttcttgtttcatcaaatggtttttgataaatttgtactaaaacctctcctttttcttcttttaattttacatcttttctgagtggctactgagaattttataaatttttataacaaggtatctaataatattaaatatctctttctcctaaatatcataaaggttttagtaaactttacccaatcaaatacaaccattattttatggtttaagttttatttttactctttttaagcataaaatggtgtattgttgttcatttaaatttaagtaacatacttcatcattttgggtgattgtgttattactttattacataccttgcctctgagttttcttttcccatgctgat

SEQ ID NO: 1885065 - DNA, 4001 bp, Homo sapiens
taacccacagggctcctagtacccaacaggctcagagctttgtgaatgccataaaaagagaagattctggggttactcatgaaactattcctaagaggcacatttgggaataatatctaagggtagagagtgtgtctgagatggaaggacacagggagataaagactcaccattcccagcatcccaaagggggagacagctccagcctacaggaacacatgaggaacagaaattagagaccacatcctatctctttacaatcccaaaccaggcccatggcctcaatttttttccatcctctcaaaagggagtcacaaagccctttttcctgaccctttccccaactcctagagcatttcacttgctcagttggctgtagtgcaagaaaattaagtgctttcctaactaacctccaacctttctttgggtctcaggtgtgtctcagcatcattacctgctgcatccggcggctggcaggcctggtccctggcatgttgccatctgtgatgctgaggaaggggctatatccaaagccacctgacaacatacggctcatatgctgacggtgaatagcaaagggatccctgtggagtgagcacatagtatggatggcagaagcgccaaactgtcaatccctccaccaccctgcaaaaaaatacgcacagagcaacagtggcaccgatgcctacttcctgctaggtaggagctaggtatccagccagttccaaccattcctagcaatgggaaccccgatgtctgcctgaactgctcagagacctggagtgggagagcttgagggggagggaatactcacatcaggaacatgggatcctcaggctccacgtccctcatgaagcggaacatcctgatctcagctccagggggctccacactggaaagatatggaagctcagatacttggaggtggccagggttttgcacacccactcagtgtggggactctcagagcactgtcctttccaaatcctgtaactgaccccctaaactccagggagaccctactccaggtgttccacacaaccctctagggagggaagggctcttcaaacctctttctcaattagggccatggaaaatttttccaaccctctcggtttttccctcccccactcagagccatcctcttcccaaagctctggccggtagcatactctcccctcctcccgccgacgacaccgttctagatgagaatgccaagtgcaggtcctccgccccattaatgaccccagtcaccccgccccctccttacactcaggcctcccccaggcgggcctcactaagccccccgcgcctgtctgcgactcctctagctcccgcctccccgccaggcgagcaggagaggtaggcctgagcctctcctctccccaccccgcatcccgggctcccagaccctgcagccccgtgggcccgctcccgtccggggctgccagctctgcccgagcctcaccagtgcccgattcgggctcagcggcccatccggccggtttcgcttcccggtacgctgcagggtcagggtcgcggcccggaacgtggggattggtccgggcttgagctcctcggccttccacgccgcctcctcccacagctgccacctccgtacggccccctcggccaacggagcccgaacctcggccaggcccgggcggaagtgacgtcacgatagacccgcccacccggggccgggccgtgggagccccgccccctggcgcgggtggtgagatggctggggccgagtcccaggggcgccggggccatgggccaagctcaggggagcagagcctgaggccgagaggggtcccctgggcacgaagaaggggagctcattagtaacctcgatttgggttctgtggactggaagaggctcccataaggcaggggaggagaaggagaagaggaatccattcttcgggagggaccgggttggaggttgaacctgggggcgcagtgcagcacgttctctctccctcctcaaggggaaactggaggacgaggggcagatgccccttggggagaggcgggcgctctgtgggcgacgaggcggggcggatccctggggggagctttaagccgactctactggagaagcagtctaccctagagggaggatgggcagttttcctgcgggggaggcgcttgggcctgtccccgcttgaggaggagcgttcctggcagggcggagtccccggagtgacgcagaggaggtgaaactctccagcccagatctagttcgggcttcagaaagtcggatggggcagaggatccaggttggggggttggccgccagatggcgctcctcggccaggctggaaccggaggcccttgagaactcgcgttggagagggacctggaccctcccccgttacccatctgtgaagggttggactggggaaaggctacagttctgaatctattagtttaatgccactctccccttccttttactctaattcttgtgtcctcaagagctcccagtcctgcactgacctttcttggttgctttcttaggtcaaaggtctaaagtttgggggaacaaaggagtggagagctcagttaacctggatcacccaggggaggagctaaaacggggcccagaagacctgcctccaaggccagagactgatactttgacatactaaatgtcttgcataaaatctggctctgctggagagaagggccttcccctttggggtcagggcatttggactgtctaggatggactttaaccagactcatccaaactccagctttccctggttctttactctggcttttagccatattagtgctgtgtggagtctgacccaatgagaaagacttgttcccagtaattccctgggggagaaagagggggtccctggtgactcaggaaaaggtgctaggaacagggcttctcacgtttctttggacttgatcattattaaagaggaaaaaacaataatagagacagggagcagagatagataattaagatataagctgacagactggcaagtcaaaggaaaacagacagaatacaagtaaatttgtttttcattgctatttctgggggaagagacttagtaaaatcttctgtcttccagatctctgcacttcccaccatgcaacttccccttatcctcttgccccaaatgaaagcagtttgacatgtgatcaagagttgtcccagtaaaggttctgtggctgaaacttaactaaagagatcctatccattttttttcttttgtcctctcctccttctaaagcaagttctttattgtccagccaatcaacaaatgtttaaggcctggcgcagtggctcacgcctgtaatcccaacactttgggaggctgaggcgggcacatcacaagatcaggagttcgagaccagcctgaccaacaaagtgaaatccagtctctactaaaaatacaaaaattagctgggcgtggtggcacatgtctgtaatcccagctactcaggaagctgaggcaggagaatcgcttgaacccaggagatggagattgcagtgagccaagattgtgccactgcactccagcctgggcgacagtgagactccgtctcaaaacaacaactacaacaaaaacgaaaattagccgggcatggtagcaagcacctgtaatcccacaagtaggctgaggcaggagaatcacttgagcctgggaagtggaggttgcagtgagccgagatcacgccattgcactccagcctgggggatggagcgagactctgttccaaaaaaaataaaaataaaaataaaaagcaaatgtttaatgaggcctggaactgtcctaggtacattgtattaagcatacatacaaaatataagacacggtctctgccaattgaaggcatacagtcttgtagccacctttttcttttttagttacctgttatccgtttttttgttttttttttaattaaattgtagagatggggagtttcatcatgttgcccaggctggtctcaaactcctgagctcaagt

SEQ ID NO: 1885066 - DNA, 4001 bp, Homo sapiens; identical to SEQ ID NO: 916503

SEQ ID NO: 1885067 - DNA, 4001 bp, Homo sapiens; identical to SEQ ID NO: 916505

SEQ ID NO: 1885068 - DNA, 4001 bp, Homo sapiens; identical to SEQ ID NO: 916508

SEQ ID NO: 1885069 - DNA, 4001 bp, Homo sapiens; identical to SEQ ID NO: 916509

SEQ ID NO: 1885070 - DNA, 4001 bp, Homo sapiens
aatagaattttggcctgttacaaagcaaacactttgtttctttaactcagaattctggaaatgcaatcaagttctagtattgtgactgccaaaatattttgtcatcagatattaatttttttcaagtgtctgactccatacaagaaaataataaaagtatcagaagttaactgtgattataaaaaaaaaaaaaaacaaaaaaaaaacaaaaaacttcagtgtccatagggttgttcctcatggtttgttaggatactcctgcctgatccaagtgcatcaggtctgagactgttctttgttccacgcttctatctgccagaagaatctttttaggtaaggaggctatcataggaggcaatggagcttctagctgttgtccaaggaatgaaagcaggcgcctccagctgagccacttcccatgaacataattcctgtaatcagtcaaaacactccatgggcctcttcaagggaagattccaaactcattccaaaagcaacttccattactccaaagagcgaaagagagaaggttcttatggtcagctgtagattcaacttcattatcacgttacagtggctgtccagattgatgaaaataatactttgtgaatcatcagtcagtaccgtaagctcctaagctgcattggagacatcgtcagctagtcggtagtagttttccatcagcaactctatctcctctgcatggtcagtcccagtactgctcttttcaaagactcgggggtcactccattttgatagagctcttctagcaactctttctcatccaggatctccaaaattgactctgaaaattttaatatctgtttctaactctaatagacttttgccattctgtagtaaaatgtggagtttgcttctgtctatagaagaatgtttggggtccaccaaagcttccagcgtcttgaggatcagtggctggaaaaggctaagtttcccctgaagggtgttgatccagtattgcaggagtgcttctatagctctaaactcaaaaaattaaagggtttctaacaagttgaccctctccagacaattgtgaagagagttcccggaacagccatcgctgtgagtttaaattatgataatctaatatcagaagacactctggagttatctcagctttcaaatactccattctcatgataatcatattatttctggctgtgatactcattacatagtgaaatctcaaatctctggcttgaagacctaactcttggtataactcagttttcttcctttcaaaagaagtaacatttctctgtcaaattttgtcatggtaaatactggggctatactggctagagtggtttgaaagacatcagaagttctaaaccagtgcatttcacctgccatgtggagccggcggggttcgcacagtgggccacccagctccttctgagcaggttggctgcacagccacaggcagtcgcagagtttttgttctgtcgcccaggctgaagtgcagtgatatgatcatagctcactacaaccttgaattcctgggctcaagtgatccttccacctcagcctcccaggtagctaggactacaggcatgtgccaccatgcctggctattttttttgttttgtggacgtggggtctagctgtgttgccgaggctggtcttgaactcctgccctcaaggcgatcctcctacctgggcctctgtattagttttcacattgctataaagaaatagctgaggccgggcgcagtggctcacgcctgtaatcctagcactttgggagaccgaggtgggtggatcgtgaggtcaggagatcgagaccatcttcggcaacatggtgaaaccccgtctctactaaaaatacaaaaattagccaggtgttgtggcgcgcgcctatagtcccaactacttgggaggctaaggcaggagaatcgcttgaacccgggaggcagagcttgtggtgagccaagattgtgccactgcactcagcctggtggcagagcaacactccatctcaaaaaaaaaaaaaaaaaaaaaaaagaaagaaatacctgagacttggtaatttatagataaagaggtttaattggctcatagttttacaggctgtacaggaagcatgatgctggcatctgctcagcttctgggaggcctcaggaaacttacattcatggtggaaggcaaagaacaagccaacacgtcacatagagcaggaggaagggggagggggaggtgctacacacttttaaacaaccagatctcatgagaactcactattgtgatgacagcatcaagagtggatggtgttaaaccgtgagaaaccacccccactattacctccccccaggccccacctccaacgttgggtattgtaattcaacatgagatttaggtggggacacagatccaaaccatatcattcctcttctggcccctcccaaatctccatttccttatcacatttcaaagtagaatcatactttcccagtagtccctcaaagtcttaactcatttccggcattaaatcagaagtccaaagtctcatctgagccaaggctagtcctttccacctgtgaggctgtaaaatgaaaaacaagttagttactcccaagattcaatggggttataggcattgggtaaatactcccattccaaaagggaaaaatcggccaaaagaaaggggctgtaggcacatgcaagcctgaaacccagcagggcagtcattaaatcttaaagctccaaaataatctcttttgacttcatgtcccacacccagggcacactgatgcaaggggtgggcacccaaggccttggacagctctgccctgtggcgttgcagggctcagcccctgtggctgctctcaagggctggtattgtgtgcctgtggcttttccaggctgagagtgcaagctcttggtggatttatcattctggggcctgaaggacagtggccctcttctcacagctccactaggcagtgctcttgtggaggcaccgatactacatttctcctcctcactgccctattagaggttcttcatgaggactctgcccctgcatcagggttctgctttgactaccaggcttttccatacatcctctgaattctaggcagagactctcaagcttcagctgttgcattctgtgcacctgcaggcttaacatcatgtggaaactgctatggcttatagcttgcaccttgtgggcctcaaaagggcccagcagcctgagctttacctgggcccttttgagtcacagctggagctggagtgtctgggatgcagggagcagtgtcctgaggttgtgcagggcagcagggccctaggcctggccaaggaaaccatttttccctcctatgcgttggtcctgtgatgggaatggctgctgcaaaggtctctgaaatgccttcaaggccttttccccattgtcttggctatcagcacttgcctttctggtagttatgcaaatttctgcggtgagtttgaattcctctcctgaaaatgggcttttctttattgccacatggccaggatgcaaattttctaaacttttatgtcctgcttaccttttaaatataagttccagtttcaggtcatttctttgcgtatgcatatgagcataggttgttagaaacagccaggccacatcttgaagactttgctgcttagaaatttcttccactggataccctaaatcatccatctcaagttccaagttccacagatccctagagcaggggcacagtgcagccaggctgtttgctaagacatagcaaaagtgacttttactccacttcccagtagttcctcatttccatctgagacctcctcagcctggccttcactctccgtatcactgccagtattttggtcacaaccgttcaaccagtctctaggaaattccaaactttccctcatcttcctatcttctgagccctccacactcttctgacctctgtctgttacccacttccaaagctgcacccacattttaaggtgtttttatagcaatgccc

SEQ ID NO: 1885071 - DNA, 4001 bp, Homo sapiens
cattaaggactgtttcagaagtaaatgcattagttttgaagcttgaatcagattattctaaattcatctgaatttcaaatcttcgtatttgtaaaattaagttgttcaatgacacaatctctaaaatctcgttttgtactgaaattacagaatctttagagaacagtactttattttttcccttccttaagccccttgtacttcaagaatttcatattgtttatactccagcttagagccccctattgtccttcctagcagctgtattaatcccttcagctgttaaaatcaaacaggtgggaagaaactttatgctttcaactataagcaactctactgtaactccaaaaagggacaggaattgcccttaaataacaaatgaaatttaaaaaaaaccaaaaaggtgagaatgaaaattacagcctgaagatttccttcatttaacgctgcacaactgactcagaaaggctatcattttaagaacttttcattacctcctcctaagttttctacagagatatgttttaaccagaatttaaaattagccttcacagtcgttaatttcgacgctgaggataaaaggatttatttcaatcctgggtttcacacaatgatgcaggaactattccagcacactagaagtatctcagcaccaccaacccataaacaagttatccgacctaggacgactctggggcccagtaggacacatttaccaccagcacacatctcatccagacatgtgataaaggcacaatgccaagctctgctaactaaaaccttgatgcaacttgctggctggagtttcacaaatgctccgggctccttggcctgtgtcatctagttccaataggtaagaatcactgagcccattccctgctgagttttcctatgtgaggtgggggttccacaggagagcttcttttgaggcgacaggcataacatagaaagcaagctagggtacttttaacgtccacgaatcttaaaaatattatttttactccaaatccctaaagaagtatctccaggatagtaattttacggtctatcctccttggtaaagctgcaaccccatcctcctaaaaagtgtatttccccttggtcattttgcccaccaaatggctttagggttaattttaattaatggcaaggagggtagggaaacctacctgtctcagcctggggctgcggcaactcctgctctgtagcagggacggtttctgtggcttcgccgggcatttctgaaggaagggaataaaaaggaggcctaaattgattgggatacattcacttgcccaacccggagataagtattcttaaaaactccgaggagggctgttagaaaaaaatcgtgagggtgtttggtgacaaccttccccaaagcacctgggaataagaggtaaatatgatgtgaccctcacgcctctatcaaggccagcaattcccactgcattctcaacccgagggagaggatcccgggctggctctcgatcatgggagacttcagacgctactgtgaaccccctccactcctaatactcacactggctgggctggggcctcctggactacgtttgccgactttggggtaccaggaggggaaagacggtgttttaagtccaacacttgcttgtcacagggagaacggtgttacaggttctaaggctgtgaccccttacccttttctggatcctgtgaagcagttcccaaaacaagacgcactcctcttccgccctcaacactgcaactgctcccatctctgcaggctcggattctgggcccgccccgcagcccttctaccctgcttttgccaggacaccaaccgcagaccccattttgtccggaggcccaggggcgagtaggaaccctgtggcccagtaaagcctccaactctccttaactctcagtccccggggcggcttagcccgaaagaaaggcggatggctgcggatagacagtagcggcacagaaagtacttactgtgcagggaacgcggaaccaagatggcggcagaaagaccgagcgagagcgtgacccacgcctgttgcagaaggaagcctggagcggagggggtgggactaggatccgattccgggtcaagagctgccggcagccacttcctttgacgagtgactgtcaggccgttcccacggcgggggtggtgacaaggactaaagggtaagaatttagaacgggacgcgcaggcctagcaggagctctctgcgcggacccacgcagtcctcagaactaagcagactccgccctccggtccgcgaagtggcgactgcggtattaagtcgacctcgcgatttctcaaatagtgcaggaagaagacattaaatagcgaatgctagagactgcattcacaacattggagggtggaagtgacttaggctaaccagttatttttggaacacacgatgtgaaaacatttaaaagctgctggaccctctccccccccatcaacaacaacaaaaaaacccattttaaaacttgagagatgtgatgggtcacatataacttcagttcagattataaatttaattcgatttttcttgttctgttcaatgactagagagactcaaacgatgtcaccagatgacagcaactcatgcgtgttaaactcttcgtaaaacaatgttagctgtacccccgccccccccccaaaaaaaacacttcttgtaaccaaattctgtaattatgttccaaccttgtatggataacgtaatccagctaaaaactcctctgtctccctaaataaatgaaatcgtaacttctctacttctgaaggctgactccattctttggaggttttctggttggtccatcctcacactgcccttgaataaactctttaaatagattccggcccttttgattgttttaggttcacgacaatttagccgatgttgaaattataaagctgcagattctccttcccagaaaaaaagaacataggcacatatacaattcctttgcttgctattttgggcacttcttggatttttttttttttttttttgagtcgctctgtcggccaggctagagtgcagtggcacgatctcggctcactgcaatctccgcctccagggctcaagcagttgtcccgcctcagcctcccgagtagctgggattacaggtgtgtgccaccacccccggctaattttttatttttagtagagacgggtttcaccatgttggccaggctggtcttgaactcctgacctcaggtaatccgcctgcctcggcctcccaaactactgggattacaggcgtgagccaccatgcccagcctgtttgttttgtttttgggacagtctcacttttattgcccaggctggggtgcaaaggcacgatctcggctcactgcaacctccccttcccgggtcaagcgattctcctgcctcagcctcccgggtagctgggattacaggcatgcgccaccacgccagtctattttttgtatttttagtagagacgggctttctccatgttggccaggctggtctcctcctgacttcaggtgatccgcctgcctcggcctcccaaagtgctgggattacaggcgtgaactaccgcccctggcacttcttggatattctaagcttatttattctaggtgtctgggaccccaccttaaaccatgctttgtacaactgtatttttgaaaagtagaatgtaaaatcagtgttgtgttaatgaaaagcctcccatatcttcccacagccctacaaaagaactcaacaaatatttgctgtacctgaattagctaaaccagtcaacatttatttattttttgaggcggagtctcgctctgtcgcccaggctggagtgcagtggcgcgatctcggcttactgcaacctcggcctcccgggttcaagcgattctcgtctcagcctccagagtagctgggattataggtacccgcctccccgcccggactcctgaccgtaggttatccgcctgcctcagcctcccaaagtgctgggattacaggtgt

SEQ ID NO: 1885072 - DNA, 4001 bp, Homo sapiens; identical to SEQ ID NO: 916544

SEQ ID NO: 1885073 - DNA, 4001 bp, Homo sapiens
agctgggtgaaaccgggtacaatcaagagaggaagttcccaccctctcccccagcaaagggaggggggaatgtcccctgggcccagccccctgcctgtgccaggtgcagtaacagacacactacacacacgcctcagggccctggacaaccctccctcctagggggtggagtggggggagctgagggggccctgaggtgagaagtccctggctcagcaaggccagtgtggtgccgctgcccaggattagtgccaaatcctgggctgctgggcagggatcacacgttgtcgttagcttcgcagctgcttagctgcacctgcccacaccctcccgctgcccctcacaggcactcagcctgactcctttctcggatggaaactgggaccctgccctaccccagataagcaggggaggggctccagaatcgggggagggggggcaagagaggccaaagtcacccctgacaaacactcccacccacagaaacccccagggctcctaggtacaaagctgaacagagggaaggaacagagaaggcctctccagcccctgtggctctgtcccaggtggctttcgcctgtagttaccttgtcctcaggccatccaggcccttccctccagatggctcctgtccttggagagacagagggagacacccagacagagcccccacagctggaaatcctcagccccacttcccggagcagcgctcccgaggccccccagctgcggggaaccctgccatccacaccccccaacacacaccacacaaagctccttgctctgggctacatctactcccccacccttcaccaccccctccccacgacctgagcagggtccagggaagggccttccacacacctccccattccccagggccacccaggcccctggatctgccctcaaacatgaccacactcccctccctgtctcaagagggaggccaggcaaggaatctccctcaagcaccctcccagggaaaagccttcaggaagctgaggccaaaggctggagccgcctgcctgtctcctcagccccgtggagtgggcagtgctggggcccgcagagttgggcctaggacctataggggctggggcagatgcagaccatggaggtgagggtgggggctagggaagaagcccccaaagcacactgtggcctccagactctctcctctgtcatcctcctgcctccacaaccaccccacagttacacagcagcctctgttcgtagaaaaagaacataaggctggaacacttaagatgggaggagggggccagagctgcaggagacacaatccggggcggggcggcctcctcctgatcccgcacacctgggtgggctgcagccccaccggccgtggacttacagagctgggaacctgagtcgctgaagagcgactcattctccaaagacaggtgccttgccgcgccccaagaagcctcctcagtaaggaagctactgtagccccccgaacccccgcgcccacactcctgctaccctccctctcacctgtgtggggcgcgccgcttcgggtaaggggtcgggaccgcagcagccgtcgggcatgctccggaccgctcggagtcaggggctgcctggaggccgcgaccaccgagcgcagccgggcgcctaggagtcgtcgtcgccgtcctctccgctggcactgcccggctcgggctcgcgggacgcgcgctgctcgcgggtcagcagcgctgtcaggccctgggcgcggaggaggaggccgccgcccaggaacaggaccccgcaaagcaccagcagggacagcacgccgagcaccaccgcctgcaccgcgcgcggcccctcggggggctccggcggcgacgccgactggttacagcaggagctcagccaggcggcctgagccgcggcgcccgcctgagagccgttcatgctccagcgccggctgcccagatgtggcgggatcgccagatgtgcaggagcccagactggcgggcgggccggcggctgcgtcggggagggaaccaaggggcggaccccaggcgccctacgcccctaccccttgcgcagagcgctcgggcacttcctagacaaagagctccagccgttgtggctacggccctttctccataggcccggactccgggcctgctgtatttcttctcatccccaaggcccacaggcacccccatgcaagtccagtcagccaaaaccaggagccctgtccccaagagtccctccccttcgcaaagtgggccaagaggtacacctgggcagagccctgagaagatcctcagaccccatcccagctgcaggctggggtgctgcccctctgagcaggacacaagacaaaggtgattgtccccattcttgggctttttatccctagaccaaagttctatgctgctaggtggcccaggtggctgctgagccaggaggcacacgggcagccataagggtgagtgagtcccacccttcctcgtccatcatccccttcagaagcctcctagggctggacaagcaggccaatgcctcctccacactccacagcagggagacattcaggtacagcagagcagagcagagcatggggaatttaaggcccacccccactccttttctcaggccccataggccaaggagagtcacatttacagaccaatgggagagcacagatttgatccaccaggactgcagtcctgaccctggataaattagtcccccacttcagaaaatcgcaatgccataagggaagggaatgttactgtcccatctactagggtagcccattgccagctaggtgtcccacagccaagccagggtgggagagtggagcagagtccagctgcagaaaagcagaaagactggaaaagtggacagagaagcaagaccctcctgccaggtctaccaaaaaattctgtagcaagccttgagtcctcttctaaaaaataaagtcactgccagtcaaccacctgtaccagtcccctcagaagggattagattagctgatggctgtctggtaggaaaacaggaagagtccccagactgcagcaggccaagtggggggtcacatgctatcaaggacttgctagaaattggccttcttcaactataaacccccctcctgagtcctccaactctctgatgccccagagatcaagagtagaaacatcacgtggccaagggtgactcggaatgggaaaagcgcattccaagtgcaaacacttcctggtcatcctgactacctaccctgctccaggaccatggacaagaccccccactcccaccccatttctccctcagcatccctccctacacacaattcatttagtctggttagaactggcccagaagcagccaaaaagcattgtaaaacatggactgtattgatgagagcatagcacacaatgggggcttgagtatgggggtacagaaatgaatgtgagttaccgaggcaatggcaagggccagcccaagctggaagaagtgtcaccagatgccggatagtctcaagctggccaatgtgtctccagacatgacccacatcaaatgacctttctggtgcacatggggatctatgtgctctatgaagacagagaagatactctctggggccatggtgaagcaagaccagacaacataaaggccagggatgtcacagcttccttagaaaaggtggagataacacaggaacagaaaaccaaatacatgttctcacttataagtgggagctacatgatgagaacacaaggacacacagcggggaacaatgcacactggagctttttggaggatgggaagagggagaggatcagaaaaataactaatgggtactaggcttaatacctgagtgataaaataatctgcaaaagtttacaaaaaaaaaaaaaaagcaaagtgagtttggaggtgttgaaatagggagtcgattgctgggggggaaaagggaggaacagctcagtcacatccaaaagcaacagaccctcaccctacaatgcaccttccttcacgagact

SEQ ID NO: 1885074 - DNA, 4001 bp, Homo sapiens
tgacaatgtcagagtgagcaggttgaaagagtagaaggcatggccataaagcacagcctctcaaggagggattccagagaggctgcagctctgagccagggcaggtggacacccagaggagccgtgggcgtgggcgtgcggctgcagcctcggcctcttggcaggactcacagaagcctcgtggaagtcagctgcggctgggaagggcagcctggcagctgtggagcaggatgaggatcctttttgcgtgtttgttttatttttttattgtcttattatgcctaggtgagacatgtgcctgggatagcattcatacagcatgaaagagtatattctaataagtctgttcttcaccctgcagtgggctcgcagaaccagaggcaaccacatcaccatcttcctctgtgtggagcttttcttggagcctgaggggtagtggtggttgcagctcagatgggcagaaggcttccccacttcttccttccaaggtcccaggctgcaggtcccctctcagcaccccagaactgctcagggtatggaggcccctggccaacccctcagtttctgaaatcctctcttcctcaactgccaagagagcccactcctcgggctccctcccccatccctgagcactccttgtctgctcctgcctttaagtggtggtccaacagggctgcgtcctgcatcccctgccttctcgcctcattctgatgcattcctgcagctttactttccacctccagcagcatcagggctcagaactctctctcctgaactccagtcctatatactcattgtccacctgacagcttgcctccaactcaaggagccacagctgagctcatcagccgcctgtctgcccatggccccatcagcagcggacatgagttatctcatggccacccagcatctgttcaccccaagactgaacaggcccagatttggtgcacagacagccctctgctttggaccctgtggtctgtggtgttccttccacctctaccccaacccaagtacagcatgttaccaaaatctagaacattccatactctcagcgtagtactgtttcagggttagcacagagtcaaacaggcccaatagcagcaaaccccagggtttggcccaagtgacatgtgagaagacctccctctttcctgatagctttgaacctgagaggcttaaagccaatgtcctgcctcacatggaggccgggaacgcacaccatcaacactcacagtgcattttcttggcatgaggtatgtgccaagcaccctaaatgtgtggatctcacttcatcctaacaaaacatggcacgagctaggccctatttttccccaccctaaagaggagggaattgagccacagagaggttcagggccttgtcaggccatgcagctaataactacggtgccagaattcaaatccagaccatgtgattccagagtccttgctctcaaccaccaggctctactgccagaagccgacacaggcaagcagagctacgagaggaggggaaactgaggcctgctcccaccatggagccctgaatcatgctgggcctgtggccagaaccacccttagacttttcagttacatgggacaatacgctcccttctgcctgagccaaatatagtttgggttttctataaattcagaccaaaaaagttctaactgataacacatcctctcagtgggtggcaccaccgcacacacagtattcaggctggaaaccagaacatcgtcctcccctcctccctctccctcatccctcacatccaaccagtgaccaaagctggtgtctcagccctggccctcttcttacccctggtccaggcgactatcatttttgttgggttttgacaacagcctccttgcctcctctctacttccagcctgctatccccaccacagacttacccccaagttctttaagatccagatcttaacatgtcacttcccgtatgaaaccttccagacacctcactgctcctggggtaagctccaactcctgcccagtctggccctacccaccaccctggtcacacctccctcatccgccctgccccagcccccctgcttccgaagctcgctgcttcacacctccaaatctctgcctgaaatgctcttgccctcttcttgccaggtaaatgcccagtggtgatgccacttcctctgtgagttgtgctttgctaatcccagcagagctctcattctctgctctcggctctttcactctgggctcttttcattgtctactttaacttcagttttgtgagcaccactgtttactagaatgtgagctcttcaggggcaggggttctgtcttgtttttttgtggtttttgtttgtttttttttgtttgtttttttttttgtggttgatgttgttgttgttttgagatggagtcttgctttgtcacccaggctggagtgtagtggcacgatcgcggctcactgcaacctctgcctcctggattcaagcaattctccccattataggcatgcaccgccacatccagctaatttttgtatttttagtagagacggggtttcaccatgttggccaggctggtctcaaactcctgacctcgtgatccacctgcctcggcctcccaaagtgctggcattacaggcatgagccactgcacccagccctgtcttgtttatctcctcatccccacgtcccagagtatgcctggcacagagcggtcactcagtaaatactcatggaaaagagaataaaatgagtgttcccaggaatagagggctggttctatacctcttctctcctctcctcttctcttctctcctctcttcttctcttctctcctctcctcttctcttcttctcctctctaggaatggtcaggttcagggaaaataatgatgccacaggatgattactatgcagaaagacttttttcaataaataagcatgttacctatttgatcaatgacaaacctatgatattgtcacctacattttataaactaagagactgaggtttaggaaagttttgcaatctagaattccatgcacatgctcacgatacccactcccatctcaaagccgaggctcaggctggactctgatgagacagaccccaacagtgactggttgaatgaagcggtgctcttgcccacactggccacaggggggcagccgagtgctggcgtgagggtggctttctgcccccacttcacacccaccctcggaagatgtggatctgaaggtgcaaggggaaaagccaccactgaggagaggccaggggacaggggctggggttgctatatctgctagaaataggtaaaactggaggggagtcggggaacaaaccactaattcctagagtcaaaggctggagacagatcatagacctgaagcttgcatcaccagcatatttaataacaggccacagaaagcgatgcagcattcctggattgagggggtgctgcaggcctgcaaatgagaggcactgacttgcagcaggggccggtcactgtcagaccgttgctgcctcacaccagacagtacaggcgctgcactcatgtcctcagaggccagaaggcagggggcacagccagcacctgctgcaccaggcatccaggatgtgtggccacttcagtgcccaggacatgcagcaggcctcaagcgggctgggagtgcaggtctcccaggtccaggcccacaccgagcacttccagaggtccagtggagcagttcagaggcagcagctgggtgcaaggatcccaggttgaggtctcaccacaagccaggtatctcccagtctgtcatctgcagcaagaatgggctgaaggtggcaggggatccccagagtggcagcaggagagcaggctctcttgctggcagacgatgtggggctcaggaatctgtagagagagccacccccgtctttgctgcagagggagctgcactatgtggagactgaggaatggactccataaacctctcacaggctttcccagcttagggaaaatctca

SEQ ID NO: 1885075 - DNA, 4001 bp, Homo sapiens
acaacacccaatgccgctgggggtagaaacactcctgtgatattgttcttaatatccagggggaacaggatgctattactgcaaatactgcagaggatatacacccatctgtgatatagttggtaatttccagaggcggagaagacattactgacaataacgtaaacacgctatgggaccaccgtggatcataatatccagcgggggagaggggggtgatattactccccgaatcgcggggggcgcccgcccccctgcgatgtggatcgtaatatccagtgggggagaggggggagatgttactccccgcatcgcggggggcgcccgaccccctgcgatgtggattgtaatatccagcggtggggagaccaaggagcgtggatcacttgagcccaggagttcaagaacagcctgggcaacatagcgacaccccatttctacaaaaaaaaaattttaattaagtgggtgtgatggcacatgcctgtagtcccagatactccagaggctgaggcaggaggatcgcttgagcccagaaggcagaggttgcagtgagcggagatcacaccactgcactccagcctaggcgacagagtaagattccatctcaaaaaaaaaaaaaaaacagggggcaggggtgtaggggtgggcagtctatgttccctctccttgaatctggactggccttgtgacctgctttgaccattggtcatattatagcagaagttcatcagctaacttcttgggacctagcaccatgtgaagacgctcaagctagactttaaaatgagagacccagaggagagacagaagctccactaaatccaaagaacacctagactgatcaacaacagaggaagcaaggacagcaaagggcgctgcagaggccaagaggtgagagcacagcaggagggaggagcaatgaatggtcagccacaagtgcatttggaggccaagccatagcttgaccaacatcccagggggtacagaggcgcaggttacctggatgtgcatggaagagtttccctctttgagtgagccttaatccaacaagaacaaagctttgtgttggccgggcacagtggctcaggcctgtaatcctagcactttgggaggccaaggcaggtagatcacctgaggtcaggagttcgagaccagcctggcaaacatgatgaaaccctgtctctactaaaaatacagaccaaaaaaattagctggccatggtggcacacgcctgtagtcccagctactcgggaggctgaagcagaattgcttgaacccaggaggcagaggttgcagtgaactgagactgtgctgccactgcactccagcctgggtgacagagaaagatgccgtctcaaaaaaaaaaaaaaaatcaaaaacttcataggaattgttcaagttagatttttctttttttctttttcttttttttttttccggagatggagtcttgctctgtcacccaggctggagtgcagtggtgcaatctcagctcactgcaacctacgccttccaagttcaagcaattctcgtgcctcagcctcccgagtagctgggattagaggcacccactaccacacccggctaattcttctattttttgtagagacagggtttcaccatgttggccaggctgttctcaaaattctgacctcaggtgatccacctgcctcggcctcccaaagtgctgggattacaggcgtgagccaccgcgccccacccggccagatttttccaaaagggttgcttttgttgaatgataatccaattgaataaagaatctgtccatttctattatgttagtccagcaatagagccgacctgacagtcttcagccataaccacagaagccagcattacaacccagaagctaaagttccaaatgtataacatgataaaaacatatcaagataagcttgattaatttagtaaaacattaccagtctctcggccaatacagccaacttcccagcagagacagcaagtcaggcctttaggctccctgggtttggccccgaatccccatacctcagccaacggcgcagcctactgaccccagtctctgggtcagttcattttagacaacagggttgccgggctgccacagagatcagcaaacaaaatagtccacctgcaaggaacaggccttccttgtgacaaccgtgctacaggaaaaccagccaagttgccggaaccacagagtacaacaaagtttgggtaaaatagttgtggcaaaaatgaaattctggggctacatttccatcctgtatgaaactattgaacatccttggtcaacactctctgtagagatttgttttatgtaagttgtagttccaaaatgtgtggggttttttgtttgttgttgttgttgttgagacagggtctcgctctgtcgctaggctggagtgcagtggtgagatctcagctcactacacccactgcctcccgggttcaagcgattctcctgcctcaacctctcgagtagctgggactacagctgtgcaccaccgcaccacaccaatctaattttttctttattttttttgtattgtagtagagacggggtttcaccgtgttagccaggatggtctcgatatcctgacctcgtgatctgcccgcctcgacctaccaaagtgctgggattacaggcatgagccgccatgcccagcccaaaatgtgttttttctaaatcactctttaaaagagttttttaaaaaactactttactaaaaaaaagtaaatttaaatttagtaacatggcattacaatccttgggaataaaattaattttatgctgttgtcctgacaaagcaaaggaaatgcatctgaagtggcatggtttggtttggttttgtttttttctaaaattgttctactcttccaaagggaaggttttagaatgtttcccaaagcatgaatgttggaatggtggtcccatgagatgctcctctaaaaaaagaaggaggtgaaagaattatttggccaaatctgctttgaaatcctctcccttttagattcatcctaatattggcataggaatgcctctttaaagaactacaataaagaagcctgtttatctttgcttaacacagaatcctcaagttattaaccacccttttttcaagtaacacccataaaagtcccttggcgctagaggaccttggaacccactgaaagaaacaccgccttggtctctgggggaggagaagtgggacataactccctgctttctgacaaatggttttgaaatattcatcatttctctcaaatgacaaaggatgaaatattgtttctacttttaattcatttcccctacaattcttgtaacgtttggtttgtaacaaagacattttaaacaaaaagatacattcaaaattgggaaccagcaggcagcaaagggttccattcaccagccacctgtgcctttgaagtggttgagtctgttcccaatgttttcatagcctttggaacgccctcccaggtacaagagcatgccgttcaaattttcaaccaattacgtggccgtgtcactctccactccgcctgcacgctgggagaaaacgcaaatccatgaaggtggtatttaaagaattgacagccttgaaaacattttggaattatttgatttcctcacaaaacttcattattgctaaatccaaaagatgagcctgacaatatctgtaagtctaccaactgccctccttaaactttgttgttaacacttccctaaatcttctgttcacgccagcagcatatcatatgaccaactccaatgtgcctccgttagattctgggacatttctgggagttcatacatttttgtttgagaaagttaaggagctatcatacatctacagttccgccctcctccccactctatgatcaaaggaaaaatttaaggggcagttccacttgttcaataacgttcaataacatatttctccatggtcctccatgtgcagtgcaaaacagcagaaatccccatcctaacagagctggca

SEQ ID NO: 1885076 - DNA, 4001 bp, Homo sapiens
aaacaaaatgcacaaaacatatagaaaaatggtgtctgaaaacgtccaagtatgaacacactagtatattaccttttgcaatttcttccctcccacttcctctaaaccattgaacaagtatagacattactatactgctcacaaaggtggcttcacaattcaatttccagaagtatttcctatgaattttagcaaaaagatatttacaaagtggtattttactacctctacatttaacatacattgggcacttctaaacatctagatagactagatgtttcaagtaaggagttaatttgtctactatgtatacagcagtcttgaataaactgcaaacatgtaaaaacagttataatttgaaagagtcttccaaatgtgaacattctggcctagaacccttcccatttccatcaacccagaatacatcaaattttcagaagacaatctttcctaggacttgtaaaacaaaatgtacaaaatatattagtttactaactctacttttgtcatacactggcaacctctttaacatccagaaagactagatgttgtcaattaggattcgtctgtcctttatgtacactatatacacagataagtaaaacaaaacgcacagagataatgattcatcttgcctcgctgtaaacaggatgtcatagagctctctgcacctccccctcctctctcttcccctgaaccacactgcacaatgagcattactcaacaggtgatttggccattccccccaaaaaacatttcctatgatttgtaacaaaaaggtatttacaaaatgtgattttgctacctctaattttaacatatcaggcacttcagaacatctaaaaagaatagacatttcaaaaaagcttagcattgtcaactatatacacagtagtgaagaataaaatgcacacaaaacaatggatagaatatgaaaatgtcttctaaatatgaccagtctagcacagaaccttcttctcttccttctcaggtcttccacctccatgtcatctaacccacttaacaaacgtggacgtatcgcttccagaggccgtcttaacaactccatttctaaaagtcatctccagaagacatgtgttttctatgatttcttttaaacaaatgagaatttacaagatgtgtgactttctattttatcatatgtcggcaacctctttccatctagaagggctagatgtgacaaatgttttctattaaaaggttggggtgaagttgagagcagctttttcatattatatacacaggccttacataaacggccagtaaatcttcccagagggtggtgggcatttccaacgggccaaacgtggcctgtcattctaccatttctctcttctgacagcaaagtctggtagaacaaagaccaaccgcccgatagccgctaaccgttccacccgtcgtctttcgggacttcactcaccttccaggcccctgaaggcctttgtccgttgtcgtcaggactaggtcggtctcgcccaatggcgacagagtggtcacccgggaaccggatctgcgcggctccgtggcctaaagaggtggccgagcctgcttgcgtccctaggccgccttcccgggccctccacgccttaatggcctccgccgcgcggcgttcaagcggccgccatactttccggcccaccacgcccggcgccgcccaaaggcgctgcgtcccagcgactctgcgggggtttcgtcgaggcccggcaggcttgggtcgggagacgcggcggccggcggggtcccgtcggggagacgcagccgccgccatcagtcatccaggtggggtgggaaagagaggttcgctgcggcttcaaggcctgggcacagccagtgggcagccacagcagaggcctccggtatctgcagggcagaggcctcggcctgtcccggggccccccagttcacccgccggcccgggtccggagggcctggagggccctggaggagctggctgcgttctgcgtctctccgcgctctctgccagaccggaactgaagttagatttttgtatcaggaaatataaaaatatcttctgctctgctcagttgaatgttcatttttttctcatagcatcatgtttttttccttttctttataattaagacagttcatcatgtacataaaaatcacatacatgaaggcacacacatacacaaatgtacttgtcttagatattctcttaggttcagttgggtttattaatatataaatattaacaggtaaaaataaagtagtaattgttacaaggattgttataaggcctgtcactctggaaggccacatttgtgtctccaaagtccagcacaacattttaaagaaggatgaatttgaaagtcattggatgagacaagtatgctatcttcatgacccctgaaaacatttgagtttcacaggtgataagatttgtcagcatttctgagtatttatttgtgtcatattattgaaattaaaatttgaccatagcatgtgaattaaataggttaccactttttaatgtaatagagaacaataaaatatttatattatgtcttaggcacttagttttaaaacctcacccacttttagcatacaattatgcttttaaaaggtttaagaaatataaaaagagctgaaatgacttaaaatatagattatagaaaatactaatagatgaaataaatacatttatgatgaaaagaagaacagataatattgatgaaagaatatttggaaatggaaagtaaaacactaaattagaatgttgtaatcaatatagataagtatttgaaatgaaaaacgtatttcagctgagtatttttgcactgaaagatattgggcctacggtacaatatgttaaatacatatagtaatatattattgataattattaagactatgtactaacacctatcaagataaataacaccagccatatatttttggggagtttatttattggatccctttttacccacaatatatagtacaaattccatgagggtaagagtgtctgctttgtcactatgacaaagtacttggtacttagcacatcatttgtcatattaaaggtgcttaatgaaatgaatatttgttacaagagtggccagactgcaagttcagttgacagatctgtggttcatttgagcctattaatcctattaaaatattgcacaaacaatgctttatagatagaagtgattaccttgctgaaacagaggtatcagatggcacagactgtgcatggactgaaagtatttattcatcagctgattatgaaatctaaacttgtcatgtgaaaaagtgatataagacttttaaggtcaggcgccatggctcactcctataatcccagcatttgggaggccaaggtgggtggattatttgaggtcaggagttcgaaaccagcctgatcaatacggtgaaaccccgcctctactaaaagtacaaaaattagcctgatggggtggtgggtgcctgtactcccagctacttgggaggctgaggcgggagaatcgcttgaacccaggaggtgaaggtgaaggttgcagtgagccgagattgtgtcactgcactccagcctgggggacagagtgagactctgtcaaaaaaaaaagactttcaagtcccaacttggcatatgaaaaaaaaaatgatttgaaagagtaaactacaatgtttgaaaatgtaaatttaaaatcagactatatcactgaggatcacctgtggttgaagcaagtgataatgaaggcctggtgtatagcatgagatcgggaatagcctcatgaataaaactgatgggtcactgggattggcagctagagaaaaggtggaggagacacaaaaattctaacctggttaagtttgaggttaatggtgccattgacttttctaggcacagaggagaagaaatagatttggagataaattatgaaatccacttgggtactgggcacggtggcttacacctgtaatcccaggacttaaggaggccatggtgggga

SEQ ID NO: 1885077 - DNA, 4001 bp, Homo sapiens; identical to SEQ ID NO: 916612

SEQ ID NO: 1885078 - DNA, 4001 bp, Homo sapiens
cttcatcatcattatcaatcagcacagagaataagaggcactcaccatcagggaaattcaaatcacaaccacaatgaactaccacttcacacccactagcatggctataataaaaaagacagacaatcagccgggcgtggcggctcatgcctgtaatcccagcactttgggaggccaaggtgggcggatcacttgaggtcaggagtttgagaccagcctggcctacatggcgaaacctcatctctactaaaaatacaaaaattagtgaggagtggtgacgcacacctgtaatcccagctactcatgaggctgaggcaggagaatcgcttgaaccggggaggtggaggttgcagtgagccaagattgcgccactgcactccagcctgggcaacagagcaagacttcatctcaaagacaaaaacaaaatgacaacaacaaaacccaaaaagacagacgataacaagcgttggtgaggatgtggagaaattggatccctcatactctgctgataggaatgtaaaaaactgcagctgctgtgaaattcagctccacattccccccaaaggtgaaacatagttaacatatgacctagcaatttttactcttaggtacatattcgagagaaaggagaatatatatccacataaaaccttgtacacaaatgttcatgtggcattattcatgatagccaaaaaagagaaacaaccccaatgtccatcaatggatgaatggatagaaaaaagtggtctatccatgcaatggagtactactcagccgtaaaaaggaatgaagtatcagccgggtgcaatggctcacgcctgtaatcctgacactttgggaggccgaggcaggcagatcacttgagtccaggagtttgagaccagcctggacaaaatagtgagaccccgtctctttaaaaaaaaaaattgaatgaagtatcaacacatgctacaacatggatgagcattgaaaacacgctaagtgccacaaaggaccacatattatgtgattccatttatatgaaatgtccagaatcggcaaatccatagaggcagaaaggaaattgatgggtgggaaggaggaggaacagtgttggaaatgatggtgaaggagtgtgggattccttttgagtcgattaaaatattctaaaattgattgtggggatggttgcacaactctgggaataatctgaaaatcattaaatggtaccctttaaatgggtcaattgtatggtgtataaattatatctcagtaagtttcttttagaagaaacaaaaaccaaaaagcagggccttcctgacgttggtgaggacctaaagttataacacattttcaagcctggtcctattcctcccaagcatggtgactcagatgccagcatgatcaccaggcgtgccctgagatcctcgcctcctccctggggatccagggtgttgccctgcgctttcctaccttccccaggcacgccctgccctgcgcgccctggcgggcctgaagtagagcagaaaggaatcccgcttgtcctgtggcttctctctgctgcagcctggcaccgtttcctcttgcctgctgctgcttcctccctcccgcccagctggctgtgagagcacgtctcagattcgaaaaccatgtgagattcagaatgtgcacctgaagctgcccgctggggctttctgtgctgtcggccactgcagagatctgggtcctccccagatcccacttaccaaacgtaggaaaagatgatcacgtggaagaaccacttaatggtgccataattcatgctctggatccgagtgactttgttcgtctcatactggaaaacatcactgcagctgcagcaggccggcatggtgacagcctccctccctgcgcggagctggaccagagctctactcttcctgacagggccacagcaagccccctcccagtaactgcaaaatgaaacgtactggtttttagcaggagtctttaacttcaagctcctccaatgactgcagagttggggcgggccctggcagtggccccacatgtggctgtgataaacaagaagcgccaagtcctacgggcctggctggcagatgacctcaccccagctggcctcccccagatgcctacacaaagatggtgttcagaggatgggcatttttagaattctcccttttcccccctttcctttcacttttttggtctcatgtctcttgggagaaaggggcagccttgcaaatgtcacaagactgggagcttccattatgcctcagaaaaggactgagatctttccattgcctgaagccccactcagagattgattcattcatttctacaaccctttattcagcccctgatgtataggagctctgggtaaatgaagatctccccctcttcttccaccgccccttataatactctggtctgcagttggtgggggaaatcagatttgcaggggtaggggtggtgggggtggaggggctttatttttctgccagatctttcatgcttgaccctctgagttactctccaccctcctctgcaccccggcaggtcgatctatgacctagaccaatcagccaaagatcaccagggacacagtggcagtccaacaaagttaggtttgttgacctattcagtgagggacaccacccaccagaagagctacgcacatcaccaaacaaaggaaaacagcaatttattataggattccgaggaaagtggagttgagataaaatctaaatgaagtcatgttttgatggactcaaagcaaaacaggtttgtacaaagcagtcaacttcagtctggattgcaaagaggacccagggccctgtttcctaggaagcaacatagctaagatacatgtcaaatgtgtccagaaaatctttatctgaagctctgctcctgagttgtaaattgaggctgcttctctgtgtcaagatgacttaaatcttccaggcaaaattggaatatttcagtcttagtcatgtaatttcaaacagcaaagtttctgaaggtctctgattttaaaggacaatgtttcagcagtcactcaaagatgcagggttgtattatcactttacagctacagagaattattgttccctgttatctttacagctggcttgatccctttctgttattccagcctgctaagtggccgggtagattttcagtttttcagtctaaactaattgtactttctcacacatacaaactgcatcagggttcccctcaccttctggcttccagttcaggagactggagagcagtgaggatggacgtgactccctggccctgcccttctcagttgcatataggcagggcttctgggcaccactccctcctttagtcctgggagtggtaagggctccccactcttaccagccccaggaagctcactatctcctattgctttttcttaactctgtccacacctttgtaaatggttccatcattagttaccccacttgagtatgccattgctttcctgccgggaatctgagtgatacggtcatcttcatctgtaaaaagaggagattcacaggtaaagcctgatgcttagaacataggctctaggggactaatggcctggcttccgatcctggcttcacatcttaccagctctgtgaccctggacagctctgtttatgctattcattcactcattcccaagagcaccaggaatagtagatatggcagtgaacaggcagacaagtcaaatgtccatcagctgatggatggatacacaaaagcacgaaagcccatacaagggaatattattcagccataaaaaggaatgaaacactgacccatgctccaacatggatgaaccttgaaaacactacgcttaagtgaaagaggccagacacaaaaggatacatcttttacgactccatttataggaaatgtccagaataggcaaatcacttcagtgttgctcttgctaccactcaaagacatctattttcttgtctttctttctttctcttttctttctttcttttttttttttt

SEQ ID NO: 1885079 - DNA, 4001 bp, Homo sapiens; identical to SEQ ID NO: 916613

SEQ ID NO: 1885080 - DNA, 4001 bp, Homo sapiens; identical to SEQ ID NO: 916618

SEQ ID NO: 1885081 - DNA, 4001 bp, Homo sapiens
tgaattctgaaatgttcaggttcctatccctctctgtgtaacataagccccttccccatccctccaaatacttttcaaattgtcatctcagattgaggagttcccaagggcaaacccaacctcccattaccctcatggaaaagagaactgcatgcaaggaagcacagtcccaatgtcaatttaaactatgccctgagataacaaatcacagtataccatggaacatttcccttttagaaacagggtaatctgaaacacagggggaaaggagaagctaatgtgctgaattaaatttcaggggttaaatgttaaaaggcaaacaaggcattaccctgattaaagggctaaaatatgggattgaccttgtgaagaaaacaacttaatactgcaaatgctgaagacccaactcacttctggctacttgggagagaggagtgagacaattttggatgggagagggagcttttcaaaacaagaagtgaaaacaaaacttacatctggctgtggaatggcatactgtccttgaatggtataggcctacaaaaggaggaaaacagttcctattaaaaaccaatcacggacagccacccagtggggggaaaaagacatttcaactagccaggaagccagagttgaactagagaatgggggaggccagagattgaggcagtagatggaatctcacaaatatggtcagacccaaattggccttctttgaaccctaaatatgactttgttccggggaatcctataaaggtagccaagttccctgcaatcaaaggcaaaatatacataactgtttcttaatgaaaatgtgggaagtgagattagcaatgcctcgactgaccaagccccactcttcctccctgtatacaagatagcctaggaggaataatgatctcttccctcaccaccccaacccttctaccaattgtggtgatgtggaagatctctaactgcacaaacctacatggtatgttttaaaacacttccctttctccaacttatttctctatctgcctaaagaccttaagaacactggatgctagctgagtccctaacagtagggagctgatcacaggtaaacaaaaaccactgggttctaattcctgtcttctcccacctcccctccataggcatttgcagctcccactatgccctcctcccccccacaacataacctcccaaaaagggagctgggtcttcagggcaatggggtagggaaaaggaggaaaggaaaagggaacagggagggaggggatggaaggagtggctggttaacaggatgtgaagtttctcacatcacagtggccagtacccccaaaagtacacccaggtgggggtggaaggaaggtgaaaatggggtgggaggagtgggagaggggaagaggggttgaacaaaaaaaaaattaaaaaaaaaaaaaaagttggtgttaccatctggtgggctacgcggcctgggtgaaatgaggttgggggggtcagtccaggtccccgtggacaggtggtgtccacagcaccaaaaatcaccagcgccactggccccccgtgtgttggcagtctcggctgaggcggaaggattgagtgagccttggagactgaacatcccctctcacctctagaggtggtccctccaggtcagggttgaggcacatggacggggtggtgtggggaaagctcgcactgtcgctgcctgtgctgtacctgtcctgtggataaatagaggatttcagtctccagggctgtcaatccggcaccttgtcaccagcatgaaattcacacaaaaaaagttgtttatttttttcctttttcctttaaaaaggagctcagacacaatttgaaacgagctgtaatcagtgaattaaaaaaaaaagttacctagtggcagatttcacactgcacaattgggctattttcaataagaatgaaggggtggggcaacagagctgatgccagctcctggtcagtgtgggattaagttgaacccctacagagcccactttgccacaaaggaacaaaagacacaggtccatctgtggacattgtatatttaaaaaggcctgtgggaacaatccatgacagggccactcatagaagaagctgcaaatttttagacggtggtcatcaactaaataaaggggagggagggagggagggtgggtagggaagcaaagaggtatgaagggggaggtgtgatggggagtggaaaaaaaaggaagtgaaggaagaattttaagtacagaggattgctgccacccagtatgggactctattccaaagggggagtgggagaatccagaagagcaggaacctggagttcctgggaaagaaaaactcctaaggctaaatccttctggcgacactgactctgggcctttgcttatcctgcccaactctgactaactagactgagagccctttgaacaaaccagtttgtacttttctaaaagcaaggtactaaactgactcaaggttaacactgtgacataaccgaccttcctgtgaaacctctcataactacacgacaaactaaacctctaaaaacttgttcatttttatgccaattcaacacaatgtgaaagagatggactcccaagtttatgcttgccctctaaatggctcccagatcaaacgcaggtaagatggaactagttaactaaatatgcttgtaacagaccagccccaagtgggaaaaggtgttttgagcaacgcacttgcttaggcagctaccaaaatcagtcactatttcaacctgaatcccaatgcagttgtccctaggtgtccctacgttattggtgggagattagtcctaggattccccccatagaaacaaatatccatggatattcaagtcttttacataaaatggtatagtacttgcatataacctaagcatatcctcccacatattttaatcatctctaggttacttataatacctaatacaatgtaaatactatgtaaatacttgttatactctattgtttaatgacaaaacaaagcctgtacatgttcagtacagatacaaccacccatttttttccctgaatacttttgatctgaggtaggttgaaggtggaacccacaaagggccaactgtattttaaaacctgatctacctactcctcaaatacaatcagagcataggactaccatggtccttcaatgcttctgtcataataatctaacttcagaatagtccacgtgccaaagatcaagagtttaggttgatgaggaaggagcagagaggccacggtggtgctttggtgttcttactctaacaccaaaggtcacggcaccacagcccaacatgctcaccccccttctattcttgcacactgaactcttaccccagctgatttcagttatgccatgtgggttcaaaccagtgtttatgaggttaagagcctaggggacaacacactggagtttgggagtgaaggggtaggagtaggggaggtgaggtggagggaaggggaagtttgtaggacactcaaattcaggacccccaaattttgagaccaccatccagaatctccttcagaggtccaactctttgctaccttttatttagacctctaaatatcaccccacacacataaaacatggatggggtggggacagggagagaagtagagacagtaagtcaattcaactcttatattctaacccaacccacaagtaagttacctcttccgagtgcctacaaaacttccattgcctgctaaaaattaaggcattcagctttctccagtacaaaaataaaactaaaagccggtcaaactatggccagagtataggtttcagcaagcatgcagagtggcttggtgtgatgctggcaaagttgacatttcaaatataatctctgttcattctagcccacaaatgagaattttcttacctgaccacctgcaaagatgaccggagagctggacggcttgggccggtacgggatggtcacgcccttcgggggggactgggagagagtcagaggggaaaaa

SEQ ID NO: 1885082 - DNA, 4001 bp, Homo sapiens
ttcctccctacttctaggttctttggctgggatacaaattaaattgacataaaacagattaacaggagaaaaaaacatttttggccaggctcggtggctcatgcctgtgatcccagcactttgggaagctgaggtgggaggatcacttgagcccacgagttcaagaccagcctgggcaacatattgagaccaaatctcaattcaaaaaaaaagaaaagaaaaggaaaaaacatttttaattatatgcacacacactggaatcccccaggtaataaaagttgtctgagagcaggactcttcctgatacagatactttgactaatgtagatttcttttataaatataaatttattttacaaaaggacagcttttcagagatactcttgtgtctgcagttgctcagaataatcagctcgaaatatgccaaataactatattttggggtggcatattttttatttttgagatggagtctcgctgttgcccaggctgaggtgcagtggcgcaatctcggcttgctgcaacctacgcctcctgggttgaagcgattctcctgcctcagcctcccaaggacctgggattacgggaacctgggggtggtatattctgatcttctgtagtcatgcactgggaccttctgtagtcatgcattttctctctctcttttttttctgattcattatttccttttctttttcatcttggtatttgtagggaaagtgatattcctctccccgaaatcatattattccagacaaaagaaaacaaatgcctacacttatctaatcaatcagaagaccatctcccccaccctttttttttttttaaagatggagtcttgctcttgtcaccctgactggagtgcaatgggacgattttggctcactgcaacctccgcctcctgggttcaagcgattctcctgcctcagccccccgagtagctgggattacaggggcccaccaccacgcccagctaatttttgtattttcagtagagacggagttgcaccatgttggccaggctggtctcgaactcctgacctcaggtgatccacccgcctcggcctcccaaagtgctgggattacaggcatgagccacagcgccagacgaaccatctcccttttaagcacgctgtccccttgagttacctgctggtttcaagtggaacactaagggaggaagcagaaagttcttatcttgctctgccacatactggatctagctgaggctggggctcaggcctgtggtttcctgtagtgtggactgagccatttttccatcaagacgtcagtggagagatgaagtgaaaggatttaaaagcggtttgtggcctgccatggtggctcacccctataatcccagcactttgggaggccaaggcgggtggatcacctgaggtaaggagttcgagaccagactggccaacatggtgaaacaccatctctactaaaaatacaaaatcagccgggtgtggtggtgggtgcatgtagtcacagctactcggagcctgaagcaggagaatcgcttgaacctgggaggcagaggttgcaatgagccgagaccatgccactgcactccagcctgggcaacaagaccaaaactccgtctcaaaaaaaataaataaataaaaataaaagcggtttgtaaactgtaacaccttgcacagaaacacaagattactactattaaatattatttagaaaagtagagttcttcttaccatttccctgtttctttcttctcacttcctcctttccccttctgaccatcttttcagccgtgaacataccacaccagcaagaacaataagagccaagggtctgaattgtttaatcaaaggaagagtcaaaataagctacacccagattactgagaaaggtgaaatgaaaacaagctcaaaaccaaattccaggaagatgctgtctttgtattgacttaccatttcatgttttcacacatgtcaaagtcttgaagcttcggtcattagtcttccgcttcctaaagcaagaaactaaatgctgacttgtgtcgtttgccccagatgccaccggaaatgtcatcttctccccagacgctggcttgcaagcacagcagcacccagaggctaacctatttcccctatagcccaagctctgagatctcccgtctggtcacaatgatctacaggagaggaagaaagctatctagggacgagatctagaatcaactgagagagatgcttaaaaatcaccagttactttaatgagtaagtacttttcagtttttccattttatctgaaactttaagttggcatttctgaccagcctttcttgagaccatcattttttgggcacttactgtagacaggaatcagcaccctagcctccttcagcccaccccatgtaacactaaagagacaactggtgcttggcaataacaaaaatattagtgattgataaacttgtaaatttattaaaatggacagtgaaagaaaacagccaatttagttgtgaactggagaagggacgtgaggcatctgttgtctgcaatcttgtatgttgtggttgaccacaaaggcttggcatcaggttttacttccagcactacttcttataaaatggatgaccttgggcagattactcaatcttttagccttaatttttaaaagtataaaatggagaaaattagaatatgtagtccaggtgcggtggcccacacccgtaatccaagcactttggaaggctgaggcaggtggattatttgagtctaagttcaagaccagcctggacaacatgatgaaaccctgtctctaaaaaaaactataaaaattagccaggcatggtggcacaggcctgtagtcccagctactagggaggctgaagtgggaggattgattgagcctgcagagttgctgcagtgagccatgatttcgccactgaattccaacttgggcaacagagtgagacaagaaagaaacagagagagagagagagacagagaaagaagaaaaaaaaagaaagaaagaaagaaagaaaaagaaagaaagagaaagaaagaaagaaagaaagaaagaaagaaagaaagaaagaaagaagaaagagaaagagagaaaagaaaaggaaagaaagaaagaaaataatttcttaggttgtttttgtttttgtttttttgtgatggagtctcactctgctgctcaggctggagtgcagtggtgctatctctgctcaccgcaacctccgcctcccaagttcaagcaattcttgtgcctcagcctcccaagtagctgggattacaggcacgcgacaccactcccagctaatttttatatttttactagagacagggtttcaccatgttggccaggctgatcttgaactccagacctcaggtgatccgaccgtcttggcctcccaaagtgttgggattacaggcatgagctaccgcgcccttcttagagttcttaagaagaataaagagataaactggtaaaacatgtaaatactttttggagggtatgctaaataatgccactaaataattaatgttgctaaataataagttaaatgcttcatttaactggaaatctcccttaaccactaagcccactttccagatatgctaaggtggctcagaataacaatagcagcgaacatctgtagagtttacacagcatttcatttgatttccacaattaactctaaggtaggcagtgcagagctgttgacttatttttggagctggaggagaagagagaagcgagagctcggctggacacggcagcagggagaaaaacccctaggtccgttgttggcactgaagtggggaaaaccatggcctggggaaaggcctaatgtgagaagttagtcggtgtgcataggcagtatgacattcatttcaccagcacaagattcttgttcctcagcttccttagtccctggaccttgcttgtcctttcttccgctccaagccgtagagcttgaaactggcaagtcctcagttgcactgccaacaggcaaagca

SEQ ID NO: 1885083 - DNA, 4001 bp, Homo sapiens
agtaaaaatatgcagaatatttcaaggtagaatatattcagttaatcaattcttccattgctagacaccatgatttatgtaaggtatttctgaatatttattacaaaaattttccatctaattttcctgctgttaattgtgtttgaagagccagaaaagctacagaaggtgaaataatacagaaaccgtaaacaatggtaaccaggaaattagggaaacccattacttttaccatatactaaaattgatttttttttttttagaccgagtcttaatctgtggcccaggctggagtgcagtggcacgatctcggctcactgcaacctccgcctcccgggttcacgccattatcctgcctcagcctcccgagtagcggggactacaggcgcccaccaccacgcccggctaattttttgtatttttagtagagacggggtttcaccgtgttagccaggacggtctcgatctcctgacctcgtgatccgcccgcctcggcctcccaaagtgctgggattacaggcgtgcgccaccgcgcccggccccacagctgtttttaatgcagagacccaggcctctacctcagagagtcttgtttccaaaggtctagatggggcccggggagggagattttcataagcacctgtggtaactcagatagaggtggtctacagacaagactttgagaagcactgctctggacacttttacagaatagactcgacaaatccacttggatttgtcggatatgaatctacttggcctttgtcacaaatattattttatgaataacagaatcattagtcctgttatggttaccccaaaactaagatgatggaaaaggaaaattgaaagaacctcacataacagccctgtagagtcggtaagagagattccttaaagtcagtcagaaaggagattcctctggcaattatgtacccttacttcctaacctggccttgtatagacctgtgaaatacctaaatttgtctttgctatctctacccctcaatccactttgtacaatctctccccagctacctgtcgacttcatcctgcacagggtgtacaccaagatgctggacaaagctctcaactcccaactttccctccagcctcagtctacttacttatcaagatgttactcttgaccaagagattgataggttcataatataaatcattataatgcaatactttcccactttcccacttcccaattttctcctaacacaatgccttcatgacccaaagaagccaggcatgtctgcaaacttttttttctttctttttttttttttttttgagatagtctcactctgtcacccaggctggagtgcagtggagcaacctcagcctcagctcactgcaacctccaccccctgggttcaagcgattctcctgcctcagcctcccaggtagctggtattacaggcgcccgccaccacgcccggctcatttttgtatttttagtagagatggagtttcaccatgttggccaggctggtctccaactcctgacctcaggtgatccgcccgcctcggcttcccatagtgctgggattacagacgtgagccaccatgcccggcctgcagaaaacattttaatgggtgattctaatcataggtatttcaggcactggtggcaggccagtggtggggatatttttggtcagatgtgcctttcaatgcctcataaatcaggctgcctaggcagctttgtaattttcccttaggcagtagcagtcctgcacacacaccccattgtaaccctcagaggcttaagaataaggagaaaggtgaacaggaagtaacattgagaaaggaaaacatggagagtggattcacttaccctctctcagaaatgtacattcaagccacagataaaataagagaaatccacacggactccacacttttccttcccattcctgtgaaagagaaataaaatccaggatagcatttttttggttacatatggggagaaaaatcaaggagatgtacacaactcgcatcacagcaaacagaattccttaacatcagaaacactcttacataccaacactctcttacacatggggacttgctgggcagtgaccttcagtgacctagcttttgataccaactgagaatacacaactggatatttttatccgcatgttttctgcctctctgataaatgttatactaaacagtgggaagcaaaaatacagtgaatgcattttttcagaccatatttacaagtacacttaatttgcacgcccccaaattttataggtttcaccaaatgcttcaagagagaagattaagtttaggaacaacctgcctctccaagttttcacttgccccgaggttattatcctaccagaactggctaaggctctttgagaagtagtgtttaaagcctcatattgttcaggcttacatctataatcccagcactttgggaggctgaggcaggaggatcccttgaccctaggagttcaaaactggcctgggtagcatagggagatcccacttaattaatcaaaaaaatttaaaaattagccgggcatggtgccacgcacctatggtcccagctagttgggaggttgaggtaagaggattgcttgagcccggaagatcgtggctgcagtgaaccattattacgccacctaactctaacctgggcaacagagtgagcccctgcctcaaaaaataaaaataaaattaaagttgacttttcgggattcaatagctttatgaaatgtcttttccttttgtaaacacaaaataacacacgtgtaagaacaaaacaacaaataccttaagacatcacgagtaatttgtaatctacagatctgtaaatgaataaataaatgtataaactatcaactttttttaagacagggtgtcgctctatcatcttgattggaatgccgtggcaagatcacagctcactgcagccttgacccccggtggctcaagtgatcctcccacccgagtagttgggactacaggcatttgccaccatgcccggataatttttttttttttaagaagatataggttctccctatgttgcccaaacttaatctataaatttttgtggcaataaacagatgcttccgctttctaactctcccactgaatagatagttcattatgtaaattccttactgaactgacatgatttaaggagagatagggttgggatcagcattttcagagtgtcaaacaccatcacagtcatcatctcaaggaatcctcagaacaactttgaagttgggattattatttcattttacagatgaagaccacgagattaaggggagtaaagtaacttgccataggccagacagctagcaaactagcagagccaaaacctataggtgttaagttaatgaataaacctataggtgctaaatgagcaaatgaagatctacaatccaacaacactatatctgcctgattccacaccctacgctcctgcaactacatcacactgctttaaagctctgagctcccgaacagtgtcatttgttggattgtagatcttcattcgttactttagcacctatttcttgtcagcctcctgtgcgataggaccagttctaggttctggagatatagcagcgcatgacacaaaatccctactctgcattctacactctccattctagtgggggaggtccttcagaagatctctctaataatccccgctctttctctccattgtagggcttcttttgggagtgctcaatgccctaaatggattcagagaagtattttgtttccatcactaaagggaaaattcagaacaagagacctcatcctcttgatcgtattgaatactgttttcccccaggtgacttgaaagcagtcaatgactaaattctccagagtagaaagctgttataattggacaatggccacaaaacaggagtttttgagttacacttaatgcccaggaggaagcagcagaattcttcctcccaccacccattaccgagctgacaaggtcc

SEQ ID NO: 1885084 - DNA, 4001 bp, Homo sapiens
gaagggttagtaaggtgaaggagggtggtatagggcaatatgactcaaatatttggggtggcaccacttccttgaacatcctaatgtggttctcttcccatcataacacaaccaaaattttcatttttggttcattttaattttctaacttgaaggaaaatgtgcaacttttacaatgtcctcgatgtcttcattttaatttttcttcatttaaattttctaacgaaggaaaatgtgcaacttttacaatgtcctcgatgtcttcgttttaatttttcttcattttaattttctaacttgaaggaaaatgtgcaacttttacaatgtcctcgatgtcttcattcattaaatgccattaaacataattgtgactttaattttaattaaataaaaatgagttggagtctccctgtgtggcacaggcttgtcttgaacttttgggctccggtgatcctcccaccttggcctcccaaagtgttgggattacaggcatgagccatggtgcctggaccacaaaattgtgacttgtgtttcacaatttgcacagagatttgatgaacttttaggttctttatcttttctaacaattacattttccccgttatgaaaggtactgcttattctctcttctcatctctccttgacacctaggttaagcttagaagaaaggccaagaggaagagtggggtgctgaggttcccatctgagaggtggcttgttccctccttccccctctcccactgcaccttaaacatagctctaacacagtagaatggcaagttctgtgtacttgtttatctatatggcttagttcttttttaaaaaaattattattgttattattattatttttttttgagacgaatctcgctctgtcgcccaggctggagtagagtggcgcgatctcggctcactgcaagctccgcctcccgggtttacgccattctcctgcgtcagcctcccaagtagctggactacaggcgcccgccaccgtgtccgactaattttttgtatttttagtagagacggggtttcaccgtgttagccaggatggcctcgatatcctgacctcgtgatctgcccgcctcggcctcccaaagtgctgggattacaggcgtgagccacggcgcccggctggcttagttctttttgtctgtggtgaggcatgctcttagctgtctttatatcactggtatctggagtataagatgggcccagccaatgctgagtgaatgaatgaaatgccttttgcctacttcacaatgtcacctagggcacccggtgccaacttcacaatatcacccaaggcataacttttgactacttcacaatgtcacttttaactgaccccacacagaaatggggactccacagaaacgtaggagtgtgtctagtgtcagccccgtctgaatcactctcctgtggtggctccagccaacgaagaggaagcaaaaaggataaaaaatctgagctacagcgcatggatttaggttaaacagcctgggaatgaggggtacgctaatcgctgaggaaaacgcacctgtggaggcctctccagaaacagcagaggatccgagctgcgtgtaggcagggcgcgcatgtcaccctggcccgggcgcctggtccgctgctggagataaatggtcgaccccggagggagaggctagtaggggtgttgatgtgaactgattcgcccaagccttgggccgcaaaactgcgaaagaaagcggcaggcagcctctgcatttcccagaagtgcagctggggaactttcccagaccggcccaggggttgctagagggtcagacgtaaaggatccgcctttcctaggcggggtgggccccaggccaccacgtgaagcgtcctcgcccctcagagcccggagcaggccgggctcaagaaagaggaaagttgaggacgccccacctcggagaggcggcgcccctgagtaggccaggagcctctcttgcaacttctgccaccgcgggccaccgcggccgcctgatcccgcagaggaaggtcgcggccgtggagcgatgacccgcggcggtccgggcgggcgcccggggctgccacagccgccaccgcttctgctgctgctgctgctgctgccgctgttgttagtcaccgcggagccgccgaaacctgcaggtgagcagagcgcgccctgggcggggggcgcccggggaggctcctaggagcctgttagcgcccgtgccccgcgtccggccgagttgacgtccagcgggcgtctggttcctgggtgaactcagagaaacgcgcctccggccggcggtctcgctccagccctgcggctgcgcagcgagggcacttgagaagggcatggcgagtgcgtctgccaactttacaagttttggcccgaattcttggccaacaaatcggttcgctcctgcgccgattcttggcccacagagcctgggctggtcttaaaaactccagccaatgggcatctaaatatatttatccagattgtagggaggtatggttccggcttgccatttgttttgtgttttaaaaatttacattgactttggcttaaaatcacgattgcacgattgtcagtttgatacgtgcctggcagtgggcttaagggccttttggttttgttgttgttgttgagacagagtcgctctctgtgggcgacgctggagtgcaatggtgtgatctcggctcactgcaacttccgcctcccgggttcaagcgattctcctccctcagcttcccaagtagctgggattacaggcgtcagccaccatgcccagctaatttgtgcattattagtagagacgaggtttcaccatgttggacaggctggtctcgaacgcctgactcgggcgatccgcctgcctcggcctcccaaagtgctgggattacaggcatgagccaccgcgcccggcagttttttttttttttttttaatatataatcctaaataggattatattccccattctgcagatgagaaaagtgagattgatcagaagtaattcgcataaagataacacagcaaataagacagagttaggggatgccagagggcattttcttaactacttccctcttggaaaaacaggttttatctctacaggtattcatgcaaatctacatcctttgccaaaattaaattaaattaaattaaaaagccttggatttatgatttccgttcctaaggaggtgaagattatgaactgtaactaagggacttgaaagaattctaaagtaataataagagaattaattttgtcttatttcataatccccttttctgtgctgaccttgtacaagagtagggtggggcttgggggaggatgccccttcctaaatatgtgtactgattcttattacactaccttccatcatcaagagccttcgtttttgagacttgcttagttatcactcttcaatcttaaatctttccagtctgtgggatcagatgtacccacaggctcctgactcgtgattttctgtgttctttgcctaaactatggaggtggccttggtgtctacttctagtctagggagacagctcattcagaggtacctgggggaggctggggagggtcccaaaagtggaggtagcttttgtgtttggaatgctggctaaaatctttattccttttctgtttttttggacgagtgagattaagtgtttttgtaggtggagggggcagcctgaggagtgagacaggcgttgtttttctgaagatggagcactatttattcaagaaggtaccaccttgtaagaaactgcatcttaaacagttcctccaacaggaagctgactccatgcttggaggttctggagccaaggcagaaagtaaggacatttctgagatgaagtgatcctgacagcaccatgcccagcaatctggaaaggattcttacttacctaggtgttaaggacatctggtgatgccacactatttcagcagatgagatctctgtttcctttgtcctacccacattaatctgttttccct

SEQ ID NO: 1885085 - DNA, 4001 bp, Homo sapiens; identical to SEQ ID NO: 916655

SEQ ID NO: 1885086 - DNA, 4001 bp, Homo sapiens
ggaggtggagcttgcagtgagccgagatctagccactgcactacagcctgggtgacagagcgcgactctgtcttaaaaaaaaaaagagagaacatttggttaaagaactatggcagggagttgatgagactttgaattttgaattggtgggggaaaaagtgatctgaaaaaaaaatggattgggacatgtctctggaggtggtttatgaagaggctatgagcactgattctgaaacaagctgttgaggtttcaatcctggctccactatttattccctgtgtgattttggacaagttgctcaagttgcctcacacctgaagaaaaatgataacactttctagggttgttatgagggttgaatgactggatgcttataaaacatgtaaaacttttcctagcacataaaaagtactacacaaaaatttgttaaaagaaaattgtaaaaattgatcatgtaaccaaaacacttttgaagtttctacttttagtgagtttcacaagctcaggggagagtgttcagtgaaaggaaacaatctcttctcatctttcttctcccatcatttttttctcctatcttcagagtactgtattgttgtctctttatactaaaaacaattctgtttattcaaaaaaagtacctcaagaagcaagtatagtgtttcccaggtattttcttaaaagtaatttcatcatgtcttttcatgtatatattcatgtctattttcccacttaagattggtcccaatgttttctttctttcagagagaacattaaaaatgttaggaaactgaggtgcaaggattgctggaggccaggagttcgaaaccagcctgggcaacatagtgagacacccatctctacaaaaaaatttaagaataagccccacatggtggtgtgctccgcttgtagttctagttactgaactcccacctcggcaacagagcgagaccgtcttaaaaaaagtatgtggaagaaaaaacatgcacagtagatttagtgttattgtgataaccctagcacttcagtggaaaaaatataaacaatttcaatgagtagacaataacacatataaccaagatttcaaatataccttctagcccttttgagaagtcaaaattgaacaacctgaatgtaccagcttttttgaaaaaagttttgtagacacgcgatccccaaaacctgccgttcaaacaactccaagggtctttaaagtactaaatccctttgtatttgtcctatcggtccctttggtttccaggaaagcattaaaaataaaaataaaaactctctgccttaattttatttcacgactttcttttctcttattatagctttccacattgctttagaagagtttacatctaactctagtggtcttcggcttcttctccctctttgacacagaggactagtttcaattgtacaaataggctggacgcttcagcgattatcttccgaccactccctgtgtgctcgcgcgggcggagtagggggcgcttctccactctccgcgacctcaatgtatgcggaaatcctcctgcctttgtgcacacgtttatttagaaaattctctccacccccactcccgtccgtcccgccccttcttcttttgcttattctctgagttttgcctctcctcccaccccgactccaccgtaatcttaacctacccgtacagattccactttcccacttcggagctagagtaatttaagatccccccattattagctccacgtcgcctttaaaagccattcaaacgagttcgccttccagggttctgcagttgtgctgcagcagcatttccctcctctccagtatcagacgttaaaacaaagcaagccacagtgtgtgtccacagacgaccttggaacgaaaagctgccctgtttgggatcaatgctcagggaacccagtccactcccgcactcacgtgttcccgccttgccctccagctagttcccccgcgcgcaggatcgcactactccctctgcagtctcgcctgccgacttccttctgcgcgcctcgtaaaaccggggaagttcaatcattccgcagcgagccgcggcggccgcactgggcatgctcagtctccgggctccgctcggcaggcgagaggcgtcctccggctctgggctccggtcggtgggtgcctcggctcggctttccccggcgctggctgggctcagcggcccctgagcccaagcgacacacgccccgcggtccccgatccggcccctgggagagccgcgccgttctggaacccgggagcccccaacttcgcgccaagttcggagccgccttctgagggagacatgaaaaagatgagcaggaatgttttgctacaaatggaggaggaggaggacgacgacgatggggatatcggtgagcgaggggtccccgcgtccccacccgagagcccgagccgacgcgggaagaagttcggggactgcgcgggggcgctgtgctctccgcgggggaggttggccgagacgctcggccgctccgggcaggggaggaagcccgctgtccccggctgcttgcagactgaggccccggtgcggcccctgcggggctgaggcgcggggcgcgtggtggccccgaggacaggctcctgacgggcgggggatgctgcccctgaaaagcctggcagctgcggggacgcctctgcgtgcggaagtctccactcagaagcaactttggggtcacttccccgactcgcagagtgctagggttgcccaggagcctcggcactggggcgagccccctgggcggggtccggggagcaggcccgcatttggaggacagggtgtgacccatctgaatcctcgttaaagtaaaagccgaccgacggctctgggaggtttgaggcctggcggggcggccccgggaagtgatttgtggccgctaggcgcgcgctggaaaccctttcccatctgcggagcccaccggagctgtgatcggaggaggaattcccccaggcagggaggaccgcagggcctttttcactcgtcctgaggggccctggggcttggggagcaaacctggggtgacccatttctagttagagttaaaaatgcatggaagtgacaagacgaacggagggagagctgttttaagagcaaaaaaagaaaaaaagggcaaacaaaagggatgagaggaggtgaggaaggggaaaggaatgagaggactagagagaaaatcaggtccctaaagagaacactgtcgggggatgatgatataatgtgtccctccagaagactctaattaaattaccaagccagtctgttgtggcgactcggcttagtctcctggatgccaaatcaattttaaagcagaacatcctgctgatgttctaaagccctgttgttatctaataactttaaaagtaacttaattttaggagttgggtgtggtttttatttctgttacattttgggcacggaatatttcgatcaaaaaaatttggtaacttcttggttgtccagggacaaatcgaatagaggagattacactccatgatttagtttcacatttcattcattcatttaagaacaatttactagttattcatctttaaggagagagcaaatagtagtagtttttataggagagaaaactgaagcgcacaggttggtctgcccagcttctcacactttcaaacccaggttttctgacttgtaaaaccagtgaagattaatgctcttaccactgggtcactctggctgttactactgtttagcaagattaagtagtacctgatgattacataaaaatataggagtgaaatttaaaaagttacaataaaattgacacagtctgtttcccaggaaagtattattgtcttttatggtgagctgcactgtttataatgagtattgtaagtaaataagggcagaagctcaaatggaaactgaagtaagcaagaggctctgagctttgttttactgtgccagcagtagatctcagtttagaaagtaatttggtctagtctgtgttta

SEQ ID NO: 1885087 - DNA, 4001 bp, Homo sapiens
caggccaggcccggcccgggcagttcccagacacacactgcacagtcccacctggacatgttttccggtgctgggccagagggactccatcttcttccctgaaccagagccaattccatttcctctaaggtttttctccaaacactcggcccatcccgattggctctttctacaaatttaagccacatgcatttttcctggctgggggtggggctgcctcccctgctgtgatggaaatggctcacattcgcagacacggatgtctgcattccaaaggactctgagcacctcaagtgggaggcggtgtgttctgtttccacggcatcctcccaaggcacttagccctgggtcagctgtagagtatttgctaaataacgaaccttccgtaatcaatggacattaggcctctgtggtggaggaagaaccgtggctgggaagtcaaagtgccttagtgatgacgaaaggccagccacgtggctggggctcgaagcgccagttaagagtcaagcttgacaagcgatacgtccagctgggaaaggaggattccactgggtctcacctgctttcccttgcgcaggcaagttacctaagacatcttaagtctctcagcatcccaccccaaccctgtcccttcctttatacttgctgcaggaatatctgccctccccagtccccgggcttcctcttgccacctcctgccaccctgcagcttctatccctgctgtgatacctccttgagtctcctcttcagtgcagggcagaagtggaagttcagaaatttccaaggtagggagggcagcaggactagtgcatgacatttaattctcatgagaaacttcctttatttagtggtttacaacctcacccttctcttctctttccctccaccgcccacctcccccaccccaagtaatgccctgaccacaaaacttagaacctcttttcctccagcacagatcagaagggaggctgagaacccttggataggggctgtgtactcccgcaggggttggagtcagggggccaggtgggctctcgggggctgtgtgaagggacaggtcttgactcaggaggcctgtggtcaggaattctccagaactttctggagagtagctagactgagctaagtaacatctggccctacactctgcccatgctcctgggtctaaccctggctaatcaccagaatcccttgcgggctcttgttaagcattcagatgcctgagctccactctagacctacagagctgccatctctctgaagaatgaggcctgggtatctgtagttttcattaccttcccggggccgggggcggggaggcggtgggggaggaggattctgatgtgtggctgatttggggaatcacagggccatgaggtttctctgtcaccactaaacacaacttttaggcgagccacagccgctgcgtacgtgattcccctcccccaggggccaggcttcgacactttaacagaccagggcagattccatcttttcagggcacagggcggtggctaagagctctcggaccctggtgctgtcccacagtagcagtgagatctggggagagtcacagctcttctgtgttccagttcccccatatacaaaatggtcatgaagacacttagctcacaggacccttaaggggatgaaatgagaaaagataggtaaagctcttagcatgctgtctggcacattcaataaatggtattattattttacccacaaatccttggtgtcttggaagggaaagttacctggcggtcacggagctactgtcacccactaaacgtctgtggggtaggacaggaggactagggctgtcggtgtcccagacccccttgagcacctggtggagggacatcagacccctgcaccagcgggaattattccactgaaagtgaaagtatcgccgactggctggatgccacttcctcctggcgagccgagccgccccctcaccactcagagtgctcgagacgctcttgaatcagcactgtgaagtcttgacccagaatgctttgctcaaggaggctgtttgggctcgcagcccagattttctgaacatctcacccctctaatgcccaagagcagcccttgaaagctcagagttaagaatcacaagatccagtagaaagagctggaaagggatttaaaggcaacgcccacacacgcctgtcatttggtggattgaaaacagatgcccagatggaaaaagccatgcccagggacacacagctgaccggggctgagatggttccagagcccagacctgctgcttctaaccaagacccctagtgtggtgctctctctactatcccagggacttgtgaaaatcatggattactgggctccacttccggagcttctgatccagtgagactgtggtggggcaggagttggcctttgaagaccaagaccagggaactgggtgagagtcctggtgcctccatctagcagctgttgtggctaaagcaaagacagtgggaaacaaaaaaatattcgtcccagaaataactggctcaacatctccccaaagcctccgatgatttataccaagtaaacagaaaagaaggcagatttcattaatcttaataaatgggtattgccttagggagagggaggggttggtgagaaattaaaaaaaaaattgttgtgcatctacttgtaagattgcattaaacattaaactaagcacagtctatttaaagcactgctgttggatctaaacttaagtagcactgttaaaacctgtggcatagcagtgtatcttattcaaagtttaattagatttcggaactagctacaaatacacaattatgcagttttgctgaaatctggatggctggtaaaattaaaggataagaatcttctgtaccaggggcctcagagggctgggtgaagatcgagttcaacaggacacccttattttcacattaatattttataatcgtaacggccaacatttatggaggcttccttagggctaagcaattgcctatgttttctcatctgtacttcaaaatagtcctaaaatcttcttccaattctctagtttataaaaccaagtaagtggtgaagtctagattcagatcaagtagcagactttagggcccaccctcttctccactggaatctatagaaagtttgcatttgaaaagattttaaagttcaattagtgacaaccacatgcacacagtaactccaacaaagcaaactccagggggaggcagctctttggagagctgctttaatgcggaatgactggtaggaattgactgcaattagcttacagcatattggtaggcaacgggtatttctacaatgcttcagagggcctgaaacagtttgttctctggtgtttgaaatattcccttttctcagtacattttcttaaatgggctgactgggctctgggtgtgaattgacgtgagaaggtaaactcacctgaaaagtctcacctgacgaaattctaaatgaattacatttgcataggccagttgcagcaaaaacaatgtttactttccctctctctgttctgggtcaggaccaagacgaaacatggttaagtgctgacaccatcgagcattcaggatttatcctggcaaaggcatcagagtccgctaaaaataactgcctattgtcttacctctgacattgctgagggatgtgacacttacccggagaaatccagaaaggcagacggacatccagtttgtgaggagtttttcgacgacggactccgtgcgtctcagcatgagtttcggctgcatgttactacactgttccatcaagtccctggtcagcacctctaggatgctggtcaggtagaccagcttggtttgcagtgcaatggttaggaaggaggcaaacagacacctgttgaaaaagagagctgggtgaaccattggctgcaggcctagctggacacccatgggagtttccatggaagctcactggcagggcagggagctggcctgttgggttgggagcttttttt

SEQ ID NO: 1885088 - DNA, 4001 bp, Homo sapiens; identical to SEQ ID NO: 916666

SEQ ID NO: 1885089 - DNA, 4001 bp, Homo sapiens; identical to SEQ ID NO: 916667

SEQ ID NO: 1885090 - DNA, 4001 bp, Homo sapiens
ttatttttttttctgtctagtttttttgtttctttgtgggtttttttgtttgtttttgttttttttttgtttttgtttttcagacgaagtctcgctctgttgcccaggctggagtgcagtggtgcgatctcagctcactgcaacctctgcctcctgggttcaagcgattctcttgcctcagcctcctgagtagctgggattacaggtgtgcgccaccatgccctgctaatttttgtatttttagtagatatggggtttcaccatgttggtcaggctggtctcaaacttctcatctcaggtgatccatccacctcggcctcccaaagtgcagggattacaggtgtgagccaccacgcccagcctttttttggtatttttagtagagacagggtttcgccatgttggccaggctggtctagaactcccgaccacaggtgatccgcccgcctcagcctcctaaagtgctgggtttacaggcgtgagccactgtgcccagccttttctgtctagtttgtttctgttgctcagttgacattttctgttgttttgtcttccaattcactaatctctctatccccttcattctgctgagtccatccactgagctttttattttggttattatattattcaattataaaatttccattttttttttttttgtctatctactgtgttgaggcttctttatttaagaaaaaagtgatacatgatgtgggattaaaatcaagaacatcattgaacttcaccttccctccaaccagttgccccaaactcccctgcccccaccctttgtgttcccaattccttccttagtgaatgaagaacttaatcccaaaagccctggcacaaactccaggtgctctttccctagctcctcccctccccctgtcccccattcctagaagggcaggcacctcagtttgaatgcatgggagagcccagagtggtgacggagacagggggaaaggcttccccctcagggaaagggaccgaggagtacagtgcagtgaagtgagggctcccatagcctggggtaccaaaatggggccctggggccagaggaaaggacactggtccccctgagaaaggagacccaacagcctcaaaatcctctcgttgtgcatagccactgcttgatcgcttgcccttctggcgccggttacagaaccacactcggaccacatccttctccagcccaagctgctgggcgatgtggctgatctgctgcagtgtgggtttcgggcaccgcaggaacaaattctccaggttgcctctcacttggttctcgatactggttcgctttctctttcgggcctgcacgagggtttctgctttgcatatctcctgaagattttcattgttgtcagcttcctccacccacttctgcagcaagggccgcagctcacacatgttcttgaagctaagctgcagagcctcaaagcggcagatggtcgtttggctgaacaccttcccaaatagaacccccagggtgagccacatcggcctgtgtatatcccagggtgatcctcttctgcttcaggagcttggcaaattgctcgagttctttctgcagagctttgatgtcctgggactcctccgggttttgctccagcttctccttctccagcttcacggcaccagaggggacggtgcagggctccggggaggccccatcggagttgctctccaccccgactcctgcttcgccctcaggctgagaggtctccaagccgtcttggggcactagccccactccagtctgaggcccacagtacgccatccccccgcagaactcatacggcgggggacatgggggaatcccccactcctcagagcctggcccaaaccccggcccgattcctggccctccaggagggccttggaagcttagccaggtccgaggatcaacccagcccggctccggcccccctggcccatcacctccaccgcctggagggggtgagaaggcgaaatccgaagccaggtgtcccgccatggggaaggaaggcgccccaagcatggtgaaatcttggtttttctttatatcttctagttctttgctgaaactttctagtttttcatttgtttcaagcatgtctgtatcttcttgttgaagcgtttttgttttttgtttttttttaatcatggctgcttttaaatctttgtcagataattctaacaattttattatcttttttttttttttttttttttgagacaggttctcgctgtgttgcccaggctggtcttgaacttctgggatcaagcgattcttctgcctcagcctcccaaagtgctgggattacagatgtgagccaccgtgcccggccccatttttgttgtcttgattgtaggcatctattgattattatattttattaaatttgaaaacttactggttcttagcataatgacttattttctattgaactctggatatttttgcattatattctcagagtctggatcttatttaaacatgttttcgtaatagctgggcttttcagatggcacttcagcaggagaaaaggggccctgcctcattactgcctgattgaggtagacttggcttccttgacacctgaggggcaggggctcctggttgcatctgagtgtggaggggagttccagcttccatgtgctctctcttggctcttaattttaataatacacacacttttaagagtgattatttatattgcacgtatgtgcccctcttcccaatacagagacagcctggagctgttgcccaaagaattggaagtcatttagttccaactgctactttatttctactgaatcagcatcttggcaagacagtgagaaggactgtgctagaatggaggctcacctgctggtgataaacactcaagaagagcaggtactttctaatagataatggggctgtgagccctgcctgatctttgtatatctctcttggctaagaaggaggtttttgttactttgggatatttgcgctgtggcagaaggctttcaataaaataggtagaaagggctcctaagcctttatattccatacctccttcctgcttcagtaaaactaacctccccggaagaaattgtgacattaaaaatatatgagggttgaatggaaggatgaaaatgtttcagtctgaaatatcaatttgttatttcaatatgtaaatgttttatacatgattaactacttaacaaagaagaggtattaagttgaatagagaaaagaaataaagttaactcatgatgaatcacaatcaacactcaggaatgaaaataaagaatccctgaagttatgaaaggaaaatgactgaatctgccaaaattttctcatgtacaactttgaagaatgtaatcccttagtgaagaaaagaggggaagtaaacctgagatgagaattcattctgatcatagaaattgcttccatactggctgggcatgctagctcatgcctgtaatcccagcactttgggaggccaaggcgggcggatcacttgaggccgggagttcaagaccagcttggccaaaatggtgaaacccagcctctactaaaaatacaaaaattagccaggcatggtggcacacacctgtagtcccagctactggggaggctgaggcatgagaatcgcttaagcctgggaggcagaggtgcagtgagccaagattgcaccactgcactccagcctgggacagaaagtgagactccatctcaaaaaaaaaaaaaaaaaaaaattccttccgtatgtactgaacatcatgcttacaagcgatgtctttgattctgccctgctcagccagagatccccattcctacgtagagctctaatgcagctgttgctggatcctctccttttcttcttgtttctctaaggtattaagaattcagtttaagctgaatactgtaaaggctgtgactccttcttttcccccctcaggatttcatcttccagaatctgcaagaagaatctgcttattttgtggggctctcagatccagaaggt

SEQ ID NO: 1885091 - DNA, 4001 bp, Homo sapiens
gcatcccactctctcttctgcctcatgaaccctcattttgacatgaggggtcaaaggcaggtttaaaggcagaagacccagcttgagtactgcttctactagaggtaatccctataagcctccgtttccttatccaaaatggaaccaaattatagtaaccacctcatgggttattgtgaggattaaattgataatatttatggaaggcacttaaaacagggcctagcatgaagcaaacactatatatatgtttgttattatcattgctattattttgaactgaagtaaagcatgcatataaaaatgttttaaattataaagcattttaaaaatgtaaaagatggccaggcacggtggctcacgcctgtaatcccagcactttgggaggccaagacggttggattgcctgagctaaggagttcgagaccagcctgggcaacacggtgaaaccccatctctactaagatacaaaaaaatcagctagactctgtctcaaaaaaaagaaaatgtaaaagattactctgataattttatggtgagtaaatcttggggacaagaatatgagcttatcccaagttccttcaaaatgcagaaaaaccttacaggagcaaattttttctgagtcacttttcttaactgccagctagtacttccaggaacaaaacagaataaatggctacatacacacacactgacacacaatcactctatggtattaccttgttagttttaatgtttagcatctacttgtccacccccagaataaaaactccatgatagaagttttgtctgaattgttcagagcatggcactgagtgggtatttttgttgaactaatgaagaaatgaagttctacagcagataagcggagtaccaggtcacagaagtatcactttgaggaccaggacttgaatgaaaatggaatatatggaattattcctcagaaggcctctgccagtcaatggtggctgccttagattgctaaataaggggcatgggacacatgtatatgaacaattgaagaccagccctctacttttggaacaaggaatttgggaagggcagatgaggttaaaaatctctgcaaagagcctcttttctttggcccaggaatgcttcccgaactcttctgatttccccctgcccagccgcagaggctattctgtgaaggttttaggcttccagtcgggctgagtggggtattctgccgcgaaagtggaggttagagggtatgctgggagctcccttggccttgccaggtgagcctgcccagggagcctgcatcgggcccattattatgactatttattaataataatatcgatattaaatatttatgaagtgctcatgctctgctagaaggtggccctcccatcactgacccacccttccagcaacgcctgggtccctacccccgggtcccaccggtcgtcccggagtttgttcattcgggagaaccgtgacaggtcaccctggccgccccagctggccctaaccgccgggaacccaggcgtccgtgttctccagagaggcaaggatccgcttctggtcgccactggttctgtgtacagagcgtcccctgtggtccgcaccccacaagggctccaggggcagaaacggggaggggccaggtcggggttccccaccgggtccacctggcggccgccccctccgctccaggtccagagcggcccgcgggcgggcgagggcgcggcccccgggtgtctagccccagctgggcaaccgcgcgctgtcccgctcccgcagctccccgccgccccggcccagcatcccgccgccccggccccgcggctttttttctctttatcataaatatataaattatgctaattacgggcattgcatattaaccaaacccgaaacctcccctgcccggccccctccccctccgtgcaaacccctccccgccccggaccccgctacttaccggagcccgagcccgagccgccttcgccgcgggtgtctggcggccaccgattagagattcatctcacagcccgggccagggggccggggccggggccggggccacggcggccgccgcccgcagacaaagaagccagtgcggcttggctgggctcggctcggcccgggagctggtcgggacccgccgccgcccccaggcccccagcctgggctgggcagagccgaagggggctccgcaggctaagccgggcggagaggggacggccgggaagcgggaaggggaagccgggtgggggggcggtcaggtatatatttttcttcgttcccccttccacgaccccccccttttccctcccccccttttttccctccttctgctacttggatttttttagctgctgcgtcatgagcataatttatgcaaagagctttgccgcatgctgcaccgcccgcgccagccgccgggggcggcgggctgggagggcggtcagggaagggaggggagcacgggagccaggagcgaggggtgggggtggggaggggaccctctggccctggccgagcgggaggtcccggaggctctctcccgggacagggatggacggtcagtgggtctggttactcagcccctccgaggtgccgcggaggtggtttcatttcggaaggtgccagagtaggagctggagtccggaccctccatgccacatggccttcagctgagggttggggcggtgactcccggccaccgcctttcctctaggtagtcaactgtcctcaatgttgaaagtcaagtttatgtctatccctccctccctagaaaggcgggggaactcagacatcgctcagccaacgtggagaacctctgaacagctgtgccccagcgccaaagcagcgaagggtcccaggtctctcacccggtggcggccgtgggctgtgttgtctaaaagcagatttccggccttcttgtccaagtagacaaggaaatgtgaacagaaagacaaagttcagtggaatggtgaaaaacctctagcagcttcttaaggtagagaggggaccagaaaaggggtggatgtgggtggctgagggaaagcagattggagaagtggtggacaactgaaagaggaaaaagttggaagaccaaagtggaagcgtgggaatggagagaagaactgggaaggaaggaggctctgtaaatccagtgaatgtggatcccaatactgaggccacctgctgtcatcctaggctgttccccctcccaccctctcccgatatttggtggtctgaggatagctagaggtagatgggttagaggcagtgtgagaatgcagttggaggcctcagtcctccccgggactgctccgtaaggcctcgtggtggaagggcattgaatggcccggcctcgtcgttaacctggccagtggactaggctgttatcagcttgctgtttccatctggaagtgagcaggtactgctggcggcggatttatgagtaaccaatgtattaggagtcagaatacttaggttttagtcccaactcttccactagccgtccaggcaagtaatttaacttcttcattacttataaaacaaggataatatttataatgacatttataatgactacttcatagggttaagtttgtgagcctgtatgtgaaaaaactgaaagctgcaagctctatacaactgtaaggtgtcattccttgtacaatagtttgaactcgttttaatggccctgtgaaactctactgcgtggcttgatattacagttcttggggtttttgtttggccggtagtccctgtagtttctctccctggactgtgaattctttgagagcactggttgtgacttactcatgtttgtatttcccactactctttatgtgaaggaggggctcagtattgctgctgaactttgtcacatgaaggttgaaacttttcatttatgtcacttggtttggtgctacacatagatcaaaggctttggatagcatggatatcagcgacagtttgaagaaagaaatatggatgtgatcagaggagttcagggagac

SEQ ID NO: 1885092 - DNA, 4001 bp, Homo sapiens
tccaggacgtaatgactcctgtgactctgaatggctctgtgtattagtctttcagttttcaaagggagtaaattatatgtgtgaactgaaactatatatcttctcccagttctcagaattgatcatttattttacatcgctcttcagtctctataccagtattttagaagttgtcataagtaattcctctaagtgctacctcgctggagtggtactggagcagcaaagtagcaaaagaatactagctgggaacacaaaattaatttttacaaatttatcagtggcacgttatttctaccagtcatataatcagtagactatatagaaacagaggtactctagggtaccgtacttgtgctctgaatagctgctagacatgcagtgcacggtgcgatgtgtggtatctcaacaatgcttttcagaacaagactgtaaccttaaggtcatgatcagaaatcacacatttgaataatccatgaatgaagacggtgtgtgcgattaaaaaatacagtgctttctagttaaaatgggagataagtgaaggtaatgaaatgtgcaccatttaaataacaaaagtattgtggctattagagattcactgtgctgttactctaatggtattaagagtttggaagtacaggccgggcgctgtggctcacgcctgtaatcccagcactttgggaggctgaggcgggcagatcacgaggtcaggagatcgagaccatcctggctaacacggtgaaaccccatctctaccaaaaaatacaaaaaattagccgggcatggtggcgggcgcctgtagtcccagctactcaggaggctgaggcaggagaatggcgtgaacccgggaggcggagcttgcagtgagccgagatcgcgccactgcactccagcctgggcgacagagcgagactcccgtctcaaaaacaacaacaaaaaaagagtttggaagtacagagtagtattccagctcttggagcctagccacaggtttcacagatgcatctccatgcagaaatggctgaagcttccacagctaatctgaactttttaagggtttacatggctgggaatataattttgtatgtatgtccttatgtatatacgcgtgtgtgtccactagttttttgcttgaatgtttatcattcctgtcacttgcaatttaaatattcctaataaatagaaaaatccaaagactaagattgtgatcctttttatgtctatggtatattatgaatacagagaccttgtgcttttattggcgtaggaatcatcttgccctaatattaatattatgaaatcaaaagggtaagattcctaacatcccacataacacagcagacaaactaaagttttaatctagctttggcccttacaaattttgtgccctacggcaagttacatctcgcttagattttttcattttaaagtggaactatctgcatggatgttcgtacatgctatataacacatcctattccagagccacctaccatcagttgagctctaaatggtaaatgccacagtgagaagcagacaggaaggggcggagcgccagcggcgcccggggctacgcgccgcactgcaccgagcggcggcagcggcaagcttgggtgtgagcccgggagccgctttgcttaccgtcctgccggtcccagccgtcgctaggaggtccgcgggccctgcggcaaccctcgctacagacgctgggcgggcggcgacacctggctcatggcccccgcggcggctccgtcctccttggccgtcagggcctcaagccccgccgcgacacccacctcgtacggcgtcttctgcaaggggctctcccgcaccctgctcgccttcttcgagctggcctggcagctgcgcatgaacttcccgtacttctacgtcgcgggctcggtgatcctcaacatccgattgcaggtacatatttagagccatgactaagctaacggcctccggggccagcatgatggccgactcccagggtccgttgcggcgcggcggagcagccaatggcgagccccacagtctcgcgagagtgctcaggcgctcttcgtggctgccctcttagctgctagcggagctcctcagggggcggccgggagcctacaatccctagaaagagaatacgctgttccggaaacagaactgcagttaagaccctcgaaaacatctaagaaagtgtgcatcctaaaacacctgacgaatttcagaatgtgacaaagcgcagaggatgcattatttcaaaacaaaacagaaggctaaaatttgcaggaaaaagaaaatcagtaaaccgggaatcctcggactggattgtaagcaagatttcaatgaataagaagctgaaggtattaaggctgtgatatagaaggtacatatttcatcccacaagagaaaacaataataatcagaaattttcggtgaaaaaaacgcaaaactgtacaggaaaatcatcctccaagtaccagacataaaatgctgcaagcttttgaactaatggcgagagtgtaagaaaatgggctctacttcagtgatcctgtggcaggacgtggatcaagacttggaaccgcagaaaacgaaatcccatagtagcacaaagcttggctgttcagtgaataacatttaaataatcgtaaaatacaaatgttgtttatggtttttattgtttaagggcatacttaattatggttacaaagtggagtgcaaatgttatttaccatgttttaaaaatacagccggaaaatacaagtgggaatgttgaaggagggcgggggaagtaaatggaatgggggttatgtccttataaagtggaaacttgaaaggtactgtctgttgttgagtggggaaagacatttttattacttacagggtagccataaagtttctaaaacggtaatatattaaagagggagagtggtaggggagaacagtatgaagtcaacaggaaatggctaaagatggagagctcaggtagaatagtttaaaaaatgaaaattgatagagtacctggtgtatttgaatacagcctagagagctttcattttccaaagagtgtggggataaattagtgaatgcatatttttcaaaattaagaaaacagaacatataattttgaacgctgagaaaaataaaaatttaaaaactacactgtatacacggtatacctcaactgtgaataatagtagtcatgtaaagtcagtcataattatgtaaatactgaatactgattttacaacaaatgattctataacgctgggaggatgggagaaaagagatgtgtgtgtgtgtaatggtggtgagccaatcaagatctgatatagaaaaatgcagaaaaaggagtatacacatgttttcttcggattaaaaaaactaataataaatcaccaagagtggtaaagttttaaatcaagatctgatatagaaaagtgcagaaaaagtagtatacgcattttttttttcaggaaaaaattaactaataaaccactaagaggggtaaagtgttaaaatagttgcattgttctatattccactcattgtgtccagcaaacagtgttctatggctttaagtagtaagcatcttgccccgtccaacaccatgtctggcctagggtaattgttctttctagtctttattctttgtctccagccaaactccatttgggcacattctcctatagccttttctacctgaagatactctgtgttttaaagctaagcttaggtggcgctttttccattaaatttttcctggattccactgaccatataggagctcacttcttttaatccataaggccattttcataggttgccttatttttccctaatcgtgcatcaactgtctgttttatatacccaagacaggtttcctagactgcgataagccaaaacattttagtctaaaatatcagaagtgtagtttaatcaatgaaatagtaataccaagggatttagaatcgtggacatcactgtttcccagagcactgatgtcccaa

SEQ ID NO: 1885093 - DNA, 4001 bp, Homo sapiens; identical to SEQ ID NO: 916713

SEQ ID NO: 1885094 - DNA, 4001 bp, Homo sapiens
aactcctgacctcgtgttccgcctgcctcggcctcccaagtatagggattacaggcgtgagccaccgcgcctggccttacacttacttttcacccaagtttttaaatctactttcctagtaatagccgttccttacctatttaaatatctcatgtggcctccatcaaatgcttctacttcaagccaattttaaacatacttttcgcgaaaagatatgttgtttggctctattattaaaagctgcttaatgcctcatctgacaaaaaatttccccttacagattttcagagtatgaaaggttaagactgatgtcccttctacattacttaggagagctttcaaatagaaaagcaaaaactattttatatacattcaaatttatttatttattttgagacgggttttcactcttgttgcccaggctggagtgcaatggcatgatctcggctcaccgcaacctccacctcccagattcaagcgattctcctaacctcagcctcccgagtagctgggattacaggcatgtgccaccacgcccggctaattttttttgtatttttgcagcgacgcggtttctccatgttggtcagtctggtctcgaactcccgacctcaggtgatccgcccgcctcggcctctcagagtgctgggatcacagttgtgagccaccgcgcccagcctaattcaaattttttaaaaccccgattacgtatcactttcggggagggggctccttcaaaaattctaacatgctgtgctctagaagcttgttcccagtgataaactcgcttcagcctcacgcatccctttagatttctagccaatatactcagcctcagtatcatgacttgaatcaagcaaatccttattacttttccaaagacataaagtcactcccctcttctctcttctgaatggagtctaaaacaaaagaaaaaaaaggttccaccttaattgttctccataccttttaggacgtagttagtaccttgaaaaataacctcccgtcaaaaaaaaaaaaaaaaaaaaaaaaaccctgtaaaaccggcagttcccactgtacgcggcagtgccaagaattcttaccggttaaaatcgccaaggctttcctttatcatcgtaaaatgaagactgccatagaatctgtattcacctccacacaaatttaagatctttgggacgactgtaggttaattaaatgcctactacatacctatttcatcctacactgtaacaagatagtgaaacctcacctcaagtagaacatgaaacacagaaaatgtccgtatctttccaaagtcgacacgtgcggaactacctgctcaatggtaactcctcctcgctgccagggaagcggctgagttttggcaacctcccgtgttttcaagagactggagttaggaggcggactggaagtacccacactcaagaaacccagacactggagagggaagtatgttgcggcgtgggcatggcttccttctagttgcctagcagtacctgcagctcacggcgaggtccgcgtggggctctcccaggagctccgccaggcacctggcggcacccaccacaggtgcactcgactcagggcctggccccgggaccacaaagcaacagaaccggagcgcccaagcagccgagaggcgacccacgaaggttcacgcttcagggcgccgcatggcgagcagctaccgggagcttaaggcctagggtgaagttaccgaaagaggcgagtaacccagacagccaaaggggtaaaagtaggatttccggcatggggaagccaaggaacggttcaggggtgggggaagcagacatctggaggaaaaatgtcctccacccgccaacggtaaccggaacaaggatcctggacctcccgcccccaggcaggaacgactgccaccaccgatgcgagaaaggctagggggccgcttccagggagcccccaacgcggcctcggcctcactcggcgaccttccctcggcggggtgtcgcactcacattgtgaacggggcagggggacgggcgaactggtgggcgggcctctctggcggcggctgctgctagggagtcgacttctctccggtggcgactccgctttttctctccggtcgcggcctcttctcgcttccctcaggcgacggcggcagcggcgggctcgacctcgggccccagaatgcaccgcgcggaaagagcggctcctccggtcggggagaagaggaaagtgtaggaaaaggggcgcgaggacggagaatgaacgtgcgtgcgtgcaaacgaggggtggtgaggccgggcggcggctggtgacgcagcaaaatgcccgggccttgccgccgcgcgtgcgcagtccttgtttttgggctccggcgcggctttctagagatatctacggaaagggcggggcctcccagctccttcgcgatccttcctggcgccggccccgcccttcgtccgccaccccacccccactccgccccctgctagtccctacgcgttcccgcctctcctcccgctctgtcttctcgcgttagaaaaccgttagtggcccaactgccctgccatgcgccttcggcgatttctctgagaaacggttgcgttgacagtgggaggcaaggctgaggcggagggacacggagtcgggatcctggagaactgaaatggcgcgttggttactcttgagggagtaaatcagctcactgagtcatcattccaccacaaaaacctgtaaaaagcctgtgctgtggaaaagggctcacttcagaatcaagggcctgggtccacctcgccatttttctgaaggttggaggctctgtccagggacagcggaaattcgaggttcttggcggaggaggagcatttgccaattggggcgggcttttgcccctaccttgagaccttagtgctgtagatgagccaggaaaggtatttgaggggagagtctaggtttctgggaatggagagagtaggacattgtgtgtttccacgcacatcgtttgggggagaaggggttccccgtcgctttgtgcaacatattagtagggtgtagtaggggtagcaaccaagagacccaaaacagtcctgcttaagaagaagccgcttaacggtggattggggaaaaatactctagtgcgctgcattttgaacaggaaggaggtttaacgaaagtgctataaaacctttctgaagaacggggcttcataataagcactaaggtatttagtgtctgtgttgtgcaggacaggtagtgggagctacgaaacctggaccctagctcaaatgccattaaaaagggaaattgggcggggcgcccgtggctcacgcctataatcccagtactttgggaagttcggtgggcggatcacctgaggtcaggagttcaggaccagcccacccaacatggtgaaaccccatctctactaaaaatactaattagcagggcgtggtggcacttgcctgtaatgccaaatactagctagtatgaggcgggaggatagctcgaaccccgaacccgggaggcggaggttgcagtgagcactccaacttgggcgacagagtgagaccctgtgtcaaaaaaaaaaaaaaaaagggaaggggccgggcgcggtggctcacgcctgtaatcccagcacttcgggaggcagaggcgggcagatcacgaggtcaggagattgagcccatcctggctaacatggtgaaaccccgtctctactaaaaataaaaaaaaatcagccgggtgtggtggcacacgcctctagtcccagctactcgggagagcgagacaggagaatcgcttgaacccgggaggcggaggttgcagtgagccgagatcgcgccactgcacttcagcctgggcgacagagtgagtctgggtctcaaaaaaaaaaaaaaaaaaaaaaggaagttaacttggcgcactggttcacgcctgtaatcccaacactttgggaggccgaggccagtggattactggagatcaggagttcaagaccagcttggctaaca

SEQ ID NO: 1885095 - DNA, 4001 bp, Homo sapiens; identical to SEQ ID NO: 916729

SEQ ID NO: 1885096 - DNA, 4001 bp, Homo sapiens
caaaaaaaaaaaaaaaaaaagaaaagaaaagaaaaaagaaaagaaaaagaaatacagtaacgtgaaatcgagctacttctaacttttttttttttttttgagacggaatcttgctctgtcacctaggctggagtacagtggcgcaatctcagctcactgcaacctctgcctcctgggctcaagcaattctcctgcctcagcctcccaagtagctggaattacaggagcccgccaccactcctggctaacttttggtattttttagtagagacggggtttcactgtgttagccaggatggtctggatctcctgacctcgtgatctgcccacctcagcctcccaaagtgctgggattacaggcatgagcccccgcacccggcctacttctgacagttttatggtgtgtgatataggatataacatgatgtatgaagctctttgtaataatttttaattttgaaatagctgattctttggggatcatttaatacataattccataggtttcagtgaaaaaaaaaaaaaaaaagagatctcagggttgggcaaggtgtctcattcttgtaatcccagcaatttaggaggccagggtgggaggattgcttgagcccagaagtttgacatcagcctaggcaacatggcaagaccccatctatacaaaaagtacaaaaaattagcttggcgtggtggtgtgtgcctgtagtcctagctacttgggaggctgaggtgggaggatcacttcagcctgggaggtcaagtctgcaatgaactgagattgctccactacactctagcctgggcaacggagtgagactgcttctcaaaaaaaaaaaaaaaaaaaaaaaaaaaaaaaaaagatttgatggaggtgaattattctatggatgtttgttggctagttttctaggaagagggaatggctaatgcaaaagcccccaagtaaagcctgctctggaaaagcagcagagcatcatctgggtagaaagcaagtaagtgaggaggaaaacatctgagatgatcagagtgggcgtgagggacagataggtaagggccttgtaggtactttaggttttagatttttactctgtaggaaacggaaagttttaagcagataaggagatgagctgacttaggtttttttttttttttttttttttttgagatggagtccctctctgtcacccaggctagagtgcaatggtgtgatcttagctcactgcagagctcacagctcccgggttcaagcgattcttctgcctcggcctcctgagtagctgggattacgggcatgcgccaccccacctggctaatttttgtatttttagtagagacggggttttgccatgttggccaggctagtctcgaactcctgacctcaggtgatccacccgcctcgtcctcccgaagtgctgggagtataggcgtgagccaccgcgcccggccaggttttaaaggatccctctgttttggtaggcggaaaaactagagaagacgagagaccattctgaggccgggcgcggcgggtcacgcctgtaatcccagcactttgggaggccgaggcgggcagatcacgaggtcaggagatcgagaccatcctggagaacatgatgaaaccccgtctctactaaaaatacaaaaaaaaaattagccgagcacggtggcgggcgcctgtagtcccagctactccggaggctgaggcaggagaatggcgtgaacccgggaggcggagcttgcagtcagccgagatggcgccactgcgctccagcctgggcgacagagcgacactccgtctcaaaaaaaaaaaaaaaaagagaaaccattctgtttctaagcatgtgcaattatgtctcagctccacgtcataccttttagtttgctgagctcgccaggtggcacagggaaccgggactccgaattcgcagctccagctccagctccagcccagcaggtggcagcagctcagagcaagctcctccaacgcgaggcagcgccttccttcgcgaccctacttaaaggcggctttccgttggctggagtggcagcgatattatccaatggttgcctgtattcgttcagctttgtctgacgggcgatggcgcagccaatagacaggagcgctatccgcggtttctgattggctactttgttcgcattataaaaggcacgcgcgggcgcgaggcccttctctcgccaggcgtcctcgtggaaggttcgtgtgctagttagatgggcgccaggggtcgccggcgggaagcatggaggggtctttgggggcctttgggaacatggagtcctattctgttccgcctggggcctcggtggcggcttgcacgccccgagatgacggccgctgccctaggcagggccggcgggcgattgcgcgtgtcctgctcctcttaggcccgggaccgcgggatgggtgtcggcgtgaccaggcctgagctccctgtctctcctcagtgacatcgtctttaaaccctgcgtggcaatccctgacgcaccgccgtgatgcccagggaagacagggcgacctggaagtccaactacttccttaagatcatcgtaagtgcagggtgggtcgcctctgctcttcatgttgccccagcgcaaatagggacagtcagctgctatgtgctgagggtctactcacaccggctactgaattaggccatttttgggaaaatactgtttagttaacaatttcctgagataggtcccttctgttgcagataaacgggctcaggcaagttaagtgggtcctaagatgacagcattcgtatccaggtctgtctggcttctaaaagagcgcgctttatacttttttttttttaaacggagtctcgctctgttgtccaggctggagtgcagtggcttgatcttggcttactgcaacctccgcttcccaggttcaagcgattctcctgcttcagcctcccgagtagctgggattacaggggcgcgacaccacacccagctaatttttgtattttcaatagagacagggattcaccatgttggccaggatggtctcgatctcttgacttcatgatccaccttcctcggcctccctaagtgctaggattacaggtgtgagccaccgcgcccggccgcacattacagttttactccatttttgagaaggtctgaggtcaggaatgactcattgtaaggaagcaagctgttgcatatttaggacctgtcagccaagaaacttaagtgtccaatgacttttggatggcctttgaggtgggtctcccttgcccagaaatgctgactgtactgcgcttaagcaattaggcagcattgtagagcatagcttgtattacattttcccacacttagaaggttttcagacacaaaacccaaaggaattgtgtaacaatccggataaacacgcctagattgtttttacaaataataatgttgctatatttgcttaacgtggtgcttttaatgctgtgaatctagccctcctcttgaccaacttacttggaacattccttttttatcctgttaaccattttagtgaatcagaagcatgcctggtaattgggaaaaattaaaaactaagtaaaaaaagaaaaaactccttgattgaatgtagaaacctaattttcagcgttcatacccagctagccaatcatccagtttggcagtgttacaacgtagctcccaatctccctctgacttcaaaagcttagaagaaagggagtgggatggaaacaaattgtggggttcagtttcttctggcattttttccctctctcttcctgttaaacttggctcctctggcttgttttttgtagcaactattggatgattatccgaaatgtttcattgtgggagcagacaatgtgggctccaagcagatgcagcagatccgcatgtcccttcgcgggaaggctgtggtgctgatgggcaagaacaccatgatgcgcaaggccatccgagggcacctggaaaacaacccagctctggagaagtcagttcccctggcagtt

SEQ ID NO: 1885097 - DNA, 4001 bp, Homo sapiens; identical to SEQ ID NO: 916746

SEQ ID NO: 1885098 - DNA, 4001 bp, Homo sapiens; identical to SEQ ID NO: 916747

SEQ ID NO: 1885099 - DNA, 4001 bp, Homo sapiens
gagtacaggtgcatcctttcttatagtcaatcaatgctgggagtaataggtagatgtgacttcacttgagcattgaagaagcaaaaaggttgccttgccttcctaggttagtggcagacttgcctttgctcccaaatctgggagtgttctttgtgagggtggaacagactccctgtgacagggaactagatgaaggagtcttgagaagctgatgatcaggagtggtcacaggtcccagtaaactcactttaatatctggtgttgaaaaggcatttgagttttcagtgacatgtagggggtcaatgttctctgctccactattgagaactgactccagtactccaggggcaaggaaggcaggcgctcgaccaccttgggttgacacttgatgtcctgtaacatcgtcactggttctggattgggcacagcatgggccactattgtagagccaaagacttcagccagattggcaacattcattttagtatatggactctgagccactctctgcaagtgaatcatgaggaaaaccaatgtgtccctgttggcctggggcagttcaccaacagcctggtacatggcagatatgctgttgtcttcatctgtgatttctgctgcttccataaaggctttgtttaggcgaaaggtcagaagaggttctttgaagtttcgaagaaagtctttaagaaggctacagatagcatggatatcatccactttgctgacgaggggtacagttttcactctgaggaatttctctttcagcttttactgtgctgtcacagcccaagatcctatacaggcctgtctcagtaagacctctctgctcaatctcatttacacaatgcacaacaatgcgggggatcattggaaaagtctgggacacaaagtcggccagcattccctctccaatcttgacaggtgttcctatcagggtaggaatgcagggaaggggacagtggtcccgacattctggacgagagatcacacaacagtcctgacacttcagagatagtttcccaaattttatctgctttccacatggaacatagaattcaggtttaataaccgtcttagagacaaagtcattcaggcacatccctctgttactctgtggcgtgcccacattgtctcagttcttggctccagctgcctgctgttcagggtggggtcactgttccaaggttgtaaagtacctgttttcctttggctcctggtccagtatggcacagtctcaatagtgggcacagctttgatgggcccgccatccttgggaacagtcactgtagtttttgcaactatggattcattccccctggtctactgtggagccaatggaacgagtttcctttacaggtccagagggaccatcaacaaactgtcggctactagagcacctcttttctctctgcttccgcttgaaagtcttcaccaaagaagagtcgcaatccagtgattcatcagtcttgtcaaagctgatacctgataaaatggaaccagattcatcgctaatttaaagtcttttgttcccagcattgctgctggatggttggcctctgttgagaaaagccaaagctgatttttgctccccgcttagttgaatgctgccagatatgtcacacaggaacatctctccaatcagctgaatctgttactccagcttttcgcagttagcctcagctctccgtttggatgtctgcatccacctgattatgtgcatgcttcagcttaacatccagagcacttcactcagtctctgcttttatcaaaagatccttgtatttccccagctcatagtcagtcctctcccactttttaaagaaatcctcaaagtccttcaccaactggataaattggagttcgtttccttccttgagaatctccgccccgcgcacaagctgctcaaacagattccgcatattcagcatagtagtatccatctttttcagtcagcctggcctcacctgggcagcccttcactttgctctgcacctcaatcaagggcagagcagcagccgcggggccagctcctgacgcacatcttaacatggcggcaggtgagagagaacaagcgtgagaaggaggaactatcagacacttacaaaaccaaatctcgtgaaaactcactatcaggagaacagcatggggaacagcgcccccatgatccaatcacctcccaccaggtctctccctctgcacctggggactatggggatcacaattcaagatgagatttgtatgggaacacaaagcctaaccatatcagagaggaaagtgccagacaacacagtagatctcagctgaggcctcagaccatgaatttttagtggctttttaataggcacatactattgtgtacttttctccaaaaggacccaagattagaagggagagttggactgttttatagtgacatttctgcaggcaggctctggaaaaagaacccaggaacaatgagcatgagtaaagataggcattttgtagggtaggctagaaagggaagatagcaggaaccctgagaagttaggggaccagcaatctcagtagggtataaaatttgtgaatcataaataccaaagtgagagcactggtgaaagaaatgattgtgatcagtgaggtggctgcaagtgttacaatttcagaggcagagcagttccagttaatgaaacattctaagataatggtaatgggagtgagaggctaaagtggcaacaagtccaagccaacacatttgagaaagttagagatatctgaggtagaggcaatagatggaatatccccatagacactgaactcaccaaggatgttatattagtctgttctcacacagctataaacaactacctgagactgggtaatttatgaaaagaggtttaactgactcgcagttccacaggctgtataggaagcatgactgcgaggcctcagaaaacgtacaatcacagcggaaggtgaagggggaaacaagcaccttcttcacatggtagcagaagagagtgcacaagaggagaagtgccacacacttttaaaccatcagatcttgtgagaactcactatcatgagaacagcatgggggaaatccgccccatgatccaatcacctttcaccaggtccctcccccaacattgagaattacaattcaacatgagatttgtgtggggacacagagccaaaccatatgggatatcaaaccagcctcctacacacagtagatattatggctgatggacagctccagcacctctcaaaattttgttggtaacttaattctttctcctgttccagttcaaaagattctggcagaggactttggtgacatgcttatgcttagacctggagaggcagagtgtgatgactaaaaacaaatgactaaagtgagaaaaaaagcaatgtcccaaaagatgaaatgctgttcccagaagaatgaagcggaagttagtatattacaaaagaagacaaacagattacacctacatgtctaccacatttgcaagactgcaatgttgttcacacagaatctgttgtttaacactcctatctcctagaatccatattgtgcagtctttaaatattccccagtaaaaggaaccagaactctctggagaaacagctgaatccacctctgcagcaggatgagcttggaagatctagccatataaggaagcaacaaggctatctgggatcacatcaaaaagacacaggagcctaattgaaggtactgccactaggaaaagatggggcagcttgaatattgtattagttagttttcacactactgataaagacatacccaagattgggcaatttaccaaagaaagaagtttcattggacttacagttccacatggctggagacacctcagaatcatggcataaggcaaaaagcacatcttacatcacagcaggaaagagagagaatgagagccaagctaaacatgtttccccttatcaaatcatcagatcttgtgagacttatttactaccacgagaacagtatggga

SEQ ID NO: 1885100 - DNA, 4001 bp, Homo sapiens; identical to SEQ ID NO: 916754

SEQ ID NO: 1885101 - DNA, 4001 bp, Homo sapiens; identical to SEQ ID NO: 916767

SEQ ID NO: 1885102 - DNA, 4001 bp, Homo sapiens
tcaggagctgcaaacataagctaggttttcttacagtgttaacatcttggtttcagttacacgggtcaccagattgatacagatttagctgaggtaataaatcactgcttcagcaatcttaacagtcaagtcagttatctaacgatgatttgacaagtaatgaggtcacctgccatttcctcccataagtaattcaactgcatttagttcataatacatatggctagaaaagcatctaaatcaattcctacgatcagagagagagatgtccccatcaccatgaagcagaagttacaaagaaatgggggaagatgctatgcagttggccttaaacatagagaaagggactataagccaaggaatgcaggtggcatctagaggctgaaaagggcaaggaaatggattctcccctcgatcctccagaaggaacacagcccacactttgattttagatttctgacctccaggtctataagatgatcaattcatctctcgatatggcctcctcctgttcattgccactgctctccagtttagactctcccttggatctgcctcttttctgaatccatcctctcaagttgttttcttaaaaatcaaatcttattatgtcacagggtttgaagtgcatgaatactcactgactctagttaggctcctttcctggaatatcattagaaaccagaagtaagggttgtttacaattcccatcaaggacatttggtgtgatctcaggaaggcttaacagggatgtgattatagctaccaaaaaaaaaaaaaagcttaaaacaaattgtactacactctgaagaaagaacgcattaaccaaatgggctaggtagggtaaagatttttctgcacttatccagcactgaatggaggcaaattcactgactttggcagccatcagtaagactggaggtgaggatacctggatttttaggaagggtttttcctaaatagtaggtattgttatccaatcaggaagttctgtcctgatataaatgctcatcatataagagttagttatcaagagtcagtcaacttgctcacctctagatgtggtaatactgaggtccagatcctcctggtgatcaacacaaactggattaagagtcagctactcagtcagatcctgaatcctggtccaacgataaccacactcttgcctgctacctgcttcaagaagtacacaaaagagggatcactaccacagccaaagaaaggaggaaagttttttttttttttttttttttttttttgagatggagtttcgctcttgttgcccaggctggggtgcaatggcgtgatctcggctcactgcaacctctgcctcccaggttcaagcgattctcctgcctcagcctcccagttgctgggattgcaggcatgtgccaccatgcccggctaattttgtatttttagtagagacggggtttctccatgttggtcaggctggtctcgaactcccaacctcaggcaatctgccagccttggcctcccaaagtgctggggttataggcatgagccaccgcgcccggccaaaaggcagaaagttctaagaaggagaggtcaacattggcaaatgccacaaagggcacaagatgggaattaaatttttccattagatttggcaattaagcaatggctgatgttgttcagtggagtgaaaggctgagaagggaatgagaggttaggaaacattcaccttaaggctaggcaactcctttgaaaagagtcaagtagggttaagggaggatccatgccctccaggttgacttttaaatcatattccctttggttttgcatttgaatcacagtgaactttctcctctccaaatgttgatttgacaaatttgagtcttaccatggctctcttctcagtccacctgcaggtcaaggaactaatgaggtgtggagtaactaaaggtcaaaaaacaagaggaagaaacaaagggccaaaaaaccccaaaccttaaatcaggtcctgagtcagatacgctgtaacaaattctgcttcaagtttaatattcttgttttgatgatgtttaaaaaaagaaaaataaaagcaagtgtctggaaaattaaaaggcggggtgggggggggcattttaattggaatgctttcttgtatctcatccactatccgcaccccatcgccctgcaaattaatagctgttgcggagttggggtatgtgtgaccacaaaatccaaaggctgaattttgcccagtgcctgagtaattgcatgccacacacaaaaaaacagtagaatattgaaaacaacatacacatctgtatttccatatgaaagcacccgtttcctttcttgattatctgctatttttaaaggggttgggagtgcagcggggcggggggatgaggcgttttttctgaatacgagcccagctctttctaaacttttgttactcacgtccgtttgattcatttgctgtgttttttctttctttctttttttttttcccctctcctgcctctgtcattgcctgctgctaagagggacgctgaatcacagccactgcagatgaaaagcaattcaaacccagtccttggaggggggatggaacggctctttttgatttttttcccctctgcagaaaaagcctcctactttccgggtgaccgtagagggcagtttgacaagtctcagccccgggcgatggaagattttgcccgtgggaccgtcacgagccaccggtcatctccccgcgcccggctttcgggtcctcaggcctcggtgcgtcgcgggccaggcgacagcgggggggcgtcgcgggccgggcgagcgtggcccggtgggcccgagggtcgcgccgagctccccgccgctttaaaagctcccacaatgcagcgctggcgtcccagttccgttacgaggtctctcccggcgccggcgagcgggccaggcgcgggcggggcgcggaggagcggcggctgaaacccgagcgcccggccgaggggggcgcccccgcgccgctcctctcgcgcgctcagccgctgcccggcgaaggggcggagccgcctggccgcccggcccggcccggcccggcccggcccccagcccggcccccagcccagaggcaccggccgcgggagcgagcgggtcgccgactcctacgcccgcgctcctcctacgcccgcgctcgtccggcgccccgcgccgcgccccgctcagcgtctgccgcccagctcctcgcccagcctcgccgagcctcgcccttcccgcccgcggcggcgttggcgctgggggcggctcccgcggcgtctctgccgctggccgagcgctcgcgcaccgcggcacccccgccagtggcgtccacactcacctagcgcgggccgggaggtgcgcggagagggaacgccggggggccggggcctccagccggtgcggggcgcgcggcgcggggagcgccggggagtgccggggagtgcggcgcggggacgggcgctgggcggccgcggagctccgggtgccgccgcgtccccagcgccccggccggcccctctgggcggcctgcgggggcggcgcagttgcgaaactgagtaagtattaactttacttagcggcggcgatccgggctgcgccggggaccccgcccgtcccgcctgcagcctcggagctgccctccgcccggttgcccctctctccgcaccttgggtacctcgtccgttccgcccccaccctgccccgccgcgggctcccgctccctctgcgttcacctttcctggtgtgtcaccctttgcgcctctcctcgcggcacacaagccgcggactgaaaagtacgagcttggtctttgcttttctgcttcctcccagtgtccttggcaagggagtttagaggccacttttcttgcaaagggaattttatgtctggtttttaaaatattttttcctccggatggaaatcggatgctcgcttgccgggtggcggtttggtgaacgcttttctcctctaaaaaaatattggtttataggttttt

SEQ ID NO: 1885103 - DNA, 4001 bp, Homo sapiens
tgagtcttaccatggctctcttctcagtccacctgcaggtcaaggaactaatgaggtgtggagtaactaaaggtcaaaaaacaagaggaagaaacaaagggccaaaaaaccccaaaccttaaatcaggtcctgagtcagatacgctgtaacaaattctgcttcaagtttaatattcttgttttgatgatgtttaaaaaaagaaaaataaaagcaagtgtctggaaaattaaaaggcggggtgggggggggcattttaattggaatgctttcttgtatctcatccactatccgcaccccatcgccctgcaaattaatagctgttgcggagttggggtatgtgtgaccacaaaatccaaaggctgaattttgcccagtgcctgagtaattgcatgccacacacaaaaaaacagtagaatattgaaaacaacatacacatctgtatttccatatgaaagcacccgtttcctttcttgattatctgctatttttaaaggggttgggagtgcagcggggcggggggatgaggcgttttttctgaatacgagcccagctctttctaaacttttgttactcacgtccgtttgattcatttgctgtgttttttctttctttctttttttttttcccctctcctgcctctgtcattgcctgctgctaagagggacgctgaatcacagccactgcagatgaaaagcaattcaaacccagtccttggaggggggatggaacggctctttttgatttttttcccctctgcagaaaaagcctcctactttccgggtgaccgtagagggcagtttgacaagtctcagccccgggcgatggaagattttgcccgtgggaccgtcacgagccaccggtcatctccccgcgcccggctttcgggtcctcaggcctcggtgcgtcgcgggccaggcgacagcgggggggcgtcgcgggccgggcgagcgtggcccggtgggcccgagggtcgcgccgagctccccgccgctttaaaagctcccacaatgcagcgctggcgtcccagttccgttacgaggtctctcccggcgccggcgagcgggccaggcgcgggcggggcgcggaggagcggcggctgaaacccgagcgcccggccgaggggggcgcccccgcgccgctcctctcgcgcgctcagccgctgcccggcgaaggggcggagccgcctggccgcccggcccggcccggcccggcccggcccccagcccggcccccagcccagaggcaccggccgcgggagcgagcgggtcgccgactcctacgcccgcgctcctcctacgcccgcgctcgtccggcgccccgcgccgcgccccgctcagcgtctgccgcccagctcctcgcccagcctcgccgagcctcgcccttcccgcccgcggcggcgttggcgctgggggcggctcccgcggcgtctctgccgctggccgagcgctcgcgcaccgcggcacccccgccagtggcgtccacactcacctagcgcgggccgggaggtgcgcggagagggaacgccggggggccggggcctccagccggtgcggggcgcgcggcgcggggagcgccggggagtgccggggagtgcggcgcggggacgggcgctgggcggccgcggagctccgggtgccgccgcgtccccagcgccccggccggcccctctgggcggcctgcgggggcggcgcagttgcgaaactgagtaagtattaactttacttagcggcggcgatccgggctgcgccggggaccccgcccgtcccgcctgcagcctcggagctgccctccgcccggttgcccctctctccgcaccttgggtacctcgtccgttccgcccccaccctgccccgccgcgggctcccgctccctctgcgttcacctttcctggtgtgtcaccctttgcgcctctcctcgcggcacacaagccgcggactgaaaagtacgagcttggtctttgcttttctgcttcctcccagtgtccttggcaagggagtttagaggccacttttcttgcaaagggaattttatgtctggtttttaaaatattttttcctccggatggaaatcggatgctcgcttgccgggtggcggtttggtgaacgcttttctcctctaaaaaaatattggtttataggtttttaaatttcatttgaactattaaccatctgcattctattctcctttgccgccagtccctttggggaggggagtccagaagaggggacgttcaaagtaattctgacttgcaaactagaaagtttgagagggtaaatcgcacaaagccggaagattcaacttgaagggacgcgagctttgaatgtgggtcctggtgcggcactgggttttaaaagatgagtacttgggttcggaatccagtgttgcgttgttattttagcatcatagagccgcctggtgttgctaaaccactactttcccagcctcaaatggcatcttgaacagtgcaacgtaggatatataattgcgggtcaatattgttgctgatctttagggatttagaagcgaaatgaatgcaaatcacgtctcatagctgacttaaacctgtcaggttagccctgtcaggttagcattaaagcatttcattaaaaaaaaaaatcctctagccctgtgacagcagggacgaacatttatggattttccagtagattgtggctcagcaattcattagatctgctttgtccccaggaagcattttaaaatatgtataaatctctgcttttctctccattagattaaccactcattctggtagggggccccaggtagtttttattttcttttttgcctttcatcttggagttgccaggagttgccatcatgttatgaaggaacagaaaatgagaagctttcttaatgggttttcgacatcctgtcctttgccagagtgaggcggtagtgaatgccagccagctttctgcagggagaggtgcagggtggacgcaaaaatcaggacgcaggagacagcactatcatttggggaagtggtttgtgtgagttttatcttttagcgggcatactaatggtacttttaattttatttatctctatgaggcacactccccaaaccataaaattacacatgaccatcccccacttgaagaagactgaacatagtttgatgattattctattcaaggatcaagtacaacaaaatataatttgtaatacagatgataaaacctttcaaaaatctcccccttcctcatttttttcctcaagagtctccaggtggtactttctgtgatggacacaattggcagtaatgcactgagttctttctaggtttattgatcaaatcttatgtctgggctttagtagcttaggggtgcattagagggccctgagagggagcaaatcatggggctgtgcaggcaggaaaggcacttcactttgcagaagtgtcagtgtgcttctggaaaaaacagttacaaagaacagagagtgtttaagttgtttataggatgcatgtttcctgaatttggcatttggttcagatatttggtaattacagatttaaaattcgacatggttgtataatttgttttgccttttatttatttttttaaggttgcaaccttttaacctgaatcttcagtgtttggctcttgtaggcttctatacgtggtgacttacgtcagtttttgacctgactgccttgtgttttgagaaatgattagttcttcagggtttctgactcattaattgatctgttttatgttgatgtatataatgacttggaagtaaaaatattgtttgccgtgggatattgttgtctttttcttatggttaattcctggcataatggctttgctcctttattataaaacattaagatcttagatatcttgctagtgttcaaaacattacaaaactctttgcaagtaaaagtggagtgggaatgggagttggatagaaaaacatgcatcataaattaaagatttggattacaaaataatataacgtttatttactcttcttt

SEQ ID NO: 1885104 - DNA, 4001 bp, Homo sapiens
ttcataagaacatagtcatatttaatcacttagggcttactccaatgaaatcatcttagcttgatcatcaacaaagatcttatttttaaataaggtcacattcacagatactaagattaggacttcagtgtcctttgaggggacacaattcaacccataacactatctatcttgaaaaatcaccagagaggataatttatagccattggtaaaatttatgcaaatcatacaatttcccttcagtcaatgcatttattctgggtgccatatttagatgataggctgccaaaagtaatgcaccgtgaatattctttttctttatattataaaagctattcaattactcctggattttccaggaactatggttctctagttccttataaatctcaatggtatttttctgaatcttactgctttccttttatttataaatactagactctcccactttaagcaaatttctaaagactggggtaaaagatctcttttgtgagcaaagtgcatgtctagggccctgttatttaagaaatttaagatcatcaatttcaaacattcaaagcctatactgctggttcatatttttcactatccagaacagtaatcttcacaatggttagctgtgttctctaaaagtcgcagataattgttatcacatttaaaatcaagcacccatcacaactccccagttctttcttttaggaaaacctaaagaaaccttggatgaccttaagactctatggaaaagctggaaaaacactgacccagaaaacaaatgtgtaacaagtcacattttttccattacttaagggaaattgtggtgcgaatttttttcttaatctctctgctaagtgtaaatatgtgactcacccgaactacctcattcttagaccataaatattaggagtgatgacttataaggggctcatgttcatgtgtggtaagtaaatacttgtctgcacatattaatttaacaagaaaatggcattttcctaagtagcataacatcagaaacagtagagaatttaatataagtaaaaagcagtgttatattttaagaaaattactatgatgaaagaattcatttttttcaaagagtaatataataatattaggctttaatacctaagaacatgcatgctagatctggttccaatccaaaaaagttctatgaaacttcaaataccatgtgaaggttaacttttaaaaatacatttcttcagagcaaatttctattcctagtccatgcgaaaccacagggtggtgctccagctggactggtttcctcaattcaagttatccttgtccagtttccttcttagggcactgctacatgaaaacctgatgtgttctgtgttcttgcagcaaactcctactgtgtcctatcttggctcaggcaggacaaaatgaagctctccatctctaggaggtggcttgcttcagagccttctctgtccaaaacaagagttttttccatattgtttctctctaggcttttgaaattagaggggaaacactatggataatagcttcagaaaatatgaaaagctcacctattacagcagatgggactgaagtatcagtccatatctaaggcaggtgaattggtgcatttgaagcattccaagtcagtaggacagccagaaatatgaaatgaaaagcactagttttccttagcaatgaaattttgactcctatgactttgctaatgctgtgttctgctttcctttctgcctattctatttgtacaaccttctgtgccttcctcagatggctttccaaaacatctgtgggcaatattcccttcactgaacagcaatggtactttaagtgcaaaacaaaacagcatttaccttttgcaatttatagttcctgggttatttcatgtgccttgtggttatctcaggagccctttattaatctccgaactgtaggcaagaaggtggtcttgttgtcatggtaataacttcagtacttagcacatggaacgcagcatttattgtaaaatacttttccaatcaaatggttgcagcagttttagaagtcataacagtaagggtagcatgcagttcatgaattccttcatcaggaggaaaagactgacctgatttataaaggaaaaggaagcataataaaagtggaattctgttaacctaaccatattagttctctttgcttagagttagggggtgtccaatcttttccaagaaaactttgtatattctggcagtgccctctggtggatgatttactatgatccactaccattcagttcctggacattacatttcacctgaaagatttctaccttttgttaccacttagcatttttccccccatctcaagatgaatagtgttttctttcaaagtttcttgaatatctacatctacaatctacaacaaatgccactggattgtggtttgtaaggaatatctaaggtgaattccagcaaagtgaatatcagtttctaccacttattactttcaaagtcattaaattgctaatatgggtgcaatttggctgttgcgtggaaacacttggcttgggtatgtttatgtaaatggttcaaagctgtggactgtgtatctggcaagctgcttctaagaaacaaaggagaaataggcatgttttccatttaaaagacatgtggttcttattgacttaccgagattggtttttgtttttgctttgttttattttcaaagtcagttttccactctaagattaagtgtgttcattatagaaaacgtagaaaatacagaggaaaaaaatcacccatagtcacaacaaaaccaagactgattttggatgtagcctacggaggtagaatgctcccctggggtagattttagaaacaggctgtagtggaccaaaggggagcatggcattaagtttccacaagctgttttctgtatttataaagtacaataacaatattgcatgtattatgtactttcattttctgtctcaaattaggtatggagattgcataataataatagcagccatttatttagcacagaatttcaaagcctaaccctagagttgccctttgcctcctggtgaacagcagttcagcccacactcaattcttccctataacctcccacatctctgccaggatttattcttgtaatagtaataactgttgtttaacaggtcctcattacacaagagaatgcagcgattaatatgcagcctgtttgaattccaattctggcttttccacctaatagctgagagatcttggatgagtaattaaagtctctgcttcagtctccttctttgtaaaataaaggccctgccacacaaggttttttggagaaaactaagtccctagaacagatctgggaacataaatgttagttatcattgttaacatattacgatgatatattagacatgatactaagttccttattacgccatttactcctcataacaatcctatgagttagatattctttatccctgtttcaggtaatgaaaatgaaacagagagctccaatgacttgcccaaatcacacggcaagttacaatgttgagcctagatatgagcctacatttgacggtctataaagtttcagctcgccatcttgttttggctctgataggttagctattattttgcttgtttgtttaatttgtattgaagtataaaatatatttaatatataaaaatgcatattacacagtttacactgtgtaaatattcccaaatgaaaaactcctgagatatcatcactgcatctttaccagatcccatccaaaggtgactactaagctcccttctaatatcatagctgtggtccaaaagtgagcagtcttggccttgtacctactctccctccccgtcctttcccccagtagccttcaggggggttcacagaccaaagtagcatagtaggagaaccactgtctataccctgcatatgcaaatgcattcatctcagtgggttgtaactctcaggaaggaaggattctaaggccatagagcgca

SEQ ID NO: 1885105 - DNA, 4001 bp, Homo sapiens; identical to SEQ ID NO: 916780

SEQ ID NO: 1885106 - DNA, 4001 bp, Homo sapiens
tcaagatctcgttattgtaaatactcaaagtatcattaacctctaatgtttcaatttacagcaataattcaacatttgtttgttttggagacggtgtctccctctgtcgcccaggctggagtgcagtggtgtgatcatggcttaccatagcctccacctctcggcctcaggtgatccttccacctcagcctccagagtagctgggactacaggcacgcaccaccacgcccggctaatttttagtagagaagcggtttcgctatgttgccaggctggtctcgaactcgtgacctcaagtgatccacccgcctcggcctcctaaagtgctgggattacaggcgtgagccactatgcccagcccacatttgtttatttgattaaaatgtctgtgcccctcttccaggattgggctgtgagcccaggggaaggaaagaaccttgtctgccattgtatcttcagggcctagcggtgcctggcgcacagcagttgctcaactagactggttgactaagtcaataaataaagcactacggtctattatatccgaaggcttggcttcgggaggggcaaaagacaggtttcgcgctgaggtagggttcatggtgccgacattttttttcaagatggaagaaagcggagataatacgcagccctcaaaggaacttagtctaatcggggggagcagacgatcgttcactgtgggaaaatggggtacgatttcccccagtgaggaaatcaactaaagccgagctttgaaaaggggagcagaggagcctgaggggaagcgggggcgtgtcgcctggcgtgaccagcgcggcaggaaaagcgggcccagggacccgggcctgtcacgccgcttccgcgcgtccccaaactctccctcggctcgcccacccacgcggcggggacccctccggcccctccccggccccacggccacttcttcccccacaagccggcctgcggtccgccttaccagcccgggccggacggggccgcagctcctggcagaccgcacagccttcgagcccggaatgccgagacaaggccggcgccgattggcgacgttccgtcacgtgaccttaacgctccgccggcgccaatttcaaacagcggaacaaactgaaagctccggtgccagaccccacccccggccccggcccgggaccccctcccctcccgggatcccccggggttcccaccccgcccgcaccgccggggacccggccggtccggcgcgagcccccgtccggggccctggctcggcccccaggttggaggagcccggagcccgccttcggagctacggcctaacggcggcggcgactgcagtctggaggtgagcgggatgcagcaatggagtcccaggcctggcctgggcacaggcggggagcaaggcctccgggcgcggaggtcagggcgtctagcagcagggcacgggccacgagtggagatttgggtcacacgggaagaatctgagccagggtgcaagttttttctgcgtccacctcctggccgtggccttctcactgcttaaagcgccccttggccttccctggaagtctgacctccgcaccctgcccgcggcctcgggagggctggggtggcctaccttcttaggccgactgtggctgagatgaagactgagattgtactacattgagtcaaagaccaacctgcatacacactcccctgctcccaggctgtctcaccactaggcaacaccgcctccatcttacttacccttttgcagggcccttttcctggttcttgagaatgtagcaagatttccccgctcaggatggggatgggtcggaggagccactctggaagtttcccgggcaagaaagtgttggcaataataataacgggctggtcaggaagtagaagagaaaattaagacttagatatcctgtggaaaaagaggaataatatctactgattgatgcggggagagagggaagcctggaaagatcggaggtgaaagtaaaactgagatttgaaggtagaggtgtggagggcctgtgaactctatgcagatgacaaatgtcaaaaaagtgcagttgcttttcagggagagaataagtgtcctaaaaaagagacagccaattcctctgtcttccaaagttccgtgaaatagaattacacaattttgcttaatggtagaatattccatgtatctattaaaatcaacaaaaggccgggcgcagtggctcacgcctgtaatcccagcactttgggaggccgaggcgggtggatcacctgaggagttcaagaccagcctggcaaacatggtgaaaccctgtttctactaaaaaaaaaaaaaaaaaattagctgggcatggtggtgcatgcctgtaattgcagctactcgggaggctgaggcaggagaatcgcttgaacccgggaggccgaggttgcagtgagctgagattgcgccattgcactccagcctgggtgacaagagcgaagctccgtctcaaaaaaaaaaaaaaaattaaaaaaaatcaacaaaagacttaaaaaaaaaagactacactgttagcatttcagaaccaccttagtgtaatgatgatagctcattgtggtactaagaagacaggggttatagtcttatttctggaaaagaaattaataaagtggcatgcttagttaaaatatatataaccacatgcaagtactaaaatgccactgtataaatacaatacaaattgtaaaagaaaacatgctttttaaattagagcaagtataatagcctgtgaaataaatgtcaccctctagagttgttcagtgcacaagctgcacaactttacatgggccttcagtagaggtttccattttatgtgaggttttgtaaactgggagatgatttttccagtagtgtggcaatagtacaatctgcctttcttccctgattctgtgtgcactggtcctatttacaaagtaatataaaaatcaaaaggcttggccagacgcggtggctcacgcctgtaatcccagcactttgggaggccgaggcgggcagatgacctgaggtcaggagtttgagaccagcctgagcaacatggtgaaaccctgtctctactaaaaatacaaaaactagccgggcgtggtggtgggcacctgtaatcccagctactcaggaggctgagacgtgggactcgcttaaacccaggaggcagaggttgcagtgaactgagatcgtgccactgcactccagcctgggtgacaaagtgagactctgtctcaaaaaaaaaaaaaaaaaaaaaattaaaatcctttgtcttgaatggattatgggatcagagtttcatcaggactcctaattaccatatgctttcctattctagcatcttccatttctgtccatacagtcattgcaagtgatctatttatattatagtaggcaattatagagatttccacatatttgtagctatcccatccatttctgtagccaaatattctgaagcttcaaggagatctttgtcttatctccaacccagtcccatttttgccctttgaattgcttctgtctgctgtaattttagccttcttttgtcagtaaagcttatctccttattatctgaggtctttacaaaagtccatggaatgtttacctgggcctttaggctcatgttcctggtcatataaagaggagcacctttctctaaaaggacctcttctcagcctaaacaatctctaacatcttgccactatttgcattttccagggtccacacttgtgattctcaatggagagtgaaaacgcagattcataatgaaaactagcccccgtcggccactgattctcaaaagacggaggctgccccttcctgttcaaaatgccccaagtgaaacatcagaggaggaacctaagagatcccctgcccaacaggagtctaatcaagcagaggcctccaaggaagtggcagagtccaactcttgcaagtttccagctgggatcaagattattaaccaccccaccatgcccaacacgca

SEQ ID NO: 1885107 - DNA, 4001 bp, Homo sapiens; identical to SEQ ID NO: 916786

SEQ ID NO: 1885108 - DNA, 4001 bp, Homo sapiens
caaatatttgcaaaagacacttctggaaaaggcatattatttaaaataatacaagaacaattaaaaacaacaatttaacctaaatttttaaaatgggcaaaatatctgaacagaaaccacatcaaagatatacagatggcaaatgggcatatggaaaggtgctgcacattatatgttattgggggcataaaaattaaaacataagataccactatgcccctattagattggccaaaattcagaacacggacaccaccaaatgctggggaggctgtgaagcaacagaaactccattcattgctggtagaacataaaatgggacagccactttggaagacagattggtggtttcttacaaaactaaacatactcttaccatatgatccagcaatcatactccttggtattcatccataggagaggaaacttagtgcccacacaaaaacctgcacatgaatgtttatagcagctttattcataattgccaaaacttgtgggcaatcaagacgtccttcagtagatgaaggaataaataaactgtggtatattcagacaatgggatattaatcagcaataaaaagaaatgacctatcaggcctccaaaagacatggaggaaccttaagagcatattactaagtggaagaagtcaatctgaaaagtccacatactgtatgattctaactatatgacattcaggaaaaacccaaaactatggagatgttaaaaagatcagtagttgcaggccgggcgcggtagctcacgcctataatcccagcactttgggaggctgaggccggcggatcacctgaggtcagagtaagacaccagcctgaccaacatggagaaacctcgtttctttttttttttttttttaatttatttatttttatttttatttttttttgaggcggaatctcgctccctcccccccggcggggctgcagtggcgcgatctcggctcactgccagctccgcctcccgggttcacgccgttctcctgcctcagcctcccgagtagctgggactacaggcgcccgccaccacgcccggctaatttttggtgttcttagtagagtcagggtttcaccgtgttagccaggatggtctcgatctcctgacctcgttatccgcccgcctcggcctcccaaagtgctgggattacaggcgtgagccaccgcacccggccatttcccagtaaattcttgactccttgactgactcatcattttaaaatatcagtactcaacgcagtgcctggcattgagaaggaaaccgactataaatgaagtacaggtcttagttattaggagcctttcatcctgtcaggcatagttcaatattcttgctacatgaactatattagcaaccaacgggaagtgtaaaccccttggaaagaaaagcagttcgacgacaagactctggaggttatttgttgccctctcgtgtcccgatttaggaactacatgttcttccctccactttgaagaattctgattcctttaattttatgtgttttttaatgcatgtattgtaagaaatacacttgtttctttacaccctcacacagaacacttttgacaccagatgtgcgagtttttttccccacactgacctattctccaacaccagctgggtgtcctacaatccaactcaatactgacactatctacctgcagtcaatgtcagatcccacaagtttagagctgagtcccacaagactgctcccacccagatgccagttgaaagtcccggtacttccgactgaccagctataaatttgggggttcccatgaccttctccttgagttccatcatttgctagaatgcctcacagaattcaggaaaacatattacttaccagttgattatggaagatgaacagccaggtaaagaggtctgcaagagtcctgagcacagacaggggcttctgtccctgagttagagtacaccaccctcctagcaggtggaagcagcccacgaatccataaacccggaagctcatcaagacccactgttcatgagtttttatagagctttatttccagccccctctccagcctgcttcccgaaggtcagtgggtggggctgatagttccagtcctcttatcccttggtctttacgtgagcagtttcatccggaataggagccacaccttacgtcatgcattaacgtagcacaagttcaggtgtgactgatggttacgcaacatcaggggcttgttgtgaataacaaaagacactcttatcactcaggaaattccaaggattttaagatctctgtgacaggaaccaggcccaaagaccaaatgtatttcttattataccacacttattcaacatattttttttttgtacaattgtttgtttacattggcagcagccctcaaagcactggtatatgaagaccagaaccgccagacacagtggctcatgtctgtaatcctagtactttgggaggcggaggagggtggatcgcttgagctcaggaatttgagaccagcctaagaatggtgtccctatgctatggtgaaaccccatctctacaaaaattagctgggcgtggtggtatggacctatagtcccagctacttgggaggctgaggtgggaggatcatttgagcccaagattgtgccactgcacttctgcctgggtgacaaagtgagaccctgtctcaaaaaaaaaaaaaagaccagacctgaagaacagcagctctgaccccaggaacaaggggcttgtaatacacaatgcttcattgtaagtttgtttcctttagatggatcttttagatgtagcacacaaaactttttagaagacctttccgtaatagatgaaggtcaaggtcacacattaaaatctgccgtaattggcattttgctgggaatgagagtccctggctgtctcaggaagatctctagcgacgcttttcatcttaactgaatgaggcagtgccctctgcagtccaataacttcaatgcctgaacccagacagtatagcggtgttacaggaaaggggtccccatccaaacccccggagagggtttttggatctcgcgcaagaaagaattcagggcgagtccacagtgcaaagcaaaagcaagtttatcaagaaagtaaaggaataaaagaatggctactccaaagacagagcagccccgagggtgactggttgcccaattttatggttatttcttgatgctatgctaaataaggggtggctggctgggcgcggtggctcacgcctgtaatcccagcactttgggaggctgaggcaggcggatcacgaggtcaggagatggagaccatcctggctaacatggtgaaaccccgtctctactaaaaatacaaaaaaagattagccgggcgtggtggcgggcgcctgtagtccccagctactcgggaggctgaggcaggagaacggcgtgagcctgggaggcggaacttgcagtgagccgagatcgcgccactgcgctccagcgtgggcatcagagtgagactgtctcaaaaaaaaaaataaggcgtggcttatttatgccttccctttttttgacatatagggtaacttcctgatgttgttatggcgtttgtaaactgtcatggtgttggtgggagtgtagcagtgaggagtaccagaggtcactctcatgtccattttggttttggtaggttttggctggcttctttactgcaacctgttttatcagcaaggtctttatgacctgtattttgtactgacctcctgtctcatcctgtgacttacaatgccttaaccatctgggaatgtagacccgtaggtttcaacctcatttacccagctcctattcaagatggagttgctctggttcacatgcctctgacagcaggatgactcgcaggcttcgctcaggcctcacctcatctttcactagttgctgtgagaagaaatctttttcttggtttttaaatatgaatacaagaccttattgttcgtggtctaaaagagaatacatagtagataagagg

SEQ ID NO: 1885109 - DNA, 4001 bp, Homo sapiens
ctgacttgcatgcctctttggtttttctccttaaactacaaactatcatatcaaatattcttccctttaagacactcctaattctcctaaggaagtgtcaaattaaagtaggcgcaatctggaaatactcactgttttatctcaagagttcaatgcaattgcttgagctgagataaatgcatgaagacttttctgaaataacttttacataaggataaaatgatttctatacaagaaacaattaccagccaacattattatcaccagaaaattgtaagctagaatgagcaataaaaacattgtatttggaacgagatattagagaacagctattaaaacattttactcaatttctattacaccttaaaatgaaagtcatcaaaatgtcattacaggccttttccccagattcttcagagagtgaatttaatcatttcaggaaattgagcactatccaccattcacttagatcctttgaaataacagcaaagcaaaacacaatgtgaaatttataagacactttatattaaaatgtgttcatatacataatagatacataccgaggagtacttgtctccaaatacctaaaattaaatcttgggaaattaaccacttatataaaatattaccttcaagaggacttgaagtaagaaacccaagtaaaggagccacaagttgagctctgtaaaaccccagagttaataaagcactaacatatcagggcttttttaataccttcaaaaatcaattatttggaaattacttcaagccacaatgattacttgtacgccgaagcatggaacttttgctgctgctctactaaagaaagctaaacattggttgaataagtgcgattacaataatataggcatgcttattggctcctttagaaaattggtacttcgtaaagaattttcaagccagaagagaccttttgacatcacctaaccctggttcttaatttactagttctagaaataaaatccacataaaataaatattacttttattgatctccaaaatgatcattgtctctaaagaaataaaaagctgcttattttcaaggctgaagggaaacagagggagcacctgcttgcattttatcaccaaagctagccaatcttcagaaaatgactaacaatcaaattctctaagctcttctctttaaacctttaatatttttaaaaaatcaaattttaaataattataattagagagcagttttccaatgctactggcaagaagtagaggaaacggtttgaaaattgcacttttaaaaatgttgaatttttaccttttgattcgaggaggatgtcacttctcatggaacccattttcctgaagatattcagcgctggccgatttagaataaaactattagcatattacttaaaaaaaaactttactacaaagccacaatctcactcgaaagaaagctgatggtgctcataagcagtaaatgcctttcctgatacctattttgtcatcagcatcttattagcagagtgcatgttttctgcagcatccatcaattagccgtttttaaggaaacgggaaatggataagggctcatctgctaagcaaggctgtgtactccatagcctcttaatcaccaaggctcctttctaacaaggttctacaagacaaggaagcctagagaccattaagtagcacacaaacagactattcccgggagtcaccaatattggatacaactttcccccaaagaaccagcctgcgactgaaggcgacagagccgcccgtagcagagccgcagcacatctgccagcttgtgccttagcgcttggcaattgcaaagcagatcccaataccatcagacaaactactcctgacttcttactcccccagcagaatccaggcatttggagagagcctgccggtttcacaggcaccccaactagagagaaggtaaggagatggaaggctcaccctttcatagtcaatccacctagagctgcatcatccgaatcacaaatgaaatgctaatgtacaagaaaatgaatgccaatctcctccactttgctccaagtttcagtggcccctccacaataaaagatagctgtttgtggaggctgccttgttccataccattaactcagaacaaaacatatttttagtgggacagcagtgtttacttgtaagaactgatgaattgctcggcaccatttatcacttgcagacaaagacgttcagccacgattttggacataaatcaaggtacatgctcctcaataagaaaaaaagactgctaagtccccaaaaccacggagattgaggtcagactggccatagcaaccaccaacaggacttgggcctccagaaggacctagcaaccgataaatgagttcagatctcttttcatctccactggtgtgaaagccaaaattaaaaagattagatcaccctgcacccattacaaaaggtgccacaatgaaaaagtcatttccagcctttgaatcacatcaaataaataacattcatccctgctataatgaacaactttcaaagtaaattgaatctccatagtactgctttccctggctgaacagtatttacataacaatatatcacaggaagctccgaatggatcttgtaaatggggacctggggataaaaaccatctttagccccgattactgcatattcagactgcttttcggtccccctcatttaaacaatgtgttgtatcaggaacataaacaatgcttttaaattgtgggaaatgaaagtttttggtacatttttaaatgtctggactcatcccaatagactcccttttgtggggcactaagaacataaaaatcacttaacctcctaaatcgatgtcctggactcatttttgtgacaaagaattctcatctatgtgtacacttgcttctttgttcatgccagcaatgtttcactataaatatctgctgagtttttttgtattacttgaaatgaaaacacatttgcagatttctttttagcgtgcgactcattcattatttcttatttcctcgaaagtataagatattctctattgccataacaatgtctattaagttttagtaatatctctacacaaagtgttcatcctctacagtctaattttgagtcaatttctcctcatcattaaaaaaaaccaactaatttccaaaaacatataggcttccataaactattgtacatttcatatatatttcaaatggagtatgttccaaataagacagttaaatctatgttgaaaacataccatcataatcttatctttttgtgacagctcacgtagatattactatttgaactccacagggaatctcattaatttttgaaactctctgacctcagtacagttgagtgtaaaaataattacaaattaagaatgaaagagcatcccttgaattctgcatggccatatgctcttctacgttgcacaaaacattgctaactatcatcaaacagaatttttttccagatataaatttaaacagcgtgctgaatatcaccagacagacacaaaaagcagctcacccttccactcagctccgctcacacttcacctccgacgattccagtaacacaaagcccggagaacacaggtttgcaggcaagtgacagcacagatgataccctcacaaagatatttccctatccagagttgctttctatcccaatgttgcagacacaaagtgcagaaatacaagaatcagggcataaatattttcttacctaaaacttgtccgaaggacagtcttgttattgttgtcacctccggtgccccctctcgccatcgcggaaatcggctccactgtgtgtactgctctgtgcctcagttacagctgtgacactcatctgcctgcatagaacctatgacgggaaatgagagaaagagaaagagaggatttgcgcttgtgtatgtgtgtgcttgtgtgtgtgtgcgtctctgtgtgtgtgtgtttcagagagagagagagagagagagagagagagagagagag

SEQ ID NO: 1885110 - DNA, 4001 bp, Homo sapiens; identical to SEQ ID NO: 916800

SEQ ID NO: 1885111 - DNA, 4001 bp, Homo sapiens
gagccgggcgtgatgttgggctcccgtaatcccagctactccggaggctgagacagagaatcgcttgaacccggaatgtggaggttgcagtcagccgagatcgcgccactgtaccccagcctgggaaacagcgaaaactccgtctcaaaaaaaaaaaaaaaaaaaaaaaggaagactttggatgtattaatgtgttagttttagagttccccttccctttaagggaatctgtgaccttcagtgacaaaggaagtggagtagctcactcgctggctgcatttggataaaaaagattaacgataactgtcttagttagaacccagttcccaacatagtgtcatacattttggaaaacaactcacagtacccgcacagaaccccggacattcaatcacggaatactcctgaacaacaaccaaaaaactatcataggaacagctcataacttatcaaaccaaacataagacacaacctgctataatacaacttcctaaaacccttttctttagacttttaaaaattcagtctccgtagagactgtcaaaaattgccaatgccgactatatttcaagtcgtcatggcggggtattgggaaaagttttcaattagcaataatcgcgcctcggataaacctcattggctacgatactgccactgcgcaaagctggaaaggttctgttcgcgccccgctcccccacggatgatgactaccattacattgagggtgagtgcctgcccgtgtgtccgtgtatacgacgtgttcccactccaccagccgtatttaaggcccatctgcataggaggtttcttgttgttggaacatcccgtgtcaaacattcaggttttgaaaaccataagaatattcgcttgggacgctggggaatcttatgcaaatcaacgtgacgtcacagagatgactcggttgagacttgaattttgagcgaggagagtgagcagtgggaaagcgagcctggagggcgcagacggacgactagctgtgctcgagggtgcggaaacagcagggtggggggagttgggaataattttaggacgtcactgtgacaaaatctgaatggagaacacggctgggcgcggtggctcacgcctgtaatcccagcactctgggaggccgaggcgggtggatcacgaggtcaggagttcaagaccagcctggacaagatggtgaaacggggtcgctactaaaaatacaaaaaaatcagcggggtgcggtgggcaggcgcctgtaatcccagctagtcgggaggctgaggcacgagaatcgcttgaacccgggcggcagtttgcagcgagccgagatcgcgccagtgcactccagcctgagcgacagacttcgtctcaaaaagaaaacaacagtgcgagagaaagaaaacaggacagccagctggcaagaaaagtcaacaccgccctgcatttaccttaaaagtagagatcacaaaatcagcaactccaactttcacaaacggaaatcgctaaacaggggttcggcaaagtttgcagcgagccgagatcacgccagtgcactccagcctgagcgacagacttcgtctcaaaaagaaaacagtgcgagaaagaaaacaggacagccaactggcaagaaaagtcaacaccgccctgcttttaccttaaaagtagagatcacaaaatcagcaactccaactttcataaacgcaaatcactaaaacaggtaaacttgcaggtgctctcgcgaatcagctggtaagacacttccccatctctcatttagagagtttgcgaacaagtactcttcaacctcccaaaaccaagcacccccacacacacaaaaaaagcctctgttgttcaactgcaagaaaattcagtctccgtagagactgtcaaaaattgccagtgccgactatattgcaagtcgtcacggcggggtattgggaaaagttttcaattagcaataatcgcgcctcggatagacctcattggctacgatactgccactgcgcaaagctaatttgttacgccccctgctcatcactcccaataaaccagcttcctatttcgcaaaggtgagtttagggcctatggaaaaatcttcacttattgcttgcttgaaaattatacaatcatagaaagatgtttgtgacctgcgtaggtggtttctgcatatcgttgctgatttcacttagctaggtttttgttgatatgaagcaaagcactatgggaggaacatgctaatagacttaattcagagactgcgaagggcttttgagagaaaagggatcaaaatcagggttctgttcacttggctccagattcagtgtaacagacttctccaaagacgattattgttttgtcttttttctttttcaaacttttttttaaattatgccaaagtatacataaaatttaccattttaaccttaagtgtaaattcactggcatagaatatgttcacattgttgtgtaaccatcatcactacttacctccagaactttatctttcatgcccaagggtggaaactgagactctgtacccattaaacccttactccctgttcccttctcctccagcccccgtggcaacctcttttctactttctatctctatgactttgtgagtactttatatatatataaatggaatcatacaatatttgtccttgaggtcagtcttatttcattcagaataatgtttttaaggttcatccatgttgtagtatatatcaggaattcattaattttatggctgaataatatttcactgtatgagatgttatctttttttttttttgagatggagtttttgctcttgttgcccaggctggagtgcagtggcatgatctcggctcattgcaaccactgcctcccggattcaagcgattctcctgcctccatctctcaagtagctgggattacagatgcatgccaccactctttgtatttttagtagagacaggatttcaccatgttggccaggctggtctcaaactcctgacctcacgtgatctgcctgcctcggcctcccaaagtgctggaattacaggtgtgagccacttcacccagcccatttattcttgtctatttttttttttgagacgaagttttgcttttgttgcccaggctggagcgcaatggcgagatcaacctccgcctcccaggttcaagcgattctcctgcctcagcctcccgaggagctgggattatttttagtagacacggggtttcaccatgttggtcaggctggtcttgaactcctggcctcaggtgatccacccgccttggtttcccaaagtgctgggattacagccgtgagccaccgcgcccggtcccattcattcttttttgagacagcttttggctctgtcgcccaggctggaatgcagtggcgcgatctcagctcacttcaacctctgcttccaggcctcaagtgatcctcctcccacttcagctggatactttctgtatttttcgtacagacaggatctcaccatgttgcccaggctggtctcgaactcctgggcccaagtgatcctcccatcttggcctcccaaagtgctgggactataggcatgagctgccgcccggaccaactgtttatcctttttttttttttttttgagggggagtctcgctctgttgcccaagctggagtacatagactcaatctcagcccatgcaacctccgcctctggggttcaagcagttctcctgtctcagcctcccgagtaactaactgggattacaggtgcgtgccaccaatcctggctaatttttgtatttttagtagagacagggtttcaccatgttggccaggctggtctcaagctcctgacctcaagtgatcctcctgcctcagcctcccaaagtgctgagccacggcgcccggcctatccatttatttttagatggtcattgctggtttccaccttttgtctatgggaataatgctgctattggtgtgcaaatatcagcttaagtttctgttttccttttttttttttttgagactg

SEQ ID NO: 1885112 - DNA, 4001 bp, Homo sapiens
agatcctcctgccttggcctcccaaagtgctgggattacaggcgtgagccaccaggtccggccaagaacccatctctaataaaaaatctgcaataaacagtaagtcgagttttcttctagcgtgtgatgatgctaattatacaatgctacatttcttcccctgctgttcaagctgtggaccctggaccagcacctgcgaacttttagaaatgcagaatcttagtctccatcccaggcctcctgaattggaatctctaggaatggggattcgatctgtgtcttaacaaattctcaaggttatttttatgcacgccaaaatttaagaaattgttgtagtttgattttgaaaggacatgcactcttcttttcacgttatttctaagttttggataacttttttttttttctttttgagacggagtctcactctgtcgcccaggctggagggcaatggcgcggtcttggctcactgcaatctccgcctcccgggttcaagcgactcccctgcctcagcctcccgagtagctgggattacaggcgcccacgaccatggctggctaattttttttttttttttttttttttgtatttttagtagagatagggtttcaccatgttggccaggctggtcttgaactcctgacctcgtgatctgcccgccctggcctcccaaagtgctgggatgacaggcgtgggccaccgctcccggcttcttcttctttcttttttctttttttttgagacagagtctcactgtcacccaggctggagtgcagtggcgcaatttcagctcactgctaccttcgcctccacgtctccagtctgtgaggtccttgaactggggactgagtttaatttgccactggagctgtttttcccagcaccgtctttgaccttgtaggtactgttgccaccctttttgccacctctttttgctacaggctggaggagtcttttatgggcggtgtcctaagcaggtccagctggatccgccatgcccagagttgtgactcctgaggacctctgtccatggacagcccaggtcttcgtaaaaaggtaagactggaagaggctggtgtagtgggaacaagtaccacactaggggcaagagaacctgataagccccagctctgccgaggactccacagtaggacctgagcaatcttctgtgcctttttccctcttggtcgctttaaaaggaagaaaacgcggtggttcacacctgtaatcccagcacttcggaaggccgaggtaggcggatcacctgaggtcaggagtttgaaaccagcctggccaagaaggcgaaaccccgtctccactaaaaatacaaaaatgagccgggcgtgatgttgggctcccgtaatcccagctactccggaggctgagacagagaatcgcttgaacccggaatgtggaggttgcagtcagccgagatcgcgccactgtaccccagcctgggaaacagcgaaaactccgtctcaaaaaaaaaaaaaaaaaaaaaaaggaagactttggatgtattaatgtgttagttttagagttccccttccctttaagggaatctgtgaccttcagtgacaaaggaagtggagtagctcactcgctggctgcatttggataaaaaagattaacgataactgtcttagttagaacccagttcccaacatagtgtcatacattttggaaaacaactcacagtacccgcacagaaccccggacattcaatcacggaatactcctgaacaacaaccaaaaaactatcataggaacagctcataacttatcaaaccaaacataagacacaacctgctataatacaacttcctaaaacccttttctttagacttttaaaaattcagtctccgtagagactgtcaaaaattgccaatgccgactatatttcaagtcgtcatggcggggtattgggaaaagttttcaattagcaataatcgcgcctcggataaacctcattggctacgatactgccactgcgcaaagctggaaaggttctgttcgcgccccgctcccccacggatgatgactaccattacattgagggtgagtgcctgcccgtgtgtccgtgtatacgacgtgttcccactccaccagccgtatttaaggcccatctgcataggaggtttcttgttgttggaacatcccgtgtcaaacattcaggttttgaaaaccataagaatattcgcttgggacgctggggaatcttatgcaaatcaacgtgacgtcacagagatgactcggttgagacttgaattttgagcgaggagagtgagcagtgggaaagcgagcctggagggcgcagacggacgactagctgtgctcgagggtgcggaaacagcagggtggggggagttgggaataattttaggacgtcactgtgacaaaatctgaatggagaacacggctgggcgcggtggctcacgcctgtaatcccagcactctgggaggccgaggcgggtggatcacgaggtcaggagttcaagaccagcctggacaagatggtgaaacggggtcgctactaaaaatacaaaaaaatcagcggggtgcggtgggcaggcgcctgtaatcccagctagtcgggaggctgaggcacgagaatcgcttgaacccgggcggcagtttgcagcgagccgagatcgcgccagtgcactccagcctgagcgacagacttcgtctcaaaaagaaaacaacagtgcgagagaaagaaaacaggacagccagctggcaagaaaagtcaacaccgccctgcatttaccttaaaagtagagatcacaaaatcagcaactccaactttcacaaacggaaatcgctaaacaggggttcggcaaagtttgcagcgagccgagatcacgccagtgcactccagcctgagcgacagacttcgtctcaaaaagaaaacagtgcgagaaagaaaacaggacagccaactggcaagaaaagtcaacaccgccctgcttttaccttaaaagtagagatcacaaaatcagcaactccaactttcataaacgcaaatcactaaaacaggtaaacttgcaggtgctctcgcgaatcagctggtaagacacttccccatctctcatttagagagtttgcgaacaagtactcttcaacctcccaaaaccaagcacccccacacacacaaaaaaagcctctgttgttcaactgcaagaaaattcagtctccgtagagactgtcaaaaattgccagtgccgactatattgcaagtcgtcacggcggggtattgggaaaagttttcaattagcaataatcgcgcctcggatagacctcattggctacgatactgccactgcgcaaagctaatttgttacgccccctgctcatcactcccaataaaccagcttcctatttcgcaaaggtgagtttagggcctatggaaaaatcttcacttattgcttgcttgaaaattatacaatcatagaaagatgtttgtgacctgcgtaggtggtttctgcatatcgttgctgatttcacttagctaggtttttgttgatatgaagcaaagcactatgggaggaacatgctaatagacttaattcagagactgcgaagggcttttgagagaaaagggatcaaaatcagggttctgttcacttggctccagattcagtgtaacagacttctccaaagacgattattgttttgtcttttttctttttcaaacttttttttaaattatgccaaagtatacataaaatttaccattttaaccttaagtgtaaattcactggcatagaatatgttcacattgttgtgtaaccatcatcactacttacctccagaactttatctttcatgcccaagggtggaaactgagactctgtacccattaaacccttactccctgttcccttctcctccagcccccgtggcaacctcttttctactttctatctctatgactttgtgagtactttatatatatataaatggaatcatacaatatttgtccttgaggtcagtcttat

SEQ ID NO: 1885113 - DNA, 4001 bp, Homo sapiens
cccttcaaaaaaccagctcctggattcattaattttttgaagggttttttgtgtctctatttccttcagttctgctctgattttagttgtttcttgccttctgctagcttttgaatgtgtttgctcttgcttttctagttcttttagttgtgatgttagggtgtcaattttggatctttcctgctttctcctgtgggcatttagtgctataaatttccctctacacactgctttgaatgcatcccagagattctggtatgttgtgtctttgttctcgttggtttcaaagaacatctttatttctgccttcatttcgttatgtacccagtagtcattcaggagcaggttgttcagtttccatgtagttgagcggctttgagtgagattcttaatcctgagttctagtttgattgcactgtggtccgagagatagttcgttataatttctgttcttttacatttgctgaggagaactttacttccaagtatgtggttaattttggaataggtgtggcgtggtgctgaaaaaaatgtatattctgttgatttggggtggagagttctgtagatgtctattaggtccacttggtgcagagctgagttcaattcctgggtatccttgttgactttctgtctcgttgatctgtctaatgttgatagtggggtgttaaagtctcccattattaatgtgtgggagtctaagtctctttgtaggtcactcaggacttgctttatgaatctgggtgctcctgtattgggtgcatatatatttaggatagttagctcttcttgttgaattgatccctttaccattatgtaatggccttctttgtgtcttttgatctttgttggtttaaagtctgttttatccgagactaggattgcaacccctgcctttttttgttttccatttgcttggtagatcttcctccatccttttattttgagcctatgtgtgtctctgcacgtgagatgggtttcctgaatacagcacactgatgggtcttgattctttatccaatttgccagtctgtgtcttttaattggagcatttagtccatttacatttaaagttaatagtgttatgtgtgaatttgatcctgtcattatgatgttagctggtgattttgctcgttagttgatgcagtttcttcctagtctcgatggtctttacattttggcatgattttgcagcggctggtaccggttgttcctttccatgtttagcgcttccttcaggagctcttttagggcaggactggtggtgacaaaatctctcagcatttgcttgtctgtaaaggattttatttctccttcacttatgaagcttagtttggctggatgtgaaattctgggttgaaaattcttttctttaagaatgttgaatattggcccccactctcttctggcttgtagggtttctgcccagagatctgctgttagtctgatgggcttccctttgagggtaacctgacctttctctctggctgcccttaacattttttccttcatttcaactttggtgaatctgacaattatgtgtcttggagttgctcttctcgaggagtatctttgtggcgttctctgtatttcctgaatctgaacgttggcctgccttgctagactggggaaattctcctggataatatcctgcagagtgttttccaacttggttccatcttccccatcactttcaggtacaccaatcagacgtggatttggtattttcacatagtcccatagttcttggatgctttgctcatttctttttatgcttttttctctaaactttccttctcgcttcatttcattcatttcatcttccattgctgataccctttcttccagttgatcgcatcggctcctgaggcttctgcattcttcacgtagttctaaaaatatggaacgcttcacgaatttgcgtgtcatccttgcgcaggggccatgctaatcttctctgtatcgttccaattttagtatatgtgctgccggagcgagcactgtcacataattcttaatccatcttttatgactcttctctttatttgatccctctttagttgtacagctcagtttagctcatcttctataaaaatgtgttgcatcagtcaagaatatatttgactgcaagtaacagaaagccctaacacataatatcttaaacaggaaagagatttgcctgtatcatgcaataaaagcacgggggttggtagaaaaagggcaggatagtaggggctcaatgatgtgattaagactccatctatttccccaatatttccccctctgcacgagcccttcttcaacatgtgtataatctcatagtcacaaaatggatgctgcacctccacgcttatgttcatgttacatgcagaatgatgcagaaaaagactacaatcctcttatcaagtggtggaatctatttccttacccattgagtctggtttggccttgtgacttgccacggccaacagaatgtgaaggaatcaaagatattccagccccaagaagtctttcatgcttttaaaatttgctttgatgccaccaaaacagcctgctagaggatgagaaaccatgtgaggcagagactgactattccagatgagtctacattagactggtgacccctcaactgacccacatctcaccacaacacatgtgtgagccagccaaaactgtaagagctgctcagctgagctccacctaacttggtgacctaaagaatcatgagctaaatagttgttttaagccgctaagtcttgaagtgtgtttttatgcagcaaaagcttactaatacccatgggctcttcagaattgcaccattcccaccccatctgcacctgcaatttccttgacctaaaggaatgcatttctattctggctgaatatttacctctcattcttcattagtagaaattgagtggagctattggcttctttctgctgaactcccttcaccagttttggacaaaccaacaatgagcccaaatggctttctcttgggcgtgtcctacacatgacctcacattcttagctcagattcattctggaggagcaagctgcctaacacagtcaccccttcttgtcttcagatgttgttgtgggtgaaagatcccaatatagtatcccacaaacttagaggatagttatcaagttctctgaatcatcctaaattccttctctattggcttgaggtggaggtggaagtaaccctcctacactttagtaaacgagagagactcatgacacaccagctgcctccaaaactcctctgcaatctccaataatccaactactgctaccctccttggggtgctgggctaagaatcattcttttttaagggacaaggtctcactctgtcacccatgctggactctggtgatgagatcctagctaattgcaaccttgaactcctggatttcaagtgattctcctgcctcagtgtcttgagtagttgttaggaccacgagtaggcaccagcatgcctgactttcttttttttttcttttttttttttttttgtagaaatagggtctcacctcttgcacttgctgagaatcttttaacagatttttaaaataacattcctttcaaattccacattatggtttctcacctcacatcagaatgtgacaccaatttccattttatcatcctgtacactgagataaagtagtccccacatgcagatttaaagtgtattaacaaatactaaagtcattttgggatagagacggagaggggaggaagttagataactgcttttcagaactcagaactgaacagaaagcatgccatgtctcaattcaaattttaatcacaaaactttaaattcacttgaacatcatccttatcacttgggattcaaagctacctgaaggactataaacaaaaggtaatgaatgccagcgaagaggtgtcataaatgttgagacgattcctggtggggtgcggcagaaagcagctgccctacaatgtctgttctgatttaacatcttcattc

SEQ ID NO: 1885114 - DNA, 4001 bp, Homo sapiens
tcctgggcttcgtaggacttgaccaagcgagcaaacttaaggacacctgcaagagggagtggaaggtcaacccttctcctaaggaccagcgtgcctaagacacctggagggggtggtagtctaagcatgaactgctcccccactggctgggcagctgtttgccaaacaggacgcatgcaggcctctgtcccgtgtggtttggatgatgacatttggtctacactgggcacaactagatgggatgcagtgaatgaaaatgtcccaaggcagtgtgcttcttgctctcaggtgaaccattttagcagtttagtcactggaaccccaagaatgaacacgagaccccaggtctgtagctggaactcaggaaggctatgaggcagcagagctgaatcagtcaacacctttggggaacaccaggatctcaccaaaaatttaaccaccaaccccccccaaacaaaaattagctgaaacaccctggagagactgcagccactgctgtcatgcagacatgtcactaaaaggtggcacaacagcatttaagtccagctctgctactcgagagtctgcaccattagagtttgcttcctcatcacaaaatggaataataatgtgattaacagtacaggttgaccatccttaattagaaaatccaaaatctgaaattatgagtgccagtgtgaggccgaaaatggaaaattccacacctgacttcatagtggggggtgggggagactgtagtcaaaacgcagtcaaaactttgtctcatgcacaaaattattcagactattatataaaattaccctcaggctatgtgcataaggtgcgtgtatatgaaacaaaacaatttcgtgttcagatttaggtcccatcccccaagatatccatgtatatgtaaatattccgaaatctgaaaaaacccgaaacacttccggtcccaaccatttcgggtaagggatacagaacctctactgtacaaaacgcaactcggacgcacaagctcagggtagaccctgggctctgagtgccaagaatgttagtcagattgtggctgccgccgtgtggcgagaaaggggacaaccgctcatgggcccacagatccggcgccctctcccgacccaactcccgccttcccgcgtctgacccgccttcccgcgtctgacccaccttccccgtcgcagctgaagccataggctttgataacctcctgctggatctgcgtggccacgggcagcacgaattgcagcatcttacccatgtcgttgcaggcgttatcccgagcctcgtccatgcgcactgcattctccggggcggagaacgcctggatcacctccgcgaggaccactgcgcgccagaagcatcccagggaggcgtcccgggtaggcgtcggagaacagacagcgggcccagcggagagcgcaaggaattagtggattgaggctgtaggtaacccaataagatcccaagtcttgggggcaagcgccccacttagaaggacggtacccggcgtcccctaccccattttcccggcggacgtagccaggtttgtcgccccacatcctccgcccgcatcctccccagaccagcagcccatgccttgactaccccaggccagcagcctatgccttgactaggacgattctcaccctttgcttgctcagcgctcaaggccgccggttgggtcgaggcggacgccatagggcgtctgaagctctaggttcagcggaggtaaatggaaaactcacgaataaagagccacgtcctacaaccgttcccaacgcccctgggagcggaaaggaaacagcatccggcgcagccggaagcgcccaggcgtggcccaaaccttcataccccaagcttacaactgcatcaagaccaccaaaactacccataatttttgcacagtgaaaacaatctatcattggcaacaaacatcataagaggggctttccggtaaaaagccagaaagcctactagacaaattctaaaagagctgtaacactgctgcgtatgtgtttggagagaagatgggatataaaggaactccacaattgatgagggtgagcttaggtgacttttttcttgttcctattactgtataaacaacgacgcatgtggtaactttcagtaggaaaaataatattctaaggaacttacttaagtcattcatttctagagttcgcgaacatttgttctcagcccatgcaaatgagttcggtgctgattggttgagaaagcagccagtcacagccccttcgttgttgttaagcccggagacctggattcggcagtaaaggcccagagcaaaagccgttgtcgcagtttcctaaaggccttgtctattgatgagcgatggagcctaatgcccggcccgatttcccttcccttccaggcttttatcacccactcccttctcaaactgtaggtggttaaggatgccaggtactaatcgcctggacctattaaaactagcccaccccacccccgcttcataaccggctttgttttttgtttttgagacggagtcttgctctgtcgccaagctggagtgcagctgggggggatcttggctcaccataacctccacctcccgggttcaagcgattctcctgcctcaacctcccaagtcgctgggacgacaggcgcgcgccaccatgcccagctaatgttttgtttttagtagagacagggttttgccatgttggccaagctggtctggaactcctgacctcgtgatccgcccgcctcggcctcccaaagtcctgggattaccagcgtgagccgtcgcgcctggcctcataaccgtttcttaaagtattccacggaaaggtttcaggactctgaagcccttgttccggaggactctggtggctcctagcagtgagacccgtctgaatagattcctagaactgaccacgtcagaggtgggcctgtcccaggcctctagtgtttggttggttggggtgtcttttgtttgtttgttttgagatagggccttgctctgtcacccaggctagagtgcagtggtgcgatcatgactcactgtagcctcgacccccaagtgatcctcccacctcagcctcctgagtagctgggaccacaagtgcaccacaacccccagctgattttgtcttaagatggggtttctctatgttgcccaagctggtttccaactcctgggctcaagcaatccacccgcgtctcacaggcataagccacagagcccagaccgaggcctccactggcgcgcagcggtcctgcccagccttggggcaggagggggcaccagcacccatggtaccgcctccagctgagtcaaggctctgggctcttcagggatcccctctccaattcttcccagcccccacaccccgttccttaagaaggtctggtctcttcccgcttccctgccaggccctggctgcagttctctctaagcaccgctgcactgagacccagcctcacccccatatcccgcaaagaatagtcacagccatgttcctggggagttgtgaggatgtttttgtttggttggttttggttgggatgtttttttaagagcgtcatatagatatttatatatataaattattagtgtggggaaggggcaaggggcatacattgcagagggggcgcgcacacagggatcggggaggggcaggggtggcacacgatgctacgcaaaacagccacatctaacagatgaaataatcacaccaacggggcaggggaggggcggcggccacaggggttgggcatgggggaggagaaaagcaggggggacaaggaagagagacctggtccaagattctgtgcgctttctgtccccatcctcgccacctccccacctctgcacaccacatcgggccttggccttctgtctgtccctccctcccccactctctgtccagctgcggaggccctgcaactgagcagcaccctcttggctctgggtggcaggccaagggcacggtggggggagggtgggggtgctccaaggtcca

SEQ ID NO: 1885115 - DNA, 4001 bp, Homo sapiens
ttgtttacactaacaacttctgttgagcaccttccttattccagcgctttatagtcattatccaaacccattttatgctcccaggaagaagctgataagcatattcatggcaaggtttataagacagataaggtttaatgggctaaacccagggcactttagaggaaaccagagaccttccagcattgtaagccaggtgaggaaagaaatgtatgcctcggtttagttttggttgactggcagtttcttcctataagaccttgaattgtgttaaggattcacctgttcctcttttgcaagactgtctggcaagtgtcactactcatttcagttcagtgcagtgctatatattaagcatctattatgtgcagggcattgcactaatgtggcaatacaaagatctctgcacaaaggaggctcccggactcctggaactaaggaaaggtaataatgacatttttcagaggagattttgtttgtttctttgtttgttttttgagacggagcgttgctttgtcgcccaggctggagggcagtgacacgatctcggctcaccacaagctccgcctcctgggttcacgccattctcctgcctcagcctcccgagtaggtgggactacaggcacccgccaccacgccctgctaattttttgtatttttagtagagacggggtttcaccatgttagccaggatggtctcgatctcctgacctcgtgatccacctgcctcagcctcccaaagtgctgggattacaggcgtaagccaccgcacccggcccagagatgttttaagggcttcttcaactcactacaggttcagagtgactgctttacagacttaagttataaaataagcccaaagataagacactagaaaaaagaatgaacatacaaatggaactaatttataaacatatacaaaaagttaagtcccctctctcggttactgtaaccactcaaggggttcaccttgcccgctacatagacagaccaattcatcaagacagggaaattgcaatagagaaagagtaaatcacacagagccagctgtgcaggagactggagttttattcttactcaaatcagcctccctgagcatttggggagcagaatttttaaggataatttggcagatgaggggaagccagtgagccaggagtgctgattggttagagatgaaatcgtaggaagtcggagccgtcttctttcagagtcagttctgggtgggggccacaagatcagatgagccagtttattgatctgggtggtgccagctgatccatcaagtgcagggtctgcagaatatctcaaccactgatcttttttttttttttttttttttgaggaattaacagtctttattgggctcagaccaggagtccgtgggtcttgaggacttctgtgtatttgtcaattttcttctccacgttcttctcggcctgtttccatagcctcatgaactgtttcttcttccggtagtggatcttggctttctctttcctcttctcctccagggtggctgtcactgcctggtacttccagccaacctcgtgagccaggcgccccagataggcaaactttcttgcaggcttcagacgcacaaccttgagggcagcaggaaccaccatccgctttttcttgtcgtagggcggtgggatgccgtcaaacaccttgaggcagtccagagcggcctggcctggcttggtcttgtggggcggcatacctcgcatggtctgccagaagatgcggctgggggcctggagggggtaggggcctcgggaagggttgctgttcatccgcttgcggaggaaagccaggtacttcaacttgtttctgtagaaattgccagaaatgttgatgccttcacagcatacaaccaccaccttccggcccagcagtacctgtttagccacgatggccgccaggtggcccaggagatggcctcgaccatcaagcaccaggacctgtacctccgccatcttcggcagccgcttgggaaagaagcactgatcttaggagcagtttaggggagggttggaatcttgtagctccagctgcatgactcctaaaccataatttctaatcttgtggttaatgttcatcctacaaaggcaatctagtccccaggcaagaaggaggtctgctttaagaaagggttgttaccgtctttgtttaaactataaactaagtttctcccaaagttagttcggcctacacccaggaatgaataaggacagtctggaggttaggagcaagagggagtcagttaagtttgatctccttcactgtctcagtcatacttttccaaaggcagtttcaagctgattttccgctgtgagtacttcctaaaggagcctgatctctcactggtacgagtgaccagaggaggccctgcaatggcaagcaggagggggaaaacagaaaggcctagaaaatcaactccaactgtttgacagcgttgctttgagatgcaggaaatgaagagtgattggaatggcccggtgtgatggttcacgcctataatcccagcattttgggaggctgaggcgggcagatcacttgaggtcacgagtttgagaccagcctggccaatatgttgaaaccctatctctactaaaaatacaaaaatttgccgggcatggtggtgcgtacgtgtaatcccagctacttgggaggctgaggcaggagaatcacttgaatccgggaggcggaggttgcagtgagtcgagattgcaccactaacattccagactgggccacagaaggagaccctgactcaaaaaaaaaaaaaaagagtgattggcaaagcgccctgcagtgcctgatgttattattagttcctctttcacattcctctctcaggccttcaaattccagtaaccaaagctgtcattcacctcatgctgtgatgaggactgggcatgcattttctcattcaatcttgatagcaactggatgaaatggacattatatgtatccccacattatagggaggaaactgagacttcataaggttaatatctggcccaagagaaccagaatcaactccaagtttctccagccagagactaggctggtcatcaccactttagatggaggctgatgctcactgcctccaagggtttctgtggattgtaagtggagctctgtgccatggaggagagacagaaaggaggccccaaccctgcagggctgaagaggctccccaagactgacgcctgctcactgtctcctcccaaagggcttttaaaggaaaccaggaagtaacattgttccccatatatggggtctgatggtgtcactttgagtagagaagaggctcctatgagatcccattctgaaagggagcaggccagcctggcctttgcagggaggcagtgcatacctggactagaagttagctttatcaccagctctttattcttttaacatttggttaataatcattcattaaacatcaactatgtatcaggttgtgtgctaggtcctgattaaaataaaaagtattgttcctgcctttagaaaaggtaatagtctaatttgcagagaaggcaagtagatgaagctgtaatacaatgtaggaagtgctgaaaatgagaagcagttaggaataagactgggtttaattctgagtttgacatgtaagtgcagtggagttatttaaaaactgtaagcttcaatttcctcagctatgaaatggggataatgagaccttctacctcttaggctttgttgaaaggattaaacaacaaatgtatgtaaaatgtttaactctaggactgttcctggttatctggtgaataactgccaattctcacaatcttgggcaggtggctaaacccttcctcttcggcttcccaatctgtaaattcaggctgacacatcttccaaacttctggatctgtcaatcaacagaggtcacctaaaaactctgagaggagttacgagaacatagaaggaataaaaagccctcagaagggccaggtgcggtggctgacgcc

SEQ ID NO: 1885116 - DNA, 4001 bp, Homo sapiens
aacgctgcttccccgggtccccttatttctttctctatactttgtgtctttttctttcccaagtctctcgtcccaccttacgagaaacacccacaggtgtggaggggcaacccacccctacagatatatttagggctgtttgcatatgtttatagagtatttagtttactctaaaagatgacaagacagctcccctcagtgagaccctggcctaaatatatttgctttatttatatagcaagaggataacattaaacgtggaagctttcaatttgtggcactgaatgatgatctacacagggcatccttcaaaggctacaattaaggatccactggccaggcatgctggctcacgcctgtaatcccagcactttgggaggccaaggagggcaaatcacgaggtcaggagttcgagaccagcctgaccaatatggtgaaaccctgactctactaagaatacaaaaattagccaggtgtggtggcgcacgctataatcccagctactcaggaggctgggcaggaaaatcacttgaacccgggaggcagaggttgcagtgagccgagatcctgtcactgcactccagcctgggcgacagatcaagactccatctcaaaaaaaaaaaaaaaggatccacctaacttttcagcagtacaagcccgattgagatcttctggtccgtttgtttgccattcatgttttatgccttgaaatttctttttgattgcatccttggagcttgtatagatcattttacttttcaaaggtgctagttctgatgcccacaagaaaacatcaattcttctggattcttttgtttcaaagcttgcatcatacaaagcatagcaacaatctttttcaggaagcattcccacaaaatgcttgaaaggctcacttatagttacaccaacatctccaaccaagatctctttgccttctacatgatgcactttttgtctgcactgagacaaaaaaatgacagcctttgttcttttcttgatttcttctggtgtggagcatttacgaactctcatgtcataaaaaatgcgacacacttcatcagcaacttgcactcctgaggcacgttgttcagagttctgctctgccgagcttccagtctttacattcaatttcctatctcacatctccagttgtatgtctcaaaggcatctgatgcacaacaggtcatcttcgcccaccaccacagggacgcgggggagggagccggcgggtagtgagtctgggcagcgtcctcctcgtggctgcgggactgagagggcgggtagtgagtctgggcagcgtcctcctcatggctgcgggaccgagagacccagcgcgaagctgatgcagcggctcgagcctacccgttttttttttttttaagcgtcctcttctacagcttccttggctctttgtgcctatatgccgaagagctgggcatttgcatgggccatacagagactaacaaggcctggaagttttcctcctagtcagcgatgactctggctttctccttgtagacattgccgatgggcatttctggtcctgtcagctgagtatccagttcgagttcttcagcagaactgtctcccttcttgggggccaagggcttcctggggaagaggatgagtgaggagcggtcctccttcagcctctgcaccttggcctgcagggcctgggtggactggttcctcctccttgcatcctcagagatgccaatggtctgggccaccttcttgtaaatgccagccacccttaactcctccaagctgaggcccctgccagcttgtgctttgtagtgatgcctcagcatggggcaccttactatgggtggatgggcccatatcagtgggccatgcagcctgcttttgctggccaccttgcttctgcaggtctgccccatgggctggctgagccacatggccacaccactgccagtccttgtggaagttgggcttcaggatcatgccattccggctgggtgccctgcctccctccagcccagggggtagcgaaagagaggagggagcaattgagggaccacccacagccatgtgcactcacctggccactgccaccgccctagtcctccagcctggccgcgcccacagatcctggtctggcaagaggccttcttcgacaatgaagaggccccagcttgggccgaggtccctctatggctccgttggtgacaatgctaggcctatggcggtggacagagcccgatgacccccgacagtgctggaactctgaatgatttaatttctgaataaaatgtccctatggaaagaaatcagaaaattgcatgtggttaaatctatatgttgtaatcccttattacccagcaattctgcacatagttttgcacccaagaaaaatgcatgcctagctccaccaaagacttgtgaaaaaagttctctgaaaaggaatttggttttgttttgtttattagtttgtttgttttaaaagacagggtcttactctgttgcccagtttgtagtgcagtggcacattcgcagcccctgcagccttgaactcctggactcaagcaatcctcccactttggcatcctgagtactaggactacaggtgtgcaccatcacccaactaattaaaaaatttttttattggccgggcccagtggctcatgcctataatcccagcactttgggaggccaaggcgggtgaatcacctgagatcgggagttcgagaccagtctgaccaacatggagaaaccctgtctgtactaaaaatacaaaattagctgggcatggtggcgcatgcctgtaatcccagctactcgggaggctgaggcaggagaatcacttgaacccgggaggcagaggttgcagtgagccgagatagtgccattgcactccagcctgggcaacagaaaaaaaaaattattggctaaggaggtctcgatatactacctaggctagtccccaactcctggcctcaactgatcttcccatctcagcttcccaaaatactgggatcacaggctgtaaaggaattcagagggaagagactttattccagtgaacagtgtgtaaaccagcagcattccccaatttggaattttttttttttttccaaaaaataaagctctcctttgtttttcttctgcaggcctcatggtcttttgttaacagacttgtacagtaatgtacatggcaactttataatggtggaaaactggaaacaatttaaatatccattaacaggcccagtacagtggctcacatctgtaatcccagcactttgggaggctggggcaggtggatcacctgaggtcaggagtttgagaccagcctggccaacatggtgaaaccccatctctactaaaaatacaaaaattatccaggcgttgtagtacatgcctgaagtcccagctacttaggaggttgaagcacgagaattgcttgaacctgggaggtggaggttgcagtgagtcgagatcgcacgactgcactcctgtctgggcgagagagcaagactgtcttaaaaaaaaaatccatcaacagtacaatagatatattgtggtatatttagatgatggaatactatatgacaatgaaaattatgagctatttcatgcaagaacatggatgacttacagatacaatgctggaaagacacaaagaatacatactatgttttctttttctttctttcttttttcttttttttagagacaaggtttccctctgtaacccaggctggagtgcagtggaacttctgagctcaagtagtcttcacatctcagccttccaagtagctgtgactagaggcaagtgacactgcatttgacattatgattccatttatatgaaattgaagaacagacaacactaatctatactgatagggggtctaataggagctacccttgggaatgtatcatcagggaaagagcaagacagatgctgaattctttttttgtgtttttgtttgtttgtttgtttgtttgttttttgagatggagtcttgctctgtcac

SEQ ID NO: 1885117 - DNA, 4001 bp, Homo sapiens
cacctccaccgccacctccacctccggcacccacccaccgccgccgccgccaccggcagcgcctcctcctctcctcctcctcctcccctcttctctttttggcagccgctggacgtccggtgttgatggtggcagcggcggcagcctaagcaacagcagccctcgcagcccgccagctcgcgctcgccccgccggcgtccccagccctatcacctcatctcccgaaaggtgctgggcagctccggggcggtcgaggcgaagcggctgcagcggcggtagcggcggcgggaggcaggatgagcgcacgcggtgagggcgcggggcagccgtccacttcagcccagggacaacctgccgccccagcgcctcagaagagaggacgcggccgccccaggaagcagcagcaagtcagtacgagggcgcggtgggggcaccagcccaccccgtccccactgccggggcccagacacgcgcggggcggccggagtgcgggagcccagtcgccgcggccgtcgcacactgcccgccggccggccggggggagcggcgcagaccccacgagtgcgccgcgcggccccggggcgccagcaaccctccgggcggggaggtggggagccgcggcgggcggcccggggaaggcgggaggtggggtcgggcgaagcgcgtcctcggactttcgctattgtgcacggccccgagtggcgcggtgtcgcccagtgactggaagcgaccgggatccgacaaacccgggctcgcaggcgctttccgagttgcttttgcaactgcccgggaggaaggaggtgccggggacccgggcgcttcggccgatctgggctgaaggggctagagtcttgggggccggaggctctttctcccgcctcccggggctgctcgcgggtcgggggctggcgcgccgcagccgcccccttggcgccctcctccaagctctcggtggcccaagactcgcgccctcccgacaaagaacgcatggagacccggctgcctggtcctttttgggctctttaaatatgcggcggccgccggagggagcccggggcaggggctacggggagcctggttccccgcaggacggggttaactcgcccagctaagggcgcgttgaaaggagtgtccaagagagtgcagggtagccagggtcgcttccttgtcaggggcccggtcccccttttgcccctggatctcgcgcctcagagctgcagccattaaatgctcttctccaaggccagtggccgggggttgagtaggggacgatcgaggggcgcccgggaccctgcggagtggagggttttgtctgcggatgcaaccaattaagcgtgcagccggcgcttgcagagctgcgctcagcgcgcagggctgggggttttgttcgctgtaatttccaagccgcggcgggcagagttggagcgggatatgtctattgagaacatttaaactccactttctcgggctttaaaacttgctctctgcttagtcttaaatcgcttccttcatggcaaacacgccgattagaaaataatcctagagtcccaaagttgtccgagagcaaggtggggaaactgaacaatgtttgcttgccagtgcattttagaaaaattgagagttgtacctttttgaaatcatcaaaggaaacaagccgatctagaggcccctgagttttcccgctctgcccaagcgacactttacaccgcatttgaatcctgttttacacctcccaggaagtctctgccctcccccacttgtttcccacccgccacccagttctaactcactaattgccccccctccaaaaaaaaaaaaaaaatccaaaagaaattacaatggggtctggaggtgattggatactttacctttgagttaaggcagagttcacaaagaaagaaaaatttgtctccgatgtgtttgctctcgatgtgcccactggtgctagtggtcccacagaagcttgcagggaaccttcccgaattctctaaatgggatgcgaattttcattgaggacgttcatgggttttaagttaattagtctcacttaatcaccgaatctgaatgaaatgtgaatagatgattcactggataaatatttgggatctggaatattaatcatcgcattctcttaaccacttgagtatttactacttggcataggagccatttaaagttttgctaaaccaagtgattgcttccatttctcattcccagacactccattcctcctcgcttttacctccttttagttttctccactccacccccataagagttttctcaaaagaaagttttgaagaaaatatgtttatttttatcaaaagatatttaaatttagactggaggccatgcctgcatctccaaaaggaagtggagaattgaagcaattaactagatgattcaagcaaaacctcccaccatagatttactataattatttggaaattttagggggaatggagttattttgaactgaagaacttgaataattgctccagtatttcactcaaaatgtgtcagttgaatcataatccacctagaaggcaggtatacaaagatgattaaaggccaccttttcaatatggaagattgttgaaatatctgtgatggtagcttcgtatttctgttgtttgaaatgctagtataatgcagagtggtgttcgtttaaaatgcctattattcctatgagttgccaaatgcatagccctgtaaactttacaccttaaaagtatatgactttctttctagaacatgcctcttcagtctttgttaccattttaggtttgaagtagaatctagttttcatatacaaaatagagtttcctctttgaacccttgcattaaaagtatagttatttcccctttctgtaaactctgtaccatcatcatccatttatgcttgaactgaacgtgttccaacagctcttttgagcagcacatgcagaaaatatagctaaagagtcagggtcaatttctttcagacattcttgccacaacagcatttttttttccctcacaattaggaaccaaccggtgagccctctcctaagagacccaggggaagacccaaaggcagcaaaaacaagagtccctctaaagcagctcaaaaggtgagatttctcaagtcaagctctcctaacttcatcaatgactgactacaggagcctgcctgtaactttcccattctaactccgcagccaggaatttgtcccaactgggtaacacaagactcatttcttacatttaacattagttagatgcgagttaaccttttttgtaagcagatgctcagcataaaaagtttatgaagatacttaacagtgttgtttttaaacaaacagccaccaaataatttgaaccttaaaacgggtagaagtgaggaaggaaggggttgcggggggggcgggatgaaaatgacacaattaatatttgcaccagttgtaaatagttaaaaacaaatcaaaactatagattttgcctggtggtaaagtttttgcaatttcctctgaaaaatgataaagattgatttactttgtgcttattacatggctactgcaaaccaaatccccctattaaagtactttgccaaatagacgataattagaagtaaatctagttgtgggatagtggaaaaattccatgaattttgcagctttaattgtgataataaagtatactgtttgttttacaataaacctgcagtatagtatatcataatctcaaaatgccttttcatcaagtgacatagaaatgtctgaattggacaatgagactttttaaaacaagtatttggctcatttaatatctctttttgggcagaatggaacccagttaagtgtaatattcagtgtttatcttaataagtttaaacttgcagtttaagataacttcaggttggctgtgtttaagctagcaaagaggaactatgtcagggttaatgcatgtatagagaagtaccagtcacttttttgactttataaataaattggaaaaaaaag

SEQ ID NO: 1885118 - DNA, 4001 bp, Homo sapiens; identical to SEQ ID NO: 916809

SEQ ID NO: 1885119 - DNA, 4001 bp, Homo sapiens; identical to SEQ ID NO: 916810

SEQ ID NO: 1885120 - DNA, 4001 bp, Homo sapiens
tcaggtcactgcaagctccacctcccgggttcacgccattctcctgcctcagcctcctgagtagctgggactagaggcgcccgccaccatgcccggctaatttttttttgtatttttagtagagacggggtttcaccgtggtctcgatctcctgacctcgtgatccacctgcctcagcctcccaaagtgctgggattacaggcgtgagccaccgcgcctggccctatctattttttttgagacgggattttgctcttgtcgcccaggatggagtgcaatggtgcgatctcagctcattgcaacctccctctcccaggttcaagtgatgctcctgcctcagcctcccaagtagctggcattacaggcacacaccaccatgcacagctaattttcatatttttttagtagagacaaggtttcaccatgttggccaggccggtcttgaactcctgacctcaggtgatccactcgcctcggcctcccagagtgctgggattataggcgtgagccaccgcaccgggcctagagtagctgatttaaaatcacaaccttcttccatcaaacttattttacttattttaaaaatagacttctggctgggcgtggtggctcacacctgtaatcccagcactttggggggccaaagcagggagatcacctgaggttaggagttcaagaccagcctggccaacatggcaaaacccgtctctattaaaaatacaaaaatcagcttgtggtggcgggcacctgtaatcccagctactcgggaggctgaggcaggaaaattgcttgaacccaggaggtagaggctgcagtgagccgagattgaaccactgcgctccagcctgggcgacaagagtgaagctctgtccccccacaaaaaaaaaacaaaaccaaaaaaacggcatatctatcaacagagcctcactctcacagctcagtattatctgtagccatcctccctacccacctgacaaattcttcttcaattattgagtggttccacaggtgacggatgtccaactgaagtagctgtgttaaaagctgaagaattggttgcctctcttcttcccagtcaaagccatgggctgccttggtccgagctttcttaccctaaaaaggatcatgtatacattgaggaaaaaataagggaaaaaagtgggtcaagatctgtcagtctgagtgcccaaacaatctagtaccaagacaacatagaaggtaatacggaagaaatattacaagttccacagcgctacttgtccaggaagaaaacgtgtgacacttttgagttctttctcctaaattctcaatgaggacagaaaggatttgtggatcattggattcccttcttttccatctattcccctatctccccagaccccatataacgtgagcccaaaactccaaattaccttcccaccaaggtccaggtccacaaggtttgtctggctggccatggtctcaaaggattccaggagacgtatcagagcataacagttcattttgagggcatttagatgggcgtttctatctgatccactcaaagttgtatcatccaggatagctggaagctcctgggagtggcgggataccactgtgaggggcagaatcttggagtcagtttcactcacttctttcatataccccaacttcaaaacacccagcacttgcagccatcagattaccaaagatctgtgtttcatctctcagtggccataacacaagctaagtcctttaggacccttggccctgataccctgaacatgccctgttcctactctctcactccagttaccacaatttctctccagcaactggaagaatcacccctattaaaaagaggtagctcaaaagtaggaaaaagttcttgttggtctgcccttacagtgaacacacataactctgtatcgcccaccaagattacagacctttaacaggccaaaggtccctgggcttagccaaaccaactgaatcacaacagccttgatatcatcatgtggctgacaaaatgtaggaaaaacaaacaaacagacaaacaaacaaacgataacaaacaccttccatcccctaccccctgacccataaacaccttttatcaggaattgcagagtatcttctttgaggccaggatctatacttcgaaagtgactatgagggaaagaaagtgtgggggtgagacaggaaggagcctgcagagccccttctaacagatcagatctaacccgtggaatcgaatgtttaaaaatacacgtgaaattgttcaactgaataaatacggtggcaagctgggtacatgctcatcagtagagatatcaatatccagaggcatttatcagtgaacctataacttggaatttcaggactaacatgcacagttaggacaaacagtcaccagttctttttaaagtaccagttgggtgtttcacttactgcaaaatgctgtagatagtatcaaagtgctgcagcatagccaggggcccctgagctcgaaaggcagcctgaaaagctatgaagatggaaaaaacaaatcaatttggagggaagagaaaccttttcagtaaattctatccatggcagaaaactaggtttattgcttttattggtagaatcacaaaaaagagacaaacagttcacttcaatgtaacctataatgacgatgagagccgggcatggtggctcacgcctgtaatcccagcactttgggaggctgagacgggtggattacctgcggtcagaagttgagaccagcctggccaacatcgtgagaccccatctctactaaaaatacaaaaaattggctgggtgtggtagcaggcgcctgtaatcccagctactagggaggctgaggcaggagaattgcttgaacccaagaggtggaggttgcagtgagccaagatcgtgccattgcactccagcctgggcaacaagagcaaaactccgtctcatctcaaaaaaaaataaaataaaataatgatgatgatatcttatatttgtgttacaattaaagccttgtttgagcttcaccacacctgagcaaaagcagacagtaccacgcctactttacaccttagagtagttatatgacttgtccaacttacagtagttaggagggaacacaaactcaggatcttttaaaaaaaaaaaaaaagtttatcctatttgtgtcctttttctgcttcaggatcccacaatgcacttagttgtcaggtctccttcctctcctccagtctttatctttcatcatcttgacacttctttgaagagtacttgtcacttattttgtacaatgtccctcaatttgggttggcctgttttctcgcgattatattgaagttatgtattttcgtaagattacagcagaagggagggttggtcctcaggcatcgtatcaagaggtgcatgaagtgaatgtcttattactgctgatgttaactttgatcacttcgtagtgtctgccacatttctccactgtaacattattattttcccctttgcaaccagtatttttgtgggaagatactttcagactacgtaaatgtcctgtttcacatcacatttttgcccactaattgaagcatccatgaatgattcttgcctgccacaattactgctgtggtgtttactaaatggtgattttctatctctattattccttctacatttactaatgggaatgctattgtaacgattagctgtccctttccctttatttagttattcacttatttatagcagaatggacttagggatatttgtcttattctgtgctttaatccattactattactatttattttcctgctcaaattgtcccatacttggtctctgcgatctccttcaacttggcctgtgtcctttgaacatgcttccatttttttgtttttttcaagatagggtcttgctttgttgcccaggccagaatgcagtggtgcaaacatagctcactgtagccttgacctcctgggctcaggcgatcctactgcctactccctactgcctca

SEQ ID NO: 1885121 - DNA, 4001 bp, Homo sapiens
aaaaaaaacaattagccaggcatggtggctactcagcagactgaggcaggagaatcacttgaacccaggaggcggaggttgcagtgagccaagatcgtgccactgcactccagcctgggtgacagagtaagactccgtctcaaaaaaaaaaaaaaaaaaaattttggccaggcgtggtggctcacgcctgtaatccccgcactttgggaggccaaagcgggcggatcacgaggtcaggaggtggagaccatcctagctaacacggtgaaaccccgtctctactaaaaatacaaaaaattagccgggcatggtggcaggcgcctgtagtcccagctactcaggaggctgaggcaggagaatggtgtgaacccgggaggcggagtttgcagtgagccgagatggcgccactgcactcaagcctgggcgacaaagcgagactccgtctcaaaaaaaaaaaaaaaaaaaaaattacgtgggcatggttgtggcacgcctgcaatcccagctactcagaggctgaggcaggagaatcgcttgaacccaggaggcgggagttgcagtgagcagagatcgtgccactgcactcctgcctgggtgacagagtgagactccatctcgaaaacaacaacaacaacaacaacaacaacaaataaagtcataagagataccttaagttaggggaaaacctgccacctaaaatcaagggtgcaggattcttcagtgtgtcgcttcctcctgatatctctacagccccagcaaaaattcacgagtgaccatggttcacacagggatctgtagtgcttaatatggataccggccaggcatggtagctcacgcctgtaatcccagcaccttgagaggccaaggcaggtggatcacctgaggttaggagttggagactggcctgaccaatatggagaaaccccctctctactaaaaaatacaaaattagctgagcatggtggtacatgcctgtaatcccagctactcaggaggctgaggcaggagaatcgcttgaactcaggaggcggaggttgcagtaagccgagatcgcaccattgcactccagcctgggcaacgagtaaaactcctttgaaaaaaaaaaaaaaaaaaaaaaagccaggcacagtggctcatgcctgtaatcccagcaatctgggaggcaaaagcaggtggatcatgaggtcaggagatttagaccagcctggccaacatggtgaaaccctgtctctactaaaaatacaaaaattagctgggcatgatggcgtctgtctgtaatcccagctcctcgggagggtgaggcaggagaatcgctcgaacctgggaggtggaggttgcagtaagccaagatcgcgccacagcactccagcctggcggcagcactacactgtctcaaaacaaacaaacaaacaaaaaaaatgtggatacctttacctttgggctctgtctccataggttcctctgttctctccttcacctctgccttttccactttctcctctccctcagggggttcaacaacgaccttttcatcctctgaggcaggggcaggggcctgtgtacacttcaaaggaaaaaaaaacaaaaacaaaacagatgaagcagacaggccagcaactaaaaggaagactggacttacacatttgtctttagtatggcattcagtcaccccatctcttacctcaatggcagtctcaggggctgtagatttaacctccttttctccttctatgctctcttcttctttgaggctattttcctctatttttatcccatcttctgcagaacaataaaagacaatcaattaggaagaaggtactagatcagagagaaggtcatttcttcccagtttgtctcatcttaaattgtcctctcgtgcctttaagagccagccctattcttaggacggccctcctaaactgagagggaattgctgtgtgtcctgccagactaccctgttagaactgagcacaggggagcagaaaaataggccaggacaaaaagagagggacagaaaatgataggacaggcagacttaccagcaggtgggacaggtgcaggagtgttgggctgcgtgtcccctggagtggagggtgtaggagtttttggggagggtgaccctggctgggacatcttcttgttttcctccacctcagccagttcaggcatgctccagcgcccattaacatgttcaaactcctgaacctgtagcaatgggacaagaagttgaagacccaattccagctacaggctcctttcctattggccttccagtctccgcctcccgggttcaagcaattctcctgcctcagccttctgagtagctgggaatacaggtgcccgccaccacgtgcagctaatttttgtatttttagtagagatggggtttcgccatgttgaccaggctagtctctaactcctgacctcaagtgatccacccgcctcagcctcccaaagtgctgggattacaggtgtgagccactgcgcctggccccctagaaacaatggcaagaggctcagggctcaccttcttgcgaatcaaagacataacaccaattctagtaaggacatgctggcgagacaggccttctcgggggacaccatcagcaaaggtctcagccccatctgcccccggctcacataaatgccgcatgaaaagagagacatatgccctgtgtaaagaagtagagaaagagttaaatagggatcatgctgactcttagattcttttccatcccttcgtgaggcattatcacaggcaataactatggctccaccttgaggtaaagcccaccactgcacgggaaggctgatctctagaccccacaagaagacccaggttctcttccagggaagctaggaacacattactaacagcttcacctgccaacttcaacagagaaaatagcccacttccctgcacggctaggcctagaaccatggaatgaccagatagatagcagaagcccttgctctagatcagtccactccagccctcaactcacttgaactctttctctgatttgcctcgcaggtctcttacaagccactgggtagtaaaagcatcctgaggtggcataccatatcgcataattgcattaagaaaggcttttcgctgacgagcattaaaaccaagtacctaggggaagaagaaacccaggtgagaggcagcaggtcgcattccaccaaagatgcaatatctgacactcacccctccttagaatcgtatggcacttacttcaatattcccaccaacacgggccaacagaggaggcaatggcttatctttatcattccgcaggcccttacgactgggcctacggggagctgcaagaagaaaaagatgaatgagtgacacaggtaggatattaaacaaagcaacatttagaaaagcaacaaaaaaagcacagccctcaccttctgaacgttcatcaaagtcttcatcaccttcctctgaagccactgagtaatcggactggttgtcggactggtcgtcctgccaatctggagggagagagggcagatgagcggggcccactgctctagtggaacggcccatgggtggggggcggggccggccacacacacctcggtcctcctgggagccatcattgtagttgacctgtttacggattctttttcctttgcccagatttcgggctagatcttcttgctgctgctcataatggtgccgcagcaatttctcccagtagtcaggatccacactttcttcctgtttaatgatttcccgttctacctcctcttcctcctgggacagagggagggccaggactcaggagtgctgaagtcagcaccaccagctacccctggtcctcacagttcccactctgctagctccttttcatgactggactcttaaatacttggtgtgcctgtttggacctaagaacttagaagaaatttgattgagagtacacagctcctcataattacatatagattagcagtcagcataactcaagaaaaacatgggatagagc

SEQ ID NO: 1885122 - DNA, 4001 bp, Homo sapiens
ctggacccctggctggctcctcaaaaactggagaagcagatccacttcctctgggggtggagttcttggtgactaggctcatttcttacccttgatgaggctgtcactgtaggaaaaaaaagatagataatgacattattaggggacataaatgtgagaggcaggacactctaggccattccctctacgaccctcctaccctgattgagggtttgtcttcggggaggtgggaaagggggtagggtaggaggcgggtactggagaaggtggcctgcaggaccccacagaagcaacaacagcttaccttcccctgtggtgccagatcgccagatgaacaagaaacagagaagagaaatgcacatgttaattgacagcttcaggccccactcagctttgaaccctcctttgctcccaagagaaaagataaacagggttgacagccaggaatctcaggctcatgaaaggaggaggcatgttctcatggccactgctatttctcatctcctttcctaacatccctccattcaccagaggagtttgagggctcttgagtaagaaaactgagtatcatctttcatcactttttggttagatgaaaactttataattaaagtgctttttatgtgaataatcctatttgatctcataaaatcaatcctatgagatgcaagatagaaactgtcaaccacccccttttctaattttggttcaatgtctctgagccatatgaatagctgtagcaggctccagagcccaaacaaccagactcaggtcccacgttcttggtgataccccacagtgtggccacatctctcacctggtgaaactttcatcctgtaggttcagcacaaggttgtcagctgtgagatagatacgattctgtgatgtggcgatctacagggcaggaaataagacagatgcttgcattaagcaaagacctcaattccgacccctgcaattcagcagctacttaacatggaacacatgcagattagggcaggggtgcagcaatgagtaacacatggtttctgctcgcacttagggatccagagcgctgagcagcagctatgattagaacaaaaggtcagggaacccagaggaatcattcttgacaggaggagtatcggagaagccaattttttatttatttatttttgagacggagtcttgctctgttgctcaggctggagtgcagtggcatgatctcagctcactgcaacttccgcctcctgggttcaagtgattctcctgcctcagcctcctgcgtagctgggaatatagctaaacgccaccacagcgggctcattatcttttgtatttttagtagagatggggtttcaccatgttggccaggctggtctcgaactcctgacctcaggtgatccacccaccttggcctcccaaagtgcggggattacatgcgtgagccaccgcgccggccagagaagccaatctgagtagaaaccggaacaagcaaggttcgaattccctcacctcaatgtgccttaactgaaagcactttctcaaggcagccccatcagagacgctgggctgacacactcaccgtcttggagatattctgggctgctcgaatcttgcgaagtttgatgtagccagggttcttgctcagtgcttctccaaggtgaggagggttaaggtacacgcaagggcaggtctcaatccctggccctgtccttaccacactcccttgctccagtcctcctctgggctgtcagatccaaggttgcgctcaggtggcttgtgcccagccctaccgtggaccccacctgtgggcctccctgcaggctgctgccaggaactaggggcagcaccagaaatgaaggcaaggccaccaatgctattgatctggccttacagtggggagtcatggctcaggtactaccactaagatttcagatctcatctgtagtccccacccccaacaaggagccaagggccagagagcacggagtcgcattcgccttagtctcatcagcctgcccatgaaggagaatggggaactcaggtgccctaggggctgggctgagatctctccagcagaaggatatcatcttggcagcctcggcctcaccctcggcctgcacaattttctgccgctgttcctgctttgctttttctaccaagaattgggcccgctgggcctcctgctgggctgtggtgggagagagtcagggagaccctgtcctgggtcaggagccccacccatggagtctttcctcctcctgcatctcagaagccctcaccccacggctcttgcgactcacccacttgtttggcttctacagcagctgtgtactctcggctaaagctcagctctgtgatggccacatcatccaggatgaggctgaagtccttggccctctctgtcagctcccggcggatcaacagggatacctgagggcaggggtgaagaggggaagggaggggtggtttgaggggactggggagctgaaaggaaggttgcgacccctaacccttcactctcaatacaacatgcactgccttagcttcctgtcaggcaaacctgtaacataagcctctctgctcgaagaggtgcaggaaaagccaagacttggccattttcctctgtgcttcctaacaccgagtgctatcgagttctaatgctggctctccttatttcacagtggcaattagcacagcttttaggtggaaatggcactagggtgacaatgcttttctaataagctgcctttcctaattcccaatactctgggcctaggaaggaaaggctgacaccacgcagatggtggtgggagtcagacctgggcccgctgggtgatcagctgtgaggcattgaacttggccaccacactcttgagcacctcgttgacaatggacggcaacactcgttcctcgtagtccagccctaggcgctggtacatgctaggaagctcctgagcattgggtcgagacaacactcgcagggagatattcaccatctgtaggtctgagattgaggtcagcagtggctggtcaaggccaaacaccctttcccaagcattttctccttcatgttcctccctgtatgccctgtgcaatggtgtacagcctggcactaccctggggggaggagagttaatcaggctgacaaggaagacaagacgcagcacagctgaaatgcaccctcacccactgtgaagccttgaactgcaaaccccgtcaccagcagagctgactactctttccccctctgtactctgtgcaacctctaacgtgggcgctttcgtgctgtaccgtaatcatgtctcctgtaaggacttgggggacaagaattgtgtttaatgaatcttttattcccagggcccagtctagtaaatgaataagcgacctgcactaggtatagcacaaagaagtacattacaggttacaggtgagctacctgacccagggtgtatatgtgtgcgtgggtggggaggaggaagaggtctggggaactcaaaggcacggcttttatgtatggtctagaaggagagaacaggtgaactagtcaagcttagggacaaacttctccagaacagagtgtactagtggatgtaactgtagatatagtaagtcaagcagttagaaaaaaaaggctttaaaacaaagctttgatctaggcagtgaacaagacgagggacaaacaatactcttattgaatacacgtcagggaggagacagtaaaaagcacgcaaacacagtgtgttcagaatttgctgctttgaccccaggaggcaggtatttttgttacagctcttgcagatgtggaaagaggcctaaaggcctgacactaccatattcccctggggtttcttgccagctaccttgatcatcccacctgccatgtgattaccaagtgctcagacctacctttggagcctgtaggggaggagatttttcgaggtctggcccgaatgtcatagataatggggtactggaaccaagggatcctggagaggacagggataggtattaagagg

SEQ ID NO: 1885123 - DNA, 4001 bp, Homo sapiens; identical to SEQ ID NO: 916826

SEQ ID NO: 1885124 - DNA, 4001 bp, Homo sapiens; identical to SEQ ID NO: 916832

SEQ ID NO: 1885125 - DNA, 4001 bp, Homo sapiens; identical to SEQ ID NO: 916834

SEQ ID NO: 1885126 - DNA, 4001 bp, Homo sapiens; identical to SEQ ID NO: 916835

SEQ ID NO: 1885127 - DNA, 4001 bp, Homo sapiens
ccaggccctcagcttctccaggggaggaccaccaccagggccaagagcccctccccacaccctagagcactcacgttgagcttatagggcatagactcgaagaagatggacgtggctgatatccgcttgacgtcagacatgtagccgtgggtgagactgcgaagtgagaggaagtaagaaggcctgggtggaaggacccccggacttaaccactcccttcaactccacagttctctgtccccagaacaccagtcctaggacacaccgcctcactgctctgtccactctgtggtaggcactataactgggatcttatcttcctcatccactgtgacatgcaggacagggcaaggcctgttccatctgtatggtccacagtaggtattcaataaataactcctttcccacaccaatcctgccgccaagaccatcagccagcccatccatactcactggcccccatcgggcaggtccagccccatgatccggtcgtgaggttgcagaagggctgtgtagacggccaggttggctggggacccggagtagggctggacattgactccccactgtgcaggatccaggtcaaaggcttccaaggcccggcgctggcacagcagctcaatttcatccaccacctctgctcccccatagtatctgccgtgggagaggggtaatgagggcacagagaaaggactctcaaccatcagcaaaggactgggaagttcactcctcaatgaacactgggaaggtacaggtgggttcccccactgggagcaccatccctgacactgccctccagccctcacctcttgccaggataaccctccgagtacttgttgttcagacaggaccccagggcctccagcgcagctcggctgcagaagttctggggtggtggggggcaatgtcagaaggtattgagccccttcccctggactcccacagtccctccctgccagagccagagctgaaagcgggagtactccctgcagaaagctccattcactcagcaccaggcctggggcaaagccagaggcagcattctcagaaacccatctgccatgagcagtggcccctcaatgccacctacccactcaaacttgtgcttctaggctcctccttcctcataggaggaaggaaggaagggatcagatgaaactgtagggaccctggaggctccctaaatgtcccaaccccataaactggacttgcactgcctttgcttgagggagataagaaaggaagataaagcccaaagaaaggtcctgagtgtgaaagggggttttggagaaatatcagttaagataactttgttacttcctgtacccatggtggcccaacccctgcccatctccccaggtcccacctctgaggcaatgagctccaggccacgacactgcctgtccttctccctctgcagcaactcccacatctcaggatcactgtccgacaggctctcctggcctgtccagcccctgtttgcttccccagtctgagtctgggctgcgttgctgtgctgagcccgaatggccatcctgaccagctgcccacatctctgcagaggctgaaggcaggaaaagtcagggtgaaatcacaacagtccagacaaatcgtctcccggccaccctcactcatgcttctaaggccacaccaagctgccagttgtccagccagcctgtttcagttctcactacccccacctccaccttcaaaagccagttctggagccaagcttgagatcaacgtccaaggggtggttctgatttgctccattcaccgcaccgcacctcagaaatctcccaccacctcactccatgaaccactctgcaaagcttgtcctccaaaagcctatgtctccccaactccagagagggcaactgagattccagaaccttcccacccacaggaacaagagggtcttcctgcagggcaccataaactgataccccagtcagcgggggaagaggcagagttggcaagggctgaggccacagattgtagagcaatgcaggtgggaggggagacctttagcagtccgtgaggaagagctgtgtgggagtggtgggggtggggatctgcccgagagtaagccaataccctttccccttacttagccccctacccgttccacctccttccagccctcactgccgccgggacccctgcctgatgcaagcagtgaagctcggttgcatcatctgcagggctcagagctggccggaaaggctcagcttgtgagaccaggccgaaaactccgctcatttgccagcaccgggtccgcggggcatccggggctgtcctctcccctaatgccacgtgaaatgggcggtcacgaggccctggggcgtctgatcgccagaatgaggacaggctcgcagttaactccacgcgcgcccaggggtcttggggattccccagttacacgtccgctccctgaggccccaatccacgtgcatggaaaagccaagagaaccccagagtttgtgactaggaactaaggtaggagaagagcttcctttccactgattacccagcgtttggagccccattcttacccgagccgcccaaaacaaagagaagtacagcatcgcaactcggaagtcgcaggaggtccagccaccaactctggtctagggcagcaagctgtcggaagaagaccgttcggagaacgcatgcgcgagaagagctcgctgaggcgccaaagctaacgggagggatctacgcatgcgtagtggtggcccctttgtggccttttgggaattgtagttcgcccactcaccgcttttttctttatgattcccgtctgtagccccagggttagaggcccttgcctggggggaaaaaaacaaaaaacaaaaacagaggtccagtgccgccccctctccttactatcttgaagcttttcagggttttctctctgcttgttgtcaagacaaacgtttatagggtgcctactgaatatctagctagcattattagactccaggagatctagacccccacacaagataaagagctatggaacactggaaagcaccgtggtttagaagggtcggaagacctgaattcaagttccggctctgggactagtgcattagcttgtgtgggcttcagtttcctccctggtaaagccacaagaaaatactgtgtggtgaggattcaatgaggcttttcctgtgaacatgcgctgtgacagattgtcctcccctcttcctctgacccacagacctgcctcctacatggcatctcctctttctcctcagacatctgggagcagaggaaggcacccctcctgttgttcacttgtcccattttgttacctgtccacctcttgatgtcccaggagtcggtgggctctccttttttccccagggctatagatctttgagactggaagggatcttccttttagcctgacttcatccggaagaaacccttgggaatgggattcatcaacccctccaggagtaggttcccaaacctcagcatcagaatgggttagaaaatatgatataaatatgagtgtggggtctgtcttcagaggttctaattcaatggatctcaaagagtagacatttgcccacttatgctgtcacacaactaaacctctcctcagtgattctgataagccaagtttttttttttaattaaaaaaaaatttttggctgggcatggtggctcatgcctgtaatcccagcactttgggaggccaaggcaggagaatctcttgaggccaggagttctaaaccagcctggtcaacatagtgagaccctatctctacaaaaggaaaaattttaaattacctaggcatggtggtatgtgcatgcagtcccagctactgggaaggttgaggcaggagggtcacttgagcccgggagttcaaggtgagccatgatcaagccactgcactccagcctgagcaagagagcaagactgtcttcaaaaaaaattttttttgttttttgtttttgagacggagtctcattctgtcacccaggct

SEQ ID NO: 1885128 - DNA, 4001 bp, Homo sapiens
atggccagtagtggtggacttgcctgaacctacttgtccagtgatgacaatgttgatattagtcttttcctttcccattttggcttttagaggtagttttctctccctcttttttttttccataggtgaagtgtctttttaattgaaaagctaacaaactgtccagttacatttccccaaaaaaaccataaactgggtagtaactgagtctctaggcaatatatttaaagccaagaggattaaaaataaaattaaagaaagagaaaacaagtcctcagatgcaatgaagggagccctgctacatacaggttaatcaatacagtggttctccttgactgcaggaggttggaagacattctagtaactccactcagaacatttacttcaagaagcctttttccagtttccaactcatgaataaaaataacattttgttaattctagtccagaaaactttttttgcaagctggtttatttacagtgccaacttttaaaaggtcactaaagttaactggacaataaactaggcagacattgctttacaaaaaagagggaaaggccaaaattccacttacagagaacctacagttcagttttattcaaagaaacttttgatcatactggaagaaactcagccataggtttggaatctgtactcaaactacacatgcaacgaggacaatattccgctaataccattgacttgctgctgcatttgtctactgtttgtctaatactaacaactataaatagagcagtgcaactagtatttggaacaatccttacagtgttacagtgtcaggcataacatttcacttctcttcacactgctggttctcttggtgtacctgggcttcccactcttcagtaaagtaattttttttttttttttttatttttagacagagtctcactctgtggcccaggccggagtgcagtggcgccatcttggctccctgcaagctccccctcccggattcacaccattctcctgcctcagcttcccgagtagctgggactacaggcacccgccaccacgcccggctaaattttttgtatttatttagtagagacggagtttcaccgtgttagccaggatagtctcaatctactgacctcgtgatccgcctgcctcagcctcccaaagtgctgggattacaggcgtgagccacagctcctggcccagtaaagtcattttttaaattgaaggtcttgtgaatctcctcaggagttttcctgttgaccatattggcaacagtcttgcatgtaacatcaagcaaacctttgatgtctaagtagtttgcagccagaatgagttcaaaaagtgttccttggtcaactttcagaaattcttggtcccaaacagggatatcgtctgttcgcttttctttgttttcataaactttgggaggaggtgagtcatcctcatggtgggtgcaccactgaatgaccttttttaatattgctgcattaacatttggtagaggaactgggtcatgatctccttcatcattcattcccaaatcttccaacatggtcttgatagtcacagattgtttgacaatttccacatcaacttcaaatatctctccaccagaactctgcaacttaattgaaggcatggtgttctgtgttaaggagacggccggccggaggctgactagagttgggaggcgacagcggaggaagagaaaggcagaggaagaagccactacagtggcgcgacacagcatctttagagatagttttcaagacacctgtgttctgccagcaacctgttgcagaaaaagtagttctgtttccatatctcactgttctagtcttactagtttttctttccaaaaatactgcaatagcatcctaactggtcttgttgatttatcacttattctcctgtggtcttttattttcattgtaaccaaaggaatctacttacaacataaatatattggctacatctaaatgcaagggtggctgaatattaatgagcactggtattctgattccatgttctcttatctcctgggaaattatttcgggttctgtgtacccattctcatagcttctgtgtgctttccacttacgaccttcttcagagcgctaccttgtgttcagaagtgccaatgcctgactgctgcagaagtgtgaaagctcatctctcttaccttaaagcggtacagaatttgcaatgtaatttatattacagaacacccaaagaattaggatgaggtgttgatttcccctgaacttgcacttttgtttagcttttctgcttccccgtcctccttatcagcttcttaataaatcgtttgcacaagaatccacagctcaggggaatcgcacctaaagatgcacccctctttcccctctttcctgatgcgtgagtttccctgctcttccttgaacctgtgccatgccccaacttccaggacttgtagatggttttctttctgtctggaatgccattttcccacatgtccacacagttcacatctttcctccttcgtgtctccactcaaataccacttttgcagggatgtctttcatgaccactctgttttttaccctatcccagtccaacattcatcttcatatatttatgtttgagaactaagtgttttccacacttgagtatacatcccatgtgtcttcattccccagctgcattctagcacacagtgcaagaggctgattacataaaaggcattcagcacatgttttaaaatgaaatgtacaaatgagtaactatgcaaaacttaactacacagtaaactgaataaaatttttattctataattaagcattatgttgcctgtctaatgtccaaaattaaagaaatcctaaatgaacgatcactgataaatatctggactagttgtgccttaacaatttattgcagaaataattgtcatcttcattgtagacctgataagcaccacatgctatagaatgttgccttaactaagcttacatgggagctgtgacaaatgtactgcataacagtttatgaaatcacaacttctgataacagtactgaacattagttaaatactctgcctgaaacatgccaataagttgaatatatttgctgaagataaaatacatggtatatgggtcctctcacagagctttgcactattaagaaaataaaaacctttgtgacatagaataaccttgagaattaaattacaatacaaggaattgaaagacagtaaaactttctcaatagttttatgggaatgagcaagcttggaagggaatgagctgtaaagataatgctgaggtagtaaacgcattaataaattaaaagagaaagagaatcaaaacatgaaatcaagagtgaattttaaaggtaacttgatcagaacatcaggaaaagctgatggagacaggaggctgctagagaatgctctgcagtcagactgcagctctaggtatatattatcctttctttcaattttgttttgtcctgaagagacagacgtcctttgttactggtttgactgtctcttgggaacactaaaaactgtatggtaacctgcagtaaagttaagtcaagttctctctgagtgacacagagtgacagggagtcaggctgtctgtccattattatccacaatgtgagtgcctaagttttaatctgaacaagggacttatgactgaacgtatatcactatattggcatatcatattgactttctgataatgttctaaagccagttgagtaagagagagaaaatgccactgggtacaaattgtggcatcaattctctgccagaccgatcaattggatttatatattacctccagctacaatcttaaaatctatagttttactctctcttcagtgcacagctcacagcttaaataattgcagattcaaatgaattttaaaaggatcgaacagtcttaaattaaaaatgtgtgaacattgttgttttaaccactcttaattatttactaatctaactcaatggattcaccttttctccctttctctc

SEQ ID NO: 1885129 - DNA, 4001 bp, Homo sapiens; identical to SEQ ID NO: 916837

SEQ ID NO: 1885130 - DNA, 4001 bp, Homo sapiens; identical to SEQ ID NO: 916844

SEQ ID NO: 1885131 - DNA, 4001 bp, Homo sapiens; identical to SEQ ID NO: 916862

SEQ ID NO: 1885132 - DNA, 4001 bp, Homo sapiens
gtcagacatcaagctagcaagctacaccaggcgggagagtggtggttggcggggagccgctttgtctacaccaggcaggagagtggtggttagcggggagccgctgtgtctccaccaggcgggagagtggtggttagcggggagccgctgtgtgtgaggatgggcttcaggtaattgtgatcaaagctgtaccaccgcctgaatatccatgtgctctcctgttttgtccagtttcctctggcagaatctgggctgtccccttgtaagacttgaaagctgtcattgttgggtggtggatcttgatcagggtcaacaccaactctgaagtactgtcggtggtgttcgttgtggtcctctttggagggctccttgatgctaactctgatattaagccatgacaacatgggtgtcgtgcctcctccaatgatccagatggtgaagaacacgatgaaaggcgtggtggggaacgtcatctggcgagcataggatgccgtgtcacagatggccaacgcaaatgccattgctcccctgaggcctgaaaacatcatcgtgtgttgaaaattccagccaatcttatgccttctgcccaagctgaggaagaaagagagcgggtagatatgggcggctctgcccaggaagacagcaacaaaagctccaatgatgaaaacagggctgaaaacgtgcttctggaaggtaaatagcgccaggatcatgcaggagaagatgaagttctctgcctcaaagagctgcttgcttcgacttcttgattccaccgacagattgttgaaggtgtaatgagcttgtgtgattccacagaaaaggacagctacaacgcctgtaaatccgcaagcttctgccaagagaaacgtgctccaggacatgaggaagaagagcgccgtctccagcaggggaaagcagtccagtttggtaaacttggtcactaaagcagtcacaacaccagtcacagctcccatggtaaaacagccactaaatatacctagaaaaatgccaactgactttaaaaaggcagcagcatcaaaggcgtgagttgaagttcagtcctgctggctggtagccaacaatagatgaggaaagtacaacataacaacgtcatttaggatgctctctccaaacagaagtacataaagatccatgtctgcatgcaattcattgatatcaccagcacagtcactgggtcagtggcagagatgattgctctaaaaaagagacaatgtgtgtagtaaaatttatctgagagctgtctcataatcctcatgagcttcaccataccatacctgagatttccaatacggaagcacgaaacagcagtccccaagaaggagtgacccaagatttctaaaaaagtgtctctttaagctgtatccagcatggaaaataactggaggcagaagaatgttgaaaaatacctatgggtcgaatgttaccttccctagcatgtcattctgctttacgctgttgatcttgccagggctgatttctcttttcagggtgtattcgaagaatttaccgctgacatccactactaaagtgctgaaggcctgatcttcttgagtgcaattgagtaatttgtcacggcccctggtgccaggggtaccatacctcaggatcaccccaacgatgagcccacagatcatggccagcccggtctcatgcagaaagtgcacccggcagtacttgaagagccatatggtgaggatggccagcgtgagcagcaggatgaaggtgagcaggctcacactgtctggccggtggctctcttccgcctccttctcagtgacgagctcctccatggcgctgctgttctcgaccgccgccccagaggaggaggccgaggcctcggccgttactcgaagtcccctacccagcagcagcggcagcagcagcagcagccgccgcggcggcgcctgggcaacccgacccgggcaggggagcgccgcgtcaccaggctccgtggtcccggagccgcccacgcctcctctgcccggggaccagcagcaccgccgacctgcgcgagtggccgcagccaccgcagctcctcctcctactcgcgccgggccgggactgggcccagagcagcgcctccaattgtatttaaaatgtagtttttagaagaataaccaaggccgggagcagtggcccacgcctgtaatcctagcactttgggagagtgaggggggtggatcacctgaggtcaggagatcaagaccagcctggccaacatgaggaaacccccgtctccactgaaaatacaaaaaaaaaaaaaaaaaaaaaaaaaaaaaatgggaaaggattccctatttaataaatggtgttgagaaaactggctagccatatgtagaaagctgaaactggatcccttccttacaccttatacaaaaattaattcaagatggattaaagtcttaaatgttggacctaaaaccataaaaaccctagaagaaaacctaggcattaccattcaggacataggcatgggcaaggacttcatgtctaaaacaccaaaagcaatggcaacaaaatccaaaattgacaaatgggatctaattaaactcaagagcttctgcacagcaaaagaaactaccatcagagtgaacaggcaacctacagaatgggagaaaattttcgcaacctactcatctgacaaagggctaatatccagaatctacaatgaactcaaacaaatttacaagaaaaaaacaaacaaccccatcaaaaagtgggcaaaggacatgaacagacacttctcaaaagaagacatttatgcagccaaaaaacacatgaaaaaatgctcaccatcactggccatcagagaaatgcaaatcaaaaccacaatgagataccatctcacaccagttagaatggccatcattaaaaagtcaggagacaacaggtgctggagaggatgtggagaaataggaacacttttacactgttggtgggactgtaaactagttcaacccttgtggaagttagtgtggcgattcctcagggatctagaactagaaataccatttgacccagccatcccattactgggtatatacccaaaggactataaatcatgctgctataaagacacatgcacacatatgtttagtgtggcactattcacaatagcaaagacttggaaccaacccaaatgtccaacaatgatagactggattaagaaaatgtggcacatatacaccatgggatactatgcagccataaaaaatgatgagttcatgtcctttgtagggacatggatgaaattggaaatcatctttctcagtaaactatcacaagaacaaaaaaccaaacactgcatattctcactcataggtgggaattgaacaatgagaacacatggacacaggaaggggaacatcacactctggggactgttgtggggggagcggagaggggagggatagctttaggagatatacctaatgctaaatgacaagttaatgggtgcagcacaccagcatggcacatatatacatatgtaacctgcacattgtgcacatgtaccctaaaacttaaagtataataataataataaaataaaaaaatacaaaaataaaatttagccgggcatggtgacgggtgcctgtaatcctagctactcaggaggccgaagcaggagaatcacttgaaccctggaagcggaggttgcagtgagccgagatggcaccattgcactccagcctgggcaaaaagagcgaaactctgtctcaaaaaaaaaaaaaagaataacagaaaaaatgtgagaaaatatatttaaaaccttggagggagaaagctatcttaacaaaacagagagccaaatgcattcacgtatgacagaaggtacaaaaagtcgagaagtaactgaattattacataaaatatttgcaactggtgtaacaaaattttatacctcactttattttgttttttaattttagttatggagatggagttttgctcttgttgcccaggctggagtgcaatggcgc

SEQ ID NO: 1885133 - DNA, 4001 bp, Homo sapiens; identical to SEQ ID NO: 916885

SEQ ID NO: 1885134 - DNA, 4001 bp, Homo sapiens
tgcttatatggtattcaataagtgagagacatgtggagcatctttatactagtgatgacaccccactcccctccaggagcacatgctatctagcagggaaccctctgcctggccaggtcactacatgagggaaacaggtgggactgttcttcacttgccaaaatatccactgggtcttcagcaatttctttgactaaatgatcttcaagggttagtgaaggatcaaaaagcaaaggtgaaggaggacactgcataccatcacccacaacatccaagtcctagaaaaaagagaaaagcccatcagcaataccaagggaaacagtaataaagttggcatgtttttcagcaaactttaaagcaatactctgctgtctccctcaaccctagcctacctttaataaaaaaaaaattttacaagagcgtccaacaaatgaaacaagatccaaaagcactgagagcttttgctgccaagtgtaaaacatagaccaatacagtagattaaaaaacaaaattctggccaccacacctctaatcccagcactttgggaggccaaggtaggcatatcacttgagcccaggagttcaagaccagcctgggcaacatggtgaaaccccgtctctacaaaaactgcaaaaataagccaggcgcggtggcacacacctgtagtcccagctactctggaggttgaggtgggaggatccctcaagcttgggacgcagaggctgcagtgagccgagactgcacctctgcactctaacctgggtggcagagccagaccctgtctcaaaaaaaaaaaaaattctaggaaaattcacagaaacacaaagtagaaacggagaatagtagggaacaggggaaagggaaaggagagagttactgtttaaaaagtacaaagtttctgtttgggttgatgaaaaagttctggaacagaaaatggtgatagctgtacaacatggtaaatgttcataacaccactgacttgtacacttaaaaacggccaggtgcagtggctcatgcctatgataacaacaccttgggaagccgaagtgggaggatcacttgaggccaggaattcaagaccagcctgggtgacacagcaagactccatctctacctacccacctacttacacacatacatacataggttaaaagagtaaaattttgttatgtatgttttactacaattaaaaaaatattttttaaaaaagcatattctctgaggctacctgtaatgaacatgtaagttcaccagtgattaatttaaatatgaacaatgctacgttaaaattaaatattgctgggtaatacaagattgcctgattaatatcctaacagccacaaagcaagcaaacaagctccaacaagggaaagggagaaggtaggaagaaaggaaggacaacagaaaactcacagttcctctgaatggctaggaaatattattttggttaagtccctatcccgacagagcaacaacctggttttttttgttttgttttttttttttttgagacagagtctcgctctgtcgcccaggctggagtgcagtgacgtgatctcggctcactgcaacctccgcctcctgggttcaagtgattctcctgcctcagcctccccagtagctgggactatgggcgtgtgccaccacgcccagctaattttttgtatttttagtagagacagggtttcaccatgttagccaggatggccttgatctcccgaccagtgattggcccacctcagcctcccaaagtgctgggattacaggcatgagccaccacgcccggccaactccctggttcttaagcctaacatagttttgctctgtaaaaaaaaaaaaaaaaaaaatgacattacattctagactatgtttcttccaactgaattggcaattcgcactggaatactgaatagccaacagaccacaaggaagacatcactcttagctcctgtttgaaaccaacagctacagcaaaccattggtcttgattcagggcctaaggcaatacaaactcaaacaatatatcaaactaactttcatgccactgcttttcaagagtctggtgctaaattctccttcttcctaagaattaaaaatatccaggaggtttgtacccccctatgtttaatccagtttatagatgctccgtgtttctattcatctagcttcacgagaagcttagttctacgcttttaaataaatctaagaatttgcaatcctttcccatttgttggtgtgctaatcaccaaaaatgagaatcacaacatcttcacattaaagaatatatataattttaaaatctacttaaagctgctcaggccgggtgcagtggctcacgcctgcaatcctaacactttgggaggccaaggtgggcggatcatgaggtcaagagattgagaccatcctggctaacatggtgaaacccagtctccacaaaaaattaccagcctggccaacatggtgaaaccccatctctactaaaaatacaaaaattagccaggcgtcttggcacatacctgtagtcccagctactcaggacactgaggcaggagaattgcttgaacccaggaggcagaggttgcagtgagccgagactgcaccactgcactccagtctgggcaacagagcaagactctgtctcaaaaaaaaataataaaataaagctgctcaatttaagcagaaacatagggcacaggatacactcaacctaccattcattttcaggtgagttggaaacttctgtactacccacagaaaccagtgttctcacaccattaagactataaatctgttttctcccattcttttactatgtgcaatttgtgtgtgtgtgtgtgcgtgcgtgtgtgtgagacagagtttcactcttgttacccaggctggagtgcaatggcaagatcttggctcactgcaacctccacctcctgggttcaagcgattctcctgcctcagcctccccagtagctgggattacaggcgcgtgccaccacatccagctaattgttgtatttttggtagagacggagtttcaccatgttggccaggctagtctagaactcctgacctcaggtgatctacccgtctcggactcccaaagtgctgggattacaagcgtcagccaccgcacccggcccatgtgcaattcttacataaacaattagcttggaatgggcacggtggctcacgcctgtaatcctagcactttgggaggccaaggtgggcgaaacacttgaggccaggagcttgagaccagcctggccaacatggtgaaaccctgtctctactaaaaatacaaaaattagccaagcacagtggggcgcacctgtaatcccaactactcggaaggcttagaccggagaatcgcttgaacccaggaggcagacagtgcagtgagccgagatcacgccaatgcactccagcctaggtgacagagcgagactctgtcaaaaataataatgactagcttggaattatttaaacactgaatcaaaaggcatctaaatctcaagataataatggaatgtgtatgttttcagaaaaggcttttctcatatatacaaagggttgtcttttataagattttaaactgggaaaaggatcctaaaataagaaaatcagcaaaaatgcctattaaaacaggagtgttttaaaaattgaagtatcaggatataaagagaatccatgttttcagctgggcgcgatgtctcatgtctataatctcagcactttggggaagctgaggggagtggatcacctgaggttaggagatcgagaccagcctggccaacatggcgaaaccccatctctactaaaaaatacaaaaattagccagacatggtggcacacacctgtaatcccagctactcgggaggcaggaacaggagaattgcttgaacccagatggtgaaggttgcagtgagccgagatcgtgccactgcactccagtctgggcgacagaccaagactccgtctcaaaaaataaataaagataaaataagag

SEQ ID NO: 1885135 - DNA, 4001 bp, Homo sapiens
atttccaaatatttggcatttcttgccaagcaaatgaaatccagcaatcctatttaattaacaagtgcttttactgcgaaatttttctcaatgcctataataaataagcactttcacaattcaatcaacaactcaaaaaagtttgaaggcccaatgccaaatgtagtcctttaacagaatcaagagacattatgatggttcaaaggcaaattaattgaaaagaagaaaaaaagcatctcatttttggaaatagcaaacttctaatttgaatgatgtttaaagtatgcaagttagaggccaggcacagtgactaagtgttatcacaaaagagtcaagagactgggcatggtggctcacaactgtaatcctagcactttgggaggctgaggcgggaggatcacatgagctcagaagttcgagaccagcctgggaaacatagtgacacaacctctctacaaaaattaaataaaattagctggacgtggtagcacatgcctgtagtcccagctactctggtggctgaggtgggaagatcgtttaagcccagcagatcacggcagtaagccatcatcatgccactgcactccaacttgggcaacagagtaagactctgtctcaaaaaaattaaaaaaagaaaactttttaaagagccaagtttcttttttaagtttataaaggccaggtacagtggctgatgactgtaagcccagcatttggggaggaaaggactggcagactgcttaagcccagcagtttgagaccagcctgggcaacatattgaaaattgactctacaaaaaataaaaaaaaaaaaaataggccaggtgcagtggctcatgcctgtaatcccaacactttgggaggccgaggcaggcagatcacttgaggtcaggaatttgagaccaacctggccaacatggtgaaaccccatctctactaaaaatacaaaaattagccaggcgtggtggcacgtgcctgtaatcccagctactcaggaggatgacacacaagaattgcttgaacccaggaggtggaagttgcagtgagccgagatcacaccactgcactccagcctgggcgacacagcgagactctgcctcaaaaaatataattaataataaaataaaataaataattagccaggcatggtggcacacatacatagtcccagctattcagaaggctgaggtaggagaattgcttgacccaggagttaaggctgcagtgagctatgactgagccactgcactccagcctggataacagtgtgagaccctgtctcaaaaaacacaaataaaaaaataaaagccgggcacagtggcttactcctgtaatcccagcattctgggaagccaaggcgggtggatcacctgaggtcaggagctcgagaccagcctggccaacatggtgaaaccccatctctactaataatacaaacattagccaggtattgtggtacgtgcctataatcccagctactcggagaatcgcttgaactcgggaggcggagggtgcagtgaggtggaggttgcagtgagccgagatcacgccattgcactccagcctgggagactagagcaaaactccatctccaaaaaataaaaaataaaataaaatacagaagtgagggccctaaccacacaaaaggataatactagaagttcacagtgcaaaatcatcctttcaactggggtggaaaacccacagtaattttttaagtttataattagatttaacagcattaggatcctaataagcaagttaaatcagaaaccttgagacaattacaaatattttatgtatattttgggacccaagtattaaggctataaataaatattagcccacatctatgaaaaacgactcatgtttctttctaatgaattgaccattacatttccaaagttatgaaatggccaacagaccatagaaagacaattctttaggctcctgcttgaaaccaacagcttcagcaaactgctggccttgattcagggccaaaggaaaacaaaatccttcaattaagcaaactagcacagagattcccactagtcttcaaactagcaaaccacagccttaacaggcagagtaaaaagatacgggtaaggcagtgtctggtcattggaagagactgattggaacaacgaacatcatccacaaaggccaagcacctctgactggaacgagtggtatgggcctgaaatggaaaaagacagataaaatagacccacaaaagaacacacaaacaattacgatgaaaatagttatataagaaaagcacatcctaaaggctagaaattcaacatttaacaaaaatagattcaccaatattatgcaaaagacaaaaaactttaaaacctagtgcataaagaatgagtcaacctcaatcccaaatacacctctccatattctaaaagtgtgatatagcctatttaacacaaattttgtcttttaccaacagaactctgaaattgcagccttaagtggaatctcaacaaatgaaacaaaattactcttactgaaacagagaccaagggtctgaaaaacaaatttaagaatgatcacttaattcttcttcctattaaccttacttcctgacattcaattgctcctattctaccttcccaccttttaaaacaagattcccaagcaatttaggattaacctgtgcttatttctgaactgaagaatatctgaaccaaggacttagaaacttttcccaactactcaatatgcagatgagaatactgaggcccagaaaatttaagctaactgtgcagacacagagctggtcagtggggactcacactagaatccatgtctcctgacttcaagctaagtgctttcactataacccatgtgcaaaaagtcagatttcagatccaagactggacatagggagttcaagaccagcctgaccaacatggagaaaccccgtctctactaaaaatacaaaatcagccagacatggtggcacatgcctgtaatcctagctactcaggaggctgagggaggagaatcacttgaacccaggaggtggatgctgcggtgagccaagacggcgccattgcactccagcctgggcaacaagattgaaactctgtctcaaaaaaagactggacatagtgttttgacaattactctaactttgtaaataaagtgaacatgaacaggcacggtggctcatgtctgcaatcccaacactttgggaggccgaggtgggtagatcacgaggtcaggcattggagaccagcctggccaacatagtgaaaccccaaaaaatacaaaaacattagctgggcgcatggtggtgggcacctgtaatcccagctactcgggaggctgaggcaggagaattgcttgaaactgggaggcagaggttgagagatctcagtgagccgacatcgcaccactgcactccagcccgagtgacagtgcgagactccgtctcgaaaaaataaaaacaataaataaagtgaacgtatataccttaaaggtatacacacaaattacctgttgggcagcaccatctgtggccagcattctccgttccttcaactgcctatgcagtaaggcttccactccatagcgctggcggtatcgtcgcagacattttaatcgctttaagttctctcgttctttggccaaaagtccctctgggccagtcaggagactactgcctagagttacaagagtcaagatgttatttgccaagcaatccatcaaggttacgtctccaagtcaacaagtaaacaggaaaatccttgggcataagataggcagtttcaaaagcaaatgacccccaatccaggtaccaagacagaaataaatctaattatagtcatgcactatataaccactttttaatcaatcattgaccatacatactatggtggtcccataagattataacaaagctggaaaaaaaattttttttttttttgaggcacagtctcgctctgttgtccaggctggagtgcagtggcgcaatcttggctcact

SEQ ID NO: 1885136 - DNA, 4001 bp, Homo sapiens
tcaaaaaaaaaaaaaaaaaaaagtactagactagagaatcaaaaaagcagtgggaactacaaacttaaaaagagtatcactggaagacccagtaaaggcaatctccccagtggttcatctgatgggccttttatgagttactttcaaccattctctgaatgtaaatgcttaaagttaagatgatggtataactgtaagccattctgtgcccatttcagttcttatagaaagtaatcttttgccctccttgtcataatgcagtatagaaatagacaatttctagcataggtacctcaaccctaactgaacttctattttaatcctgctctaagattcagtgtcaaaacgatcttgacaatacctatctatgtctatcttagtgatccagcatcaggcccaatttctctatgttttaagtatattcctaccactagagaattctgagatggtattagcattatttttttaaaaataattatttaaaatttaaaaatatagacacagggtctcaccacattgcccagactggtcttgaagtcctgagctcaagtgatccgcctacctcagcctcccaaagtgctgggattacaggcgtaagccaccacgtctggcagagatggcattggcattaatcgtgagaaatgggagtgggtgtaggagacacagagtggagggtaaaaagaagaaagatatttggaactgatgggctttaataagtcctgccccttttcatttacttcttccttcaaagcaaaaccaaaatgagctactgaagatttatttacttcttgggatggaagtatcatctgtcccaacttccctttcccatcagagacaggtccccaaaaccgcgaaaaagaaactatattctcaaacaaaacatgcattcaattcaggtgactgtttgatattttcataacattttctttaacatttaatagaaactatatacaataaatttttactatattttacataagatagcaaccacagaaatttacataggttaaaagcaagacggataaggaggacccagtcctgtgggctgttttctcagaggataaaaagccagagttcaccagggaaaggggttaaagactgcccaattaagtagaggtgaagaaaagctaaactgcaggtcttcagatagagataaccgatattagggccatcagtatctcaaagacaccactcacaaagacagctcccacctagctacttaagtggatttctatccatgacttgggaaatcccattacaaagatgtcactttccttttaggtatagtcccaaataatcccagaagctttgatagggattatctctctttctcttccttgccctgagtgggaagaaacccacggtccacgtcctcaaaatttggctttacgtttgactataatactcaatccagaagaaaaacaaggtagtctgggttgcctgtgttttgtgagagatgatcagaaatacttctttgaagaacgagaaatttaaatccaccaaagtaaaatggttccccaaactatcaactaatagaagtgggttctggcttcccatttgcagtagccaatccactctgagacaatggtgcagaggctttctcagaatttcgagatccctgggatctgcacccatctccagccatctgcatctggccctgttaaaagaaataaaggcacttcagttagtaattcattcactgtggtctgaagtatgaatctgacttatcagtggccacttaaactagcaataagaacaatacaacagaaattaattctggacagatgctcttcccatattagctatcctagtcccttggaagagcctattcctgagcctcttccaatgggatggtgagctgtaggttgtttcttccaaatgaaatagccattccctactgaggtcccagaacagccaacagaccacaggaagacagtcctttaggcctctgcttgaaaccaacagccacagtacaactgctggtcttcagtcagggccactggaattctacccaaggctcacggacagaactcaaatcacattactttactggtccttctacaatgagaacaatttcagtgatgaactctccctcagaaggtatgatttccctagattccttgtctcaagcttttatttaaataaatgtatgtcctactctgggatatgaggatcacgggccattaggtgttctaagagcccatctggagaactacagcaacaagggtacacaggagcagagtagggcatttttaaaagtgctttgcttatatggtattcaataagtgagagacatgtggagcatctttatactagtgatgacaccccactcccctccaggagcacatgctatctagcagggaaccctctgcctggccaggtcactacatgagggaaacaggtgggactgttcttcacttgccaaaatatccactgggtcttcagcaatttctttgactaaatgatcttcaagggttagtgaaggatcaaaaagcaaaggtgaaggaggacactgcataccatcacccacaacatccaagtcctagaaaaaagagaaaagcccatcagcaataccaagggaaacagtaataaagttggcatgtttttcagcaaactttaaagcaatactctgctgtctccctcaaccctagcctacctttaataaaaaaaaaattttacaagagcgtccaacaaatgaaacaagatccaaaagcactgagagcttttgctgccaagtgtaaaacatagaccaatacagtagattaaaaaacaaaattctggccaccacacctctaatcccagcactttgggaggccaaggtaggcatatcacttgagcccaggagttcaagaccagcctgggcaacatggtgaaaccccgtctctacaaaaactgcaaaaataagccaggcgcggtggcacacacctgtagtcccagctactctggaggttgaggtgggaggatccctcaagcttgggacgcagaggctgcagtgagccgagactgcacctctgcactctaacctgggtggcagagccagaccctgtctcaaaaaaaaaaaaaattctaggaaaattcacagaaacacaaagtagaaacggagaatagtagggaacaggggaaagggaaaggagagagttactgtttaaaaagtacaaagtttctgtttgggttgatgaaaaagttctggaacagaaaatggtgatagctgtacaacatggtaaatgttcataacaccactgacttgtacacttaaaaacggccaggtgcagtggctcatgcctatgataacaacaccttgggaagccgaagtgggaggatcacttgaggccaggaattcaagaccagcctgggtgacacagcaagactccatctctacctacccacctacttacacacatacatacataggttaaaagagtaaaattttgttatgtatgttttactacaattaaaaaaatattttttaaaaaagcatattctctgaggctacctgtaatgaacatgtaagttcaccagtgattaatttaaatatgaacaatgctacgttaaaattaaatattgctgggtaatacaagattgcctgattaatatcctaacagccacaaagcaagcaaacaagctccaacaagggaaagggagaaggtaggaagaaaggaaggacaacagaaaactcacagttcctctgaatggctaggaaatattattttggttaagtccctatcccgacagagcaacaacctggttttttttgttttgttttttttttttttgagacagagtctcgctctgtcgcccaggctggagtgcagtgacgtgatctcggctcactgcaacctccgcctcctgggttcaagtgattctcctgcctcagcctccccagtagctgggactatgggcgtgtgccaccacgcccagctaattttttgtatttttagtagagacagggtttcaccatgttagccaggatggccttgatctcccgaccagtgattggccca

SEQ ID NO: 1885137 - DNA, 4001 bp, Homo sapiens
tataatcccagcactttgggaggccaaggcgggcgatcacctgaggtcgggagttccaagatcagcctggccaacatggtgaaaccccgtttctactaaaaatacaaaaactagcagggcatggtggcgcgcacctgtaacctcagctcctcggggggctgaggcggaagaatcgcttgaacccaggaggtggaggttgcggtgaaccaggatcacgccattgcactccagcctggctaacaagagcgaaactccgtctcaaaaaacaaacaaacaaaaacataataatagattttggctgggcacagtggctcatgcctgtaatcccagcactttgggaggccacggcgggcggatcacgaggtcaggagttcgagaccggcctggccaatgtggtaaaactccgtctctactaaaaatacaaaaactagccggtcgtggtggtgcacgcctgtagtcccagctattcgggaggctgaggcagaagaattgcttgaacccgggagacagaggtcgcggtgagccaagatcgtgccactgcactaccgcctgagcgacagagtaagactccatctcaaaaaaaagaaaaaaaaaaaaaaaaactaattctcttttctcttcttttcacaggtgttgaccattctttcaatagccattttactaacagataatttatagttcataattaaaacaacccaaaatctaaatcgtacttttaagactgagatactctgcaagaggtaccacacgtaaaaactgaagatggcaagatgacttgtgtgagcagcatcactaacttacaatttcaagcaaatgttgagtataaataaaaggaatagatagataaaatagcagaaatgtaagtttgtctgaaggaaaacaaaccctagtttaaaattagatatcatgcattgtctttagtgctaccttttgtttctgcattagtgcttcttgcaccaatatctcctgcaaagcttctcattgactccatttccacgcggccatccccgcaggccctcacctgtatatgtggatgtctttgcatctcctgatcctatcccccgcaggccctcacctgtatatgtggatgtctttgcatctcccgatcctatcgcaccactcctgagctttggcatccatcactggattcaggtcattgtcataaaacacgacggtgtccgcctctacaaggtttatacctgtggtacggctgtgagtggagagaatggcacaaaaaatccgcctgtctctgttgaaactcctcatcagttcctaagatgaaacaaaacacaggagttagtattcttggaaaatgttgggaaacctttgacacgtttcaacatttattaattagaaataatcccacagcaggccgggcgtggcggctcacacctgtaatcccagcactttgggaggccgaggtgggtggatcacaaggtcagcagatcgagatcatcctggctaacatggcgaaaccccgtctctactaaaaatacaaaaaattagctgggcgtggtggcaggcgcctgcagtcccagctacttgggaggctgtggcaggagaatggcgtgaacccgggaggagcctgcagtgagccaagattgcgccactgtactccagcctcggcgacagagcaggactctgtctcaaaaaagaaattatcccatagcaaaactgcttggtttgtattccattcaacacgaggctcatgttaaagcaacaccaaggtccccgcactgtattccagctcttctgtgcagccactatcatcttacgctcacccatcgccaacaccctcatgcacagtttaaataacatcagccatgagtgacaagaaggaaaaagttagagtccaccttgcatttactgtcagctcaacttgtaggccccaaaagaaaacagcgtcttactggggagggatatgtgctttctcatctatcctcaggcaatgccagagcactttacaggcaacaaaaagtccctggagtaaggctgaggaagcaggaaaaacaaaaccgtgaaggatagtcctctaacctcactgttgaccatgaagggagatgacttgaatacttttcttccataacgatttctgtgccagaaacgaaacctaatcactgaccaactctcttccttccaggcattctacagataatttgctataatattaccaagaaaacttgttaaatcaccttttgctctatttctttctaggcctctccagcgtgtacatgagcgtgtgtgtgagataaagcaggctgcgcgacttacagggcagcaacttggttttgcgctgggggacactgggccatgctactaaaactggctctgaaatgctgctgacaagggcctagcacaccacgtgaaatgctgggcagtttctgctcatgaagctgccagggcacggggcccatggacaaccccttatgcactcactcttctgctgaacactgactttgttctcaactgtgaattaccataaacatttcaacaacaactatgtagacagatcttaagtggtgtgtttgttgtcatgtaagtaaagggtcctaaatacagaattactaggtcaagcatacatcactattaaggttcaaatccatactgccaggctgccttctagaactatactagtttatgctttcacgggaggatatgagagtgtctgactcactgtgcctgatgaaacaaaacagccttggcaaatcttgtaagtaaacaatgggcatattaccctaacttgtatttcccttcattctaaattggttggaattgttttcatatttttaccctgtagccacctcttgaagtacgccagtatcgtcttaatgatgattgcaggtcaccggcatttattctgagacatcaagactgcatttacctaacaacgtggcttttaataaaaaatatcgaaggatggattgagactttaaaaagttcagaagctcattaagtccctcccctttcacttagaagggccatgagaccactgaatttacacagcacttaggcattcaacaccagtgactgacccatcagagacaatgtaaacaatgtgcttctcacctgccgttgctcactgctggcattttcatcgattcttacataggtgaggtaatggaagttcaagaacatctctaaaatgtccaacataagaatcatctgtgataaaatcagcacccgacgtccttcagatttcaatttctgaagcaagatagctaaagcttccaacttccctgggaaacgaatcacatcaagagcgcctcatcatccagggccggtgcagctcccgcacgggccacgcccccaactgccgcatacctgagtcgaactgcaccagcctcagctcagggaactgcagcaggcgtggagccgtggtctgccgcagctgctggaagtacggcgcagcgtgctctctcaggccctgcctcaagatcctcattctgtggctgtacaggggtggcggccgcggcacccgtagggacgggggtgctgccaccaccggaggaatcacaaaggccaccctgaggagcagaaagcatgttttgtcaccaccaggagccacacaccttcacccagcatgggggctcctgaaagatggggcagacttctgacagtccaagtcccaggaaacagcagggctcaacccagtcacatggggatgtgggtgttggcacacgggcaggggcccaacgaggcagatcctaaccagtcctggccaataaccaccacctcggggactaattcagacagtccagggctgatggatcaatgggggtggattccctaggccgcaggcaccaggtcagagataagccattctctttctagtgtgtcttcagctggaaactttgggacaaaggtgcactgtctcgtggaccctagaactgctatagccactgtgccaccaggacgggggccagactcagggtgaaggagccttcaggacaatgacaatagagcgaagatcgcacagccaacctaaggcccaccttgcaacc

SEQ ID NO: 1885138 - DNA, 4001 bp, Homo sapiens
atcaggaatagacaatttcctacactgtcaaatatataaaagttccttttgcactttcttcaacactgatcaacaagcagattcagtccacatttgctttgatctaactactgagttaacccaagcttcttcttcagagactctggcatctcgggtggaggagggcgaggaagtctgaagtagaccttcacggagtcatagataaaccactgtagtgcagtcagggtaccaatcatgatgatacgggcaaacagtcccttccatacacctggttcaaacaggaaaagcaaatgaaaaaaatgcaacatatccaaaactgttgttctttctttcaagaaaaaaacatcatcctacctttaaatccaagtctcttgaggaccagagaagcactgctacctttttctttattcaacacagataccacagaatcagcagggtgagaaacaattgcacaaaagactccagctgaaaaaagataaaggatcccatacagtgccagttaaaaacaaaacttcacagagccaataatcatttttatgattttaaaataatatttttctagttctaaaataaaaatcagactcagggtgacacgggtacagttatcaagctgtctatcctatgtaaaacggaacaatcttttaaagtttttcagattttattcaacactttctgtataaaattcttaataaacaacaacaaaaaaatggtgcaacagtaagatcaatacattcccaagcctaataatgacatcccatgaaacagcccttttaggaactagttagcaagtatttatgaatcctaaaaagcatataaaatgttatgggaagataaaactgctttataggccaggcacatcacctgaggtcaggagtttgagaccagactcatcaacatggtgaaaccccatctttacaaaaatcaggccaggcgcggtggctcacgcctgtaatcccagcactttgggaggccaaggcaggcagatcacctggggccaggagtttgagaccagcctggccaacatagtgaaaccgtctctactaaaaatactaaaaattagccgggcgtagtggcagacgcctgcaatcccagctactcaggaggctgagacaggagaatcgcttgaacccaggaggcggaggctgcagtgagccaagattgcaccactgcactccagcctgggcaacaagggtaaaactccatctcaaaaaaaaacaaaaaacaaaaacaaaaatcagccgggcatggcggtgcatgcccgtcccagctacttgggaggctgcggcagaagaatcacttgaacccaggaggaggaggttgcagtgagctattatcatgccactgcactccagcctgggcaacagagcgagactatgcctcagggaaaccaaaaaaacaaaaacactgctttataacctttggagtatttttccctctcaaaaaacgccaataatggaaatgattatttgttcataatttcagacaagtgtgttctaagtaattcgtacctatgtaacctgctacaaatgttacaaccagctgctctggctttgaacattcactgcggggcttaggaaccacaaacttgtacagtgcttcaacagtacgttcaaagcaggcgaacttcatcatggtgtatggtatctgtctcatccagagaggagcaacccccttgtagaatctaggaaatcaagagacttgttttacacagttgcatacactcatctatcagagactgtcattattaacagaaatgtccgcacacgagtcgagtcctgatagtaacaaatggcagcataaatgcatgtcatttctatcagaacgttagactaacatgcaggtatatttctcttacatgccaatgactcaagcacctttgactatacaaccaaaaaagttgctggatgtttctttgactactggaaccacaagaaacaagaagtttacaagtggaactcagttcaagattcatccacaaaggtggatctaaggaagcatgttgtggtcatggaaattcttaactgtgaatagatcacaaggatactaacaagccctccctaaaagttaatagtaaatgtttaggccaaacatcaagtcatttgtagaccgacaaatggtccttactctagggaaaaaaaaaaaactcagtccagggctcaaaccatgtattaacttatctttacctctcaagtttatgttctacatacaggtaaatagacattaaatgttataatagtctttttaaaaagtctggtaggcttaatactaaaaaatgaagttcacagccagacgcggtgtctcacgcctgtaatcccagcactttgggaggccgaggcgggtggatcacctgaggtcaggagttcgagaccagcctgaccaacatggagtctctactaaaaatacaaaattagccaggcgtggtggtgcatgcctgtaatcccagctattcagcaggctgaggcaggacaatcacttgaacctgggaggcggaggttgcagtgagctgagatagtgccattgcactccagcctggacaacaagagcaaaactccgtctcaaagaaaaaaaaaaaagaagccgggtgcggtggctcacacctgtaatcccagcattttgggaggccaaggtgggcggatcatgaggtcaggagatggagacggtgaaactccgtctatactgaaaaatacaaaaaattagctgggcgcagtggcaggcgcctgtagtcccagctacttgggaggctgaggcaggagaatggcgtgaacccgggaggcggagcttgcagtgagccgagatcacgccactgcactccagcctgggtgacagagcgagactttgtctcaaaaaaacaaaacaaaaaaaaaaacaaaaaaaaatgaagttcacttaaaataagtactttcatagtataaatttttaagtgtttacttacgcttttaggccttcttccttatacattttgggagctgcatccctcaaagtgttggcataacctggctgggtttgaattcgaaccttagcagcttccataggagccagggcaatgtcagcaaagaattcagcactggcagaggcagccaaatatagtgatgtgcgccagagataagtattctcctaaaatccaaaacacaaggaagggatgtgaattgctgttgtgttggttttcaattgaagtgacagttctagaaaacaactaagcttcagacattttataaagtaacacacgatgatatggaatatatatgtggtctcataacctcattaacaaaacacgtaactatgtgaacaacatgaatattcaaaaaatatctagatgccatgccccggaactacgcaaaggagtcccagagcccttctctaaaaaactcaaaatccaacttacttagaaaacaagatagtatattaaaaggagaattgtaatttaatgaaatacatttatcaacctgtctctgctgacacaggcatacgatttaaaacaagttgctcactttgtaggaccattttcttcagtgctaaaataaggcaagacagacaaaaatctaagaacactcggaaagtcttaaacactcggaacattcaattttaaagttaattacatacctctccaagcatattgctatacaagactttaaagacttcataaaagccaaacttgcagagtccctgcatggagtagccaaggaaagtcggagcccatcctttagccaaaccacgaacaccatcctctttaagtgtaactgagaatccgttaaatatgcccttgtacttttgggggtccacctttatttaaaacaagaaaaaaaaaattaaatgcaccaaacagctaacataaaaatttaatctcatgattatttttgtttgggttccataataaatttcagcaactacacaaaaggtaactacagtaattcctgccaggcacggtggctcacatctgtaatcccagcactttgggaggctgaggcaggtggattacctgagctcaggagttcaagaccagc

SEQ ID NO: 1885139 - DNA, 4001 bp, Homo sapiens
agtgcgtgcgtaagcaggtagtataaatgcttaggttgagatactaaaattattattagagaaaattacaggaagtacctatgctcccactatgttttgttacttggttaatttttctcctctgaacttctggcaggtttactggggaattttccattaggaatattctggtccttaagtttcattttgaatgtataatataatcatgcagattacgaacccacaatctaaaatcaaggcattcttttttaaagtttcagatgaggctgggtgtggggctcatgcctgtaatcccaacactttgggaggccgaggcgggtggatcatgaggtcgagagatcgataccatcctggccagcatggtgaaacctccccgtctctactaaaaatacaaaaattagccgagcgtggtggcgcgcacctgtagtcctagctactcgggaggctgaggcaagagaattgcttgaatccaggaggcagatgttgcagtgagccaagatcgtgccgctgcactccagtctggcgatagagcgagactctgtctcaaaaaaaaaaaaaaagtttcaggtgtattcaggagtggtcatattaagcttgtcacctgatcctggttatgaggttaacagcaaaatgaaataaaatatttttctgagccatttgtttctcctctcatggaagacactaattctgtttatttctatattcggccttgtgttgaaacagactgtaaaatcatgttttaaaaaagcttcacccatccttgtggagggtggtggtttgcaaaagcaccaccccacttaagcatttatattgagaagatatttatggcattcttccattcatgaaaatgggtatgctttgttctggagttcttaccttgatttatctactaacactaaagttcctcacttccaatttcttatacctctaacccaacagcttataaactgcatgtagtatagtatttgcttgaaatatgtgaaagtagttattttccctaactaatagggatatttctgtggtggttgtagttactttgcaacctgttcagcaaatattatagggcgtttttgatggtatctttaaattttggacatagagaaccatcttggataacctctttccccccagtctcagtcatccctttggaggtagtgtctcatttttaatctgtgacttgtggaagttaaggcatttgagtagcttatttaaagtattaataatctgatttctggagatctgaggaatagcagacacccttttctgtattaaattggggaaatttattttataggcaaaaagatgaataaaatggtcctagtagacagcccctaatatttctggtctcgggtaaaggtcttaaggaagagggaaggtagtatcagaattttccagggtgttttttttttgttgtttgtttgtttgtttgttttgggtggacaggaagtagaatttattggtgagtattaagagggggcagcacagtggaagccctcatgagtgcagggcccgccacttgtccacagggccacgattggaaatgtacttgacccgacagccatctgggatgagccgcttctcagtcaccatgtcttcaaactcattggcattgaacttggtgaagccccacttctttgagatgtggatcttctggcggccagaaaacttgaacttggccctgcgcagggcctcaatcacatgctccttgttctgcagcttggtgtgaatggagatgataacttggccagtgtgaaccctggccacagtgccctggggcttcccaaaggcacctcgcatgcctgtttggaacctacactggggtagtgcaaggtcagaaacatgaacatccatctgaaaggactgtctccagggtcccttagagcaacccatacaatacaacacacaggctgcatacactaccaaggaagctgctgtttgcagccattgcacactgggcccccccatgaggaaaggaactcagttggcttaataggctgcagcagggtgttttttaaaacacacaaatatacccaatccctactagaatgagagattttactaataatagtgttaggagtataaatggtttggtagccaaccactactttaaaattgattaggtctcccgggcttctgggccttcacatttaaatttgacctgaccttgaaacttcacctctcgttattcccagcgtgacttttgttttacccacttttcgaaataccccatgtgtagctccttacttcacgtcatgctggaatgtgacccataccagccaaactacatctaacagaaacataatacctaactaaaagcgtcttttatcatatagatagatgtacagggtatgttaatttatctttagagagactccccagtatactgaaaaaacagacctaagttttggtagatagccttgctttatagaaaatgaaaatgggccagacagtggtgactcattcctgaaatcccaacactttgggaggccaaggcaggaggatcacttttgaggccaggagtttgagaccagcctgggcaacatagcaagaccctgtatctgcaaaaaatttaaaaaaaaaaatttaatcaggcatgcagcacacgcctatagtccagttactcaggatgttgaggtgggtagatcgcttgagcccaggagttgaggctgtagtgagctatgattgcacctctgcactctagcctgggtaacagaatgagaccctgtctcttaaaaagaaggaaatgaagatgccagatactagcttttccagcctcccttgcagctagggcacaagtacttgacctaggccccacaaaattacatgtactttaacttgagatggaagagatgataaatttctgatagatttctcttctcctcttggttgatgtacaccacaaatcagttttctgctgcagaaacaactgatacaaactgaagcatctactgttagtgatgtgacagcagtttcctcacctggccagttttgtaatacggtttcgggtgtttgtggctatgttagcttccaacttcattctctagttttccacagtaattttgtaagttgcttggtattttttaatgacttatttttatatgtaaatgtgatttgtataacttccaacaggaaaccttgtccaatgcgtgattttagaaaatttagcaaaaacttttcaaagggatatttatgtgaagaaaatgagtggtatccttgtgagagaaaagtacaagaatgagactggggcaaactgcttttccagaaataaagaggccctgatggtgtcacttttggtagatccaagcttttcatgaatattgaagctctggatgccttgttcagtagtttcataagcaaaaatccaaaagtgtagaaagagttttaattgaaattaaataaaatcaaaattttagttttacagttacactaaccacattttaagtccttgatagtcatctgtggctagtggctactatactggacagtccagatagaacactatcattacaggaagctctattggacagcactagtctggattctaatcctaaatctacagtcttgtggttctgcaacctcaggtaagtaatctgaatcacaaatcctttatctctttttatttatttatttatcttctatctgtctgtctgtctgtctctgtctattttgagacaagtctcactctgttgcccaggctggagtgcagtggtgcagtcacaactcacctcagcctcctgagtagctagggccacaggcatgcaccaccatgcccaggtaattttttgtagagacaaggtttcacaatgtttcccagtctggtatcgaactcctgagctcaagccatctacctaccccagcctctcaaagtgctaggattacaggcgtgagcccttgtgcccagccaaatcctttatctaaagacagtaccttattttcattgttgctctgaagattgaaatttaatatatggaaggacatggtaagagctttaaaagcaccat

SEQ ID NO: 1885140 - DNA, 4001 bp, Homo sapiens
cgtccaatccagccctcccaaaattagctttcaaatgatgggactatctaccaaaaagaaaacctggaaatgttatttaatgtcagtatcaaagaggaaagaaaatgtccatttgtgtattggaagttgggggggaaaacactaacaggtttcctttgtaggccctgggacacgaaaatgaaaatattaacattttcttaaaaagaaaaaaaaattaaatagaaaatatagaacatggcttcagttggcaatagtttcctggcgtaactaccacgtggacatcaattagctcaatgcttaccttagaggtggcatcttttaagttgataacaccagattcaatcatttcatggtataaatcattgccttcacgggtcctctcaccaacaccagcaaacacagagtaaccaccatgggctttggcgacattgttgattaactccatgatcagtacagtcttgccaactccagcaccaccaaaaagccctataagaggttgaaaagaaagaatatttaagagttctgctttcctaaataagcaaacttcaaaaaaagtaattgcttccttccatcctattccttctcagaaattgcatctggcttcagcaaactcagaagaacgaaagtcagaacgtactcatcagtgaggaatagatgtcaatatccactcataacattgtatgagtttttcctcccatattaggtttggaaaatatgtaccccttaataacataccaattttgccacccttggcatagggagctagcagatcgacaaccttgataccagtcaccagaatttcctgctcaacactcatttccatgaactctggagcctcagcatgaatgggagcaaatctgtaaaggtagaagagaggatagtatctattcaccttgttgaaagcaaatgataatcttatatatccctccctatcaactctcaagtccatccctttacctgaggaaccacagtcttacctcccctttcttacataaatcagataaactatcatctaggatctaacccaactttctgcaataaagaaaattattatcttaggaaacaataatcccattccctgactttaactgtcataaatttttcattttactgagccttaacctaacagcattccctcacatagcaatagcaaatacaaaaacctacaagttttggagactcctaaacctaagccataagaccgagtcttaaaaatactcaactagccaggcgcagtggctcatgcctgttatcccagcactttggggggccgaggtggggggggaatcacccaaaatcaggagttcgagaccagcctggccaacatggtgaaaccccatctgtactaaaaatacaaaaattagccgggcatgatggcatgcacctgtaatcccagctactcaggaggctgagacaggagaatcacttgaacccaggaggtggaggttgcagtgagtcgagagcgaaactccctctcaaaaaaaaaaacctcaagtagtaggcttttgtcaatcagaaattctgcatcctaatttcttcaggtgaaactgcactgtgtgattttaataatcgaacgtatcagaagaaaaattctgctttaggagaacatgtcaccttaatgtgtaaaactgcaaataacagaagttcctttgtgcatagatgcaataagagcaacttactgtttggttttgatgggacctctttcatcaataggttctccaatgacattcatgattctgcccaaagtctcaggaccaacaggaattttgattggtgcaccagaatccagtactttctggcctctaaccaagccttctgtaccatccatagcaatagtccttactgtgctctcacctgttagatacaggcatcgcagggttatacataaggataaattggtatcaagacctaaatcgaccaagactccttctcagtacctaaatgtggcttcagcaaactcagaagaacgaaagtcattttgataaaatcatcatagaaggcagacagcttggttttggggatatttgggctacacaaggtctttactattcctaacaaactctacttacccaaatgctgggccacctccaaaaccagtctggtctccctgccttgcacttccagggcatttagaattggtggtagtccctcatcaaactggacgtccaccactgcgccaatgaccgccacgatgcgcccggtggcggcgcctgcttttggcgaaggagatgtttgcgccgcatagtccctgactaacagacaaaagatattggaaggagctggggtcaggccagttaaaggtcatcggaagccaggacttaacacacaaggagaggaaaactcagccgaagtcaggcctctttccgcttgtacggaacgcgtgtccaagagggaaggccgcgcagcgatcgataaagcgcctgcacagccttcccatccgcatgcacaagaccccatttttcgagagttcagtacccctattcaaccggaaggtcaacgcacctgcccgcaccttttccgtcacacaaaggactttatacaaaatgggacagagctgggtcgaagaaacctcctatgggtgtcccattcttgttctccagccattagagagcaagacgcggctccaggcatccttttaacaccacggatcccttaggcccgagctaccatcgttccccggctcaaggtcatggggcggcaaaatggaacgttagctcctagagaaaagcacttaccaggatggaccgccgtcggagcggcccgcagtaagagctgagctgggggcagcgacgctgaaggggtgagtctccgcaaggccccggaggccggagcagcggccacccgacccacaaaccccaacatggcgtagtccgggtggagactgaaggctgcagcaaccgcagccgcctgctctcctgccgttgaggcgaggcctacgctgcagtaggcaggtccattgggtgaactggctgctcatcattctctgtgctgcttctacaggttaatacacgctgatcttctcatccattggtcaaaactggtgctaatctgaaactcctttttttattggacagtgtgaggttagagggcgtcactctgagcctcaaaacttaattggatcatagcgacgtccgttggacagggtaatcagaggaactacgtttaggaaaggggccgagttcctgttgaaagtgcgtggcctgtctttgcctgtccttgggctttctccttagataggtccttgatctaggtgacagccataggggcggtggttagggaagtggtagtgcggtgaagcaccactgaaggtgagcgtggcgaagtcaggagccctctttagagccaaaataaggtttttctctcgaagtagtgagattgcaagctcccaggcgattgcacagattagcaacctagacaggatctttatcatttaaacctattaaaatgaaataaactaatgtaaccagtactttagcagggcattgaggagactcaataataagataaataagactaagaaccttccttttaaggtccaggtgaacaaacaatgcaataatgtgatggttcctggttagcataaactgggtgcacgaaagacgaggggataaaattgggtcacctagagatacagaattgtccaccttgaaggaagctgagagacctcagctatgaaatgtgaatagaaattcttagggtaggctgggagcggtggctcacgcctgtaatcccagtactttcggaggccgaggcaggtggatcacctgaggtcaggagttcgagaccagcctagctaacatggtgaaaccccgtctctactaaaaatacaaaaattagctgggcgcggtggctcacgcctgtaatcccagcactatgggaggccaaggcgggcggatcacgaggtcaggagatcgagaccatcctgactaacacagtgaaacccggtctctactaacaatacaaaaaattagccgggcgtggtggcgggcgcctgtagtccc

SEQ ID NO: 1885141 - DNA, 4001 bp, Homo sapiens
ttaagtcaggatggtcttgatctcctgacctcatgatccgcctgccttggcctcccaaagtgctgggattacaggcgtgagccaccgtgcccggccccaaagtgctggaattacaagtgtgagccactgcactcagccctaatacagtaaatatttaatgctcagtttccatatagcgccggactcccctcagactagaaaccattgctttgtgatctacatttaaatgtataccttcatttatttttttttaattttttgaggcagagtctgactctgtcacccaggctggagtgcagtgccccaatcttggctcattgcaacctctgcctcccggattcaagcgattctcctgcctcagcctctgagtagttgggattacaggcgcctgccacaacgcccagctaattttttgtatctttagtagagacgggatttcaccacgttggccagggtggtgtcttaactcctgacctcatgatccgcgtacctcagcctcccaaagtgttggtattacaggcatgaaccaccacgcctggcccagtcagttttatacatctctctacatacatacagctttgttccccaggctgatctcttgggctcaagcaatcttcctgcctcagcctcctcagtagctgagatgcaccactgcaccctgcctttatacaaatcagatcttcatctatgtaatttttcttacctgtacagaggtgatagatcccttcttggtagtggtaattctttcctgcatagtacccatgtcagtggccagggtaggctgatagcccacagcagaagggattcggcccaataatgcagacacctaaaagaaaaaaaggtcttaggtgtctacatccttagcctcatccgaagaaaggccagatgaaccaggtcctctcaagccttccctcttacctctgaaccagcctgggtgaagcgaaagatgttatcaataaatagcagtacatcttgaccttcttggtctctgaagtattcagccacagtcagcccagtcagagctacccgggcacgagcaccaggtggttcattcatttgaccatataccagcgctacctgcagtaatcatacataatcgtaaaacctgacaaaggagtagagaagccacatactgaaggttcccaaatcggagaaacgaccacagatcctttctcagaaggtgtcagcgtttttgtgtgcaagtttcttttccctattagagatgcagttcaaaaaaaaaagacagcttcttatattagtaaggcaaaactatagtagaaaggaaataaaaacctattcaagttaagtgaaaagtacaaaataggcttaactgaaacatatgtaccacgtccaatccagccctcccaaaattagctttcaaatgatgggactatctaccaaaaagaaaacctggaaatgttatttaatgtcagtatcaaagaggaaagaaaatgtccatttgtgtattggaagttgggggggaaaacactaacaggtttcctttgtaggccctgggacacgaaaatgaaaatattaacattttcttaaaaagaaaaaaaaattaaatagaaaatatagaacatggcttcagttggcaatagtttcctggcgtaactaccacgtggacatcaattagctcaatgcttaccttagaggtggcatcttttaagttgataacaccagattcaatcatttcatggtataaatcattgccttcacgggtcctctcaccaacaccagcaaacacagagtaaccaccatgggctttggcgacattgttgattaactccatgatcagtacagtcttgccaactccagcaccaccaaaaagccctataagaggttgaaaagaaagaatatttaagagttctgctttcctaaataagcaaacttcaaaaaaagtaattgcttccttccatcctattccttctcagaaattgcatctggcttcagcaaactcagaagaacgaaagtcagaacgtactcatcagtgaggaatagatgtcaatatccactcataacattgtatgagtttttcctcccatattaggtttggaaaatatgtaccccttaataacataccaattttgccacccttggcatagggagctagcagatcgacaaccttgataccagtcaccagaatttcctgctcaacactcatttccatgaactctggagcctcagcatgaatgggagcaaatctgtaaaggtagaagagaggatagtatctattcaccttgttgaaagcaaatgataatcttatatatccctccctatcaactctcaagtccatccctttacctgaggaaccacagtcttacctcccctttcttacataaatcagataaactatcatctaggatctaacccaactttctgcaataaagaaaattattatcttaggaaacaataatcccattccctgactttaactgtcataaatttttcattttactgagccttaacctaacagcattccctcacatagcaatagcaaatacaaaaacctacaagttttggagactcctaaacctaagccataagaccgagtcttaaaaatactcaactagccaggcgcagtggctcatgcctgttatcccagcactttggggggccgaggtggggggggaatcacccaaaatcaggagttcgagaccagcctggccaacatggtgaaaccccatctgtactaaaaatacaaaaattagccgggcatgatggcatgcacctgtaatcccagctactcaggaggctgagacaggagaatcacttgaacccaggaggtggaggttgcagtgagtcgagagcgaaactccctctcaaaaaaaaaaacctcaagtagtaggcttttgtcaatcagaaattctgcatcctaatttcttcaggtgaaactgcactgtgtgattttaataatcgaacgtatcagaagaaaaattctgctttaggagaacatgtcaccttaatgtgtaaaactgcaaataacagaagttcctttgtgcatagatgcaataagagcaacttactgtttggttttgatgggacctctttcatcaataggttctccaatgacattcatgattctgcccaaagtctcaggaccaacaggaattttgattggtgcaccagaatccagtactttctggcctctaaccaagccttctgtaccatccatagcaatagtccttactgtgctctcacctgttagatacaggcatcgcagggttatacataaggataaattggtatcaagacctaaatcgaccaagactccttctcagtacctaaatgtggcttcagcaaactcagaagaacgaaagtcattttgataaaatcatcatagaaggcagacagcttggttttggggatatttgggctacacaaggtctttactattcctaacaaactctacttacccaaatgctgggccacctccaaaaccagtctggtctccctgccttgcacttccagggcatttagaattggtggtagtccctcatcaaactggacgtccaccactgcgccaatgaccgccacgatgcgcccggtggcggcgcctgcttttggcgaaggagatgtttgcgccgcatagtccctgactaacagacaaaagatattggaaggagctggggtcaggccagttaaaggtcatcggaagccaggacttaacacacaaggagaggaaaactcagccgaagtcaggcctctttccgcttgtacggaacgcgtgtccaagagggaaggccgcgcagcgatcgataaagcgcctgcacagccttcccatccgcatgcacaagaccccatttttcgagagttcagtacccctattcaaccggaaggtcaacgcacctgcccgcaccttttccgtcacacaaaggactttatacaaaatgggacagagctgggtcgaagaaacctcctatgggtgtcccattcttgttctccagccattagagagcaagacgcggctccaggcatccttttaacaccacggatccctt

SEQ ID NO: 1885142 - DNA, 4001 bp, Homo sapiens; identical to SEQ ID NO: 916887

SEQ ID NO: 1885143 - DNA, 4001 bp, Homo sapiens
aacccgaatctagcccttcatgttataaaaagggccagaggtccaaagagggtaagtgccttgtgcaaaattattcaactactttgtagaggattttaactagggttcagttagctccgcccacactataaaaggctctttctaaaaaacgaaacatgattaagggcacacggctccagcgttaacaaagctctttgttagctgggaaatgcccccctccccgactcatctgcttatcatctgcatagaattatgtactcaaaagcaggaaaattattgagaaaaccattggtccccggctgcagaccccaaggttgggagctggttcccgtttcctcccagagccggcagggggggcaccaggcaaagtttgcaagacgcgcctccctcccacccctcccccttcctcgcccaacttcccatagccgcggcctcaactaaaagtggccattgacctttcaagctttcgagcagtgatgcaatagaatagtatttcaaagaaaaatgcttatcgaaattttggatccggttttcccgtgattgttaagggtttcttttaaaaagtaggtcacatttcaagtaggtcatatttcgggggcgggtgcgcagacaaggagatgagtttccactaaggccagggggcctccaacggggttggaggtgagaatcccaggtagggtagaggtgccgagatccttccgaatcccagccctggggcgtcagccctgcagggaatggcagagacactctccggactgagggaaccgaggccagtcaccaagccccttccgggcgcgcaggtaagggcgcccccttagcagccggcgcaggtgacccgggcgggccgccgggtctaccggagacgttggagcagaggggaggaggaagggaggagccgggtgggtgcgggtgacaaggagccggagcgccagggggaggggactaaggacggccggcgccgcttaaggaggcgctgctctcccgctcgctgccttccaggacctgatcaaggggaccgcctccggtccccggccgtgggcaccgggacgagcacggcgtccccacgccatcgatgtgtcttagagccggagagtctggtttccgaggacccacagtcgctcctgcacgcccaccccccgcaaaagtgcggccaggagggtcgcatcgagggggcgccgccgggatgtttagaggaacccacccccgtggcaggccaagggccaaggatcgctatccttccctgaacccgggcgctcagctggcccgggtagggggcaggctccggccgccgaaacggggttggctgtagccggtggccggggagatctctagcttgcgcccgagcaccccggggtgtggggccagaggcaggccgaccccggcgtgcacaccgcccgccctgcacccgagcgctctcacccggtcttccctgaagcctgtgtattgcgaccgagcctctttaaagcagtagcggggcccgcggtcacgtgaggccgattcctggaaagttcctggaaagccgcctccgcagcagccgggcggggcgcgagcggagcgctgactggggagggaggcggggagcaagggaggcgcgtcggtctgggaagtcgcgcgcactcgctgctcctgggaccgacgtttaactcttgccaagtctcgtcgcagccgccgcggctggcgggccttgggcttcccctgaagcatgagccctctcgcccgcagccaccctcaccgcgtggcccgcggacagtgcgcgccggggtcccgggtgcacagcctcaggataccccgtgcccgcagctcgggcgcccgcggcaggtaccggtagtgggggaagcccgaaggctccgccccgaggagagttaccggggagggcggcgaggcgcggccgcgtgcgccggggagcggcggacggcctgggcttccgcagctcggagcgccggggaagagagagtccgaaccgcggctctgccccgcggcctagcgttgctgcctgctttctccagccccttctcggcgtctggaagtgtctggagtttcttttttttatttcccctaaactgccattcaaattaataatcctcctaataacctgatctcccgctcctccccaccggcctgcctcccgccctcgctccttcctccctccctccctctctccttcccacctccagggtcgcagccggagggaaacccggcagcagtccgagagtggaggtgtcccagcccgtagggggcgtcgccgcgcggtgggggatggggtcgaggcaatgatcctcgaggcttttgtgtgccctctgcgcacggaactccgaccgccgcctccgagcgcggggctggttgcatccccgggcatctcgttcccaaattaaacgttaacgggggaaacaagggcagacgcccctcctctcccgggcccctcccacctccccttttccccccacccccccgccccatgtccgctgaggaggctgcctggtgcggaggcggcggcggcggccgcggccgaggtcgaggtaagagcgcggcgttggtggtttgcattttccgcagcgctcgcgaccgcccgctcggccccggcctcgcctcggagccccgcgagggctgcgcgctcgggccgattcctcgacagcgcccgcggcggcgagaaccaccgcagccatcctggtccgggagcgaccgccgcggcacccccaaccccgccagagcgggcaccaggaagcggggggaggggagcgaggagcctcccgggcggagatgcggcagctcccgcacctccgcaccccgggttggtgcctcggggccccgcagcgctttagggcggagaaccaagtttgtgtgggtgcttcttcctgggggccctcgggctgcgccaggtgtgagaccggaatgccaatttggggaatctctcctgttctttcctttttaattttttctacttgtccttgacaagggcctattcccactggatctgcaggtgactatttgctcttcctaggtcgccagtctttgatttcagctagtgaccctgggcgggaagacaccctgttcaccctcctcctgacctccgccccccacctcttcagccaactttatcttggatctctgctctctttatcttttctctagagctgggccagggcgctaactggaagcttggggttaaatggtgcaggaacgtagaggcggaggagtccctgggattttccacgtctatttccccacccccaccccagccgcaggggtccagtttggactgacccaacctcccgctttctctttgtaggcgatcagtgggtgaccgcggctgcgagggactttgtcatccgtcctccaggatctggggagaaagagccccatcccttctctctctgccaccatttcggacaccccgcagggactcgttttgggattcgcactgacttcaaggaaggacgcgaacccttctctgaccccagctcgggcggccacctgtctttgccgcggtgacccttctctcatgaccctgcggtgccttgagccctccgggaatggcggggaagggacgcggagccagtgggggaccgcggggtcggcggaggagccatccccgcaggcggcgcgtctggcgaaggccctgcgggagctcggtcagacaggtagggagccgatcggccgcgacgcgtgcgggagggagcgcctccccaaggaagcagctaggaagcggggtcgaggtgggaagcaaagaataagatggaaatacgtcccttgcttccaagggaccgcggagagcacgctcgcagggtcctgggtccttgggaatgcgtaaggaaagtggttctccagggactcaggcctggcggagcgcagagcgcgggaagagcttcttggaaatagcttcttagcacgctggaagatttactgttttccgcagctgctcagggttaggctcccgggctcgaaccccggccggggaaagcgtcgggcgcctccctttgcacggggtgcaatcagcaagtcgg

SEQ ID NO: 1885144 - DNA, 4001 bp, Homo sapiens; identical to SEQ ID NO: 916905

SEQ ID NO: 1885145 - DNA, 4001 bp, Homo sapiens; identical to SEQ ID NO: 916922

SEQ ID NO: 1885146 - DNA, 4001 bp, Homo sapiens; identical to SEQ ID NO: 916924

SEQ ID NO: 1885147 - DNA, 4001 bp, Homo sapiens; identical to SEQ ID NO: 916938

SEQ ID NO: 1885148 - DNA, 4001 bp, Homo sapiens; identical to SEQ ID NO: 916957

SEQ ID NO: 1885149 - DNA, 4001 bp, Homo sapiens
cttattcattttcccagccccgtccacacttctatttttcactacccccacgccccacaagttgccaccgggtcaggtggggacatatccggagagaaatagaaagggatgcattttaaagcgagttctcttttgagaggaaaacaatgggtagttttggaagtgtctttcttaaaaacggaaggagaaggtgaagaaaaaaattatcaacagcaatgggcccctttggtttgggttttgactttttaaagaggaacctctgctgtcctgttgcagtattaaaatcagggcaggaattttgcaaaatgagaaaaataaacttcgggagaaaacccagctgggagcagcttcgggaaagcgacagttctccgaaaggaggaagggaggatgcgcgctgtagccggctccggagtttactgcccgaacgattggggaaaagaacgaggattctcaaatctagttgcgatctctcgtctctcctttattctgttcgtggtgcgggcttcggagcgtctgggaaagccagtctgtgaagctggacttgcagaatcctttgaatgccggtccaggtggctgcagggcccgcagtccgggatgccggagaaaggaaccacaaggaaaagacgctacgctcggagtttccccttttccttgcagccccggcggggcctaggcctcggtttccggcccacctcggctcagaggtcaagtaggaactcatctcgtcgacctagggtttgggagaaggatttcgggttgcgttcttggcatctgggagcaaacacgagcctcggatttggggacatatcgttattaacagcttgggaaacgaaagcgaagctcggggcagccactgcagcctggctgagagaaaggacgcgggttgtgctctctggaagcaaaggggtctgcggcccagctggcctgggagcttgtggccggcgctggaagctgcccgctctccccgcgggcctgaccttggctcccgccgcagctctgccggccgactgcctccctgcacattttgctgccgttccagtccttacaggaccgggcctggagccaggccatgcttcggaaagccctgggggttggggacgcgcaaaacccagaatcgaaccccgaagctgggggcaagtccagattcagacgtccagctccctcgggaccccttggcggagaacttacccttccggaaggcccgacgctctccggctctgtgctgggcaggcctagctcttctctcggcgccaccaggggcgtctacgcggtacgttttgcaactcaacctagtgggtttccagcggtgcgcaaaagtttgcgagcatccaccactgcgctgcttagaaattgtgcccattgatcagactaaaaataatagtcgtcgtgattacaaaacaaaatagagtgcctcgtgcctcggcgggccctggtacaataattattctctacagaaaccacctctctccactcccacccctactccaccacccactcgcaccccgcccctgccgggccactctgggacgaattgcattcttggacctttctctccgcaaggcacattacggagaactccctctgtctcgtgtcccctccacgacaacccagtaattatttctatgcaagtctgcaagagggcactgagttatcgcatcccaagcctaaccagctagagcggcgcctcggtattcatttgcccagagctcctccgcgggggatttaaaaataataataataataataaggatcccatgccttatgcaagagacctcagtcccccggaacaactcgatttccttccaatagaggtctgaggtggactcccacctcccttcgtgaagagttccctcctctcccccttcctaagaaagtcgatcttggctctatttgtgtcttatgttcatcaccctcattcctccggagaaagccgggttggtttatgtctttatttattcccggggccaagacgtccggaacctgtggctgcgcagacccggcactgataggcgaagacggagagaaatttacctcccgccgctgccccccagccaaacgtgacagcgcgcgggccggttgcgtgactcgtgacgtctccaagtcctataggtgcagcggctggtgagatagtcgctatcgcctggttgcctctttattttactggggtatgcctggtaataaacagtaatatttaatttgtcggagaccacaaaccaaccttgagctgggaggtacgtgctcttcttgacagacgttggaagaagacctggcctaaagaggtctcttttggtggtccttttcaaagtcttcacctgagccctgctctccagcgaggcgcactcctggcttttgcgctccaaagaagaggtgggatagttggaggtgagtttcaccctggaggactgaggggggaaataggtttctctttgcacttggccctccttggcttttcaccccgtcttagtcttgctgaatcttctcttgctgtgctgctacttctcatgaacgaaataagaatggcttcgtgtgtcacctggcaagaatggattctctcgaaaggtttgaaaatccctattttgcttggtggcccagaccatctgtgctcaatgagctaagcaaatctggctgggctattacctgggagagtccagatttttcctctctggaggggcctgaagattatttatgggaattaattttatccccaaatctctgagaacttaaagggattgggaaggtctttctggatttccctttccctctactggagatgtagcggttcagccttcttccgatgccatgtttgtttttcgtgtcttcggcctagggtcgccttgccagcaagcctaaaggcctccaagctgacttggagggtgagggtgttttcacaaataaatacatcgcctgggcaaagggaaaatatctgtttgcaaacaaacctggaaggtggagtgagcaccatagcaaaggagggctggctttctccccggttgccccacattcagggttggagattctccactttggcattttgcagcaatggcctggcctgggattttagcagagcagtcacagagggttacacagctgctgacctcggggcatttctcctccctccatccctttctccagaccttgacttgcaggcccaagtctcttatcagaaccctagaaaaatcagtatgatgggggtacaggaggtaaggatgggaaacagaacaggactcctgacatttactccaagcaccaatattcggtgtcccaatctgggtctgctcagactgagacctactgactgtgtttgtgcttttattgacctcttcaactcaccctaaaaaaaaaaaatacatctcagagagggaaagggcaaggagaggagaccagtggagatgaaaaccctagccagtccccagtgactgtttgattattttaataaaactgggcactgccttgtgtacacctggagcaggggacgtctggtggccccactgggtggggggtgagggcccgcagcgatttcttagcatctttgatctcggcccccatcccaatgcaccttcaccctgccttcaccccagagtcgttgagagtaggggtgatgagtagggggtggaggggagatgtcaggaaggcgagcgccggccaggcggggtcaggcagctctccttctcgaggtcagcgttggagagaatgtctgcaaggctgcggaggcccgcggtgtgtttgtgtgtgtgcgtccagactcggttctctgcaccgccagcgtcactgagattacttcccgattagaagccgaccgcgtttgaaatgatttgtgcaggagtttttgcagccaccgcttgctcagagaagcagagatggatggaggttgggaaaggggtagagaggagggagttattgcaggtctgtgttgagagtcgtattgtgatttgagtgttcgggaaatctagtggaaatttggggtggggggaagggaggacgggagggtgggagggagagag

SEQ ID NO: 1885150 - DNA, 4001 bp, Homo sapiens; identical to SEQ ID NO: 916975

SEQ ID NO: 1885151 - DNA, 4001 bp, Homo sapiens
cctgatcccagaggcctgcctgtttccagaatcctttaaaccaaaatgcagtccctaggtcagctgtcctgccggctcagatcagctgatgacccacagccaacatctttccaccttgatcaggtcttgcactgccctctggagagtgctttaaaatgcagattgcaggtgctgccttagctctacgagtgcagacaggcagtggaagaggaagctggattttccattttagagacagggtctcgttctgttgcctgggctggagtgcagtggtgcaatcagagctcactgcagcctctaactcctgagctcaagcgatccttctgcctcatcctcccaagtagctgggacttcagacgcacaccattgtgcccagctcatttttaaaaagttttaattgctggtagagctggggtcttgctatgttgcccaggctggtctcaaactcctgggctcaatcctcctgtctcagcctcccaaagtggtgagattacagacatgagccactgcacctggccaaaagctggatttgcaaccaggaaggggctgattctgatgctctaggaggttttaggaccaactcccaccctctacctcgggctctgaaagtcacctcctgcccctggaaagggctgtgacccttggcttgagcctgtagtctgcaggaatgaacagcagttctcagcagcccccttcccagcagcctgtgaaactgatggaggtaggtccacccgagtcccctctgtgggcaccgaaaaactcctgccccctaccctgtcccccttcctccccaacatttatcatcgagactaacgttcagaacagacctgatacctgacggtcattgatggtggtgtcactaagcactgcagagccttcaggagagccttgaccttgatgttctgccctggctgtgtgcctctccaggggacaagattccatagcgcccaccagcctctgtggccatgtgctgtgtccacgccaggccctctggtggacatctcattaacttatccttattttaaggaggaggaatcacattacacaggcaacagcatcggccccagtcaccccaactggatggagagccaacccctcaagccatcttaacccagaacttccctaatgggcatggggaccaccggcattgccttctctccagcagtttgtcccaaatgcagcctcctgggcccacttctgcagttgtttttttgtttgtttgttttttgagacagagtcttgctctgtcgcccaggctggagtgcagtggcaagatctcagctcactgcaacctctgcctcccaggtgcaagtgattctcctgcctcagcctccggagtagctgggattacaggcatgtgccaccgcgcctggctaatttttgtgtttttagtagagacggggtttcaccatgttggccaggctggtctcgaactcatgagctcaagtgatccgcccgccttggcctcccaaagtgctgggattacaggcgtgagccatgcgcccagcccgctcctgcagtttgaggtgcctctcagccaccgggctgtgcagggcccacacgggccgccacgtgggtgtgttcacctcagaaggtgctggggctttcctggaaaaaaccaaagcgcatggtgcattttcaaataggattattattactgttgttctccatagagctatttcatgctcgctgacttccttgactatctcagtggagtttccctcctaagatctggaggatgtaaggtgggatgggttgggagtgggcatagcacctcccaggggtcccacccctcctacccacgcccccaaatttgctcacacctgcttccttccagatccagcaggtgtgcggaagggacgaggtacgtgagcactgctgcacgaacggggactccagagcggtgggctccggggtccccttcccggcggtttccgggccggggcggggcggggcgctcccctagccgcgcagtgcgcgaaaccggcgtgcgctaggaccgcggcgcgccgccctccgccgttatatgaggccccgctccggccccacgcggaacccgcggctccgagccttcgccggcgtcccgacccgaggccggacccgaggccagtcccgccgctgcgcagccgaagccagtgcggggcctgagagggacgcgcgccccggggcccccgccgcgggcaccatgggcgctgcccactccgcgtctgaggaggtgcgggagctcgagggcaagaccggctgtgagtacccgcggggggcggcgcggggaccggggcgggacctccgaacggccactgttggggaccccggcccgccgccgcgctgtgtgaccttgggccagtggcgggccctctctgcgcctcagtctcctcctctttcaaatgggtccccgctggccacctcgcgggctgcggcgaggagctccgcggcgatgctcagtgccgcagccgctcagcttcggactggcccgggaactccctggccgggggactgcggaccggggagggagcggggcccaggcttcccaagcgcagggcaggtgcctcaggccgggcgggcaagtccctcaggcacccccgctggcgcgcgcgccccacacctgagagtcgtttgcattcgtgagcgcgagagcggaaagttttgaagtcggcggacctgggtgggaacaggtctccgacgctccccggccgggtgaccttagtcgggagagccggcgcccggcgcctgctttcgtcctcgcatctgtaaaatgggttcaggcagcctcatccccgcgggtggctgggagacttagcgaggcagcggccgcagagcactttgcccggagcccagcgtcctcccctgagttcgctgagtctcccgggaccagcaaaggctgcgcgccccgcatcggcccggaggcggggagccctgggaggcctggccgagctgcccgcagggaaatggcggagaaagcgcttctctgcccgagttcagccgggctggggacttggccctgggtcctgaactcggcatggccagttctgcctctggctgtggaccagggtgtggactggagaccgcgggggccaggtgtgtgggcaaaccggctttggcgagcgacagaccggctgtgaaccctgccagctgcacttcctggctgtgtgaccttgggctagtcactttacctctctgattctcagctttccttctctgttgtaagagttctcctagtacctggtagacgctcaggaaatgggagctgcagatattttgggaaagagctagctcctggcacctgcttcaagtgcagagaaccagcgtccagtattgatcaccaagagagggtggcccagctgtttgtgtgtcagctgaaaagcaacccctcttgacccccaatctaaatacccctttccaggagaactggatgaaaattgcagaaaaccattaataactggtgtgtgtatgcacgcacttatacgtctatatctgtatctctgtgtgtgtagagatatagaaatatccaactaaagaagtaaaaggtgtggctcagcatatataatatggtacccttttttctgttttttaaaaaaggatcctttgagctggagccgcaaagtaaaaagaaatagaaaatgtaaaaagaggggaaaataagagtatacatttgtaattgctatatttgcagactggaagaatccaccagaaagtacgaatggatgcttggtgggggttgcggggggagtggaagggatgaagggagagtgagctttttctccgtaaacgtttttatatgttcattttgaactatgttggatattttacttactcaaaaagttttatgcacttcaatccgaagactaatatgagagagaaaggagggattcctctagctcttacttgcttgggtctcctctgcttttattatttctcatgtgccctctcctcgcctcccactgctttgaatctggatgggtgtcgatgggcattctctgtggctgggatccccgttggaaggg

SEQ ID NO: 1885152 - DNA, 4001 bp, Homo sapiens
caagtgaaggtcagccggccgggcgggtccacagttaccagcacgctgtctcagaaaacgaaaacggaggaaaaaaaccccaaaccccaaacaatcttaataaacacgactgagcaagaaagtggcgctgtgtagggctatttccacccacccggcagctcttaggacacattcccagaagagcggaaagatcattgacgtggaactacacacgaagtgtaattagtgggggaaaaaatattttttaaacaaaggatataaccatatttagttgtacagtaagagaaatttatctgtgcatagagcataaagttaattttttcaagcatttaaatacatcttttgtaaggttttttaataaaggcagattgagtcaagtttattaaaactttacatggaggggaagaatatgctaatttgacatttgagaaaagtttaaatgcgagcgtttgttttcacagcttagggattggtgggtgaggtctgtgtgcgttattttcatgttcccaaactgtgagctttatttcatgttatttttggtggatgttgacttagttcatgaatgttgtcacttctaaatgtggacagttgggctgcaggatgcaactcaacctcttttggatcctagagacccctgccaagcccccatcagtcctatttttaaatgaagacatcgccatttctagaagacctgagattttcttccctctgtgcttcgatgtattttaacctcaacattttgaaacggaaaatgcaaggaggggccaagaaatgtcctggggatttgatgccaggaagtacctggtaaggattggagattgctccagaatctactgcatgtcccaatttgcagtttgctcactagggctatatacaaaagctatacccttgagggtttttttttttttcttttgatttcctcaggaccttagagggaaaacaaacagtagcagctaatattctcaagtatattgctgcttagaaagatcctcaggaacaattagcagcaataagcaagcctttgaaaagatctgaattctttttcctgaaatatttacgatacacaggtgctttttatctgaaatctgttgtgtcctccttttaggcagtctctgtgggcagagagtgggacttgcgaggtggacagctgtggggatcctgggcaagggagtttcagaaggtgtggctcaggggctggtagaaacccccttttgttaggacttgttttttaaaaaagaaagccctaggccaggcgcagtggctgatgcctgtaatcccagcgctttgggaggccgaggagtatggatcacctgaggtcaggagttcaagaccagcctggccaacatggtgaaacccccgtctctactaaaaatacaaaaattagtcaggcatggtggtgggtgcctgtagtccagctactcaggaggctgaggcaggagaattgcttgaacctgggaggtggaggttgcggtgagccgagatcacgccactgcactccagcctaggcaacagagcaagacttcatcttaaaaaaaaaaaaaaaagcccagcattttgcagctttgaagctgctggggatcacgactgtctctgtggcccttacctggccacagatgtaccctggcaacccgctcacagtgccctgcgtgcaggtttatagataacccctgccagacctgctacaaccaagaccttatggtccaggtctcagtttggagaagatttagctgtctaccacttcttgtgtagtgttcctgtgaagttttatttttggttgcaagtatctggaaaacagatgcagatgtttttgtggatgttgttgagacttttgagacttctgtttctaaggtacacatgatgggacccaaactctcctggagagttccattcacttcctgaaacgtgcacctgtttcaggtgcatgtttattcagtgtgcatggatatttaagatttgctggagcaggctgggcagggtggctcacccctataatcccaacactttgggaggccaaggcaggtggatcacctgaggtcaggagtttgagaccagcccggccaacagagtgaaaccccgtctctactaaaaatacaaaaattagccaggcctggtggtgggcgcctgtgatcccagctacttgggaggctgaggctggagaatcgcttgaacatgggaggcggaggttgcagtcagctgagatcataccaccacactctagcctcagcaacagagtgagactccgtctcaaaaaaaattatttgctggatcgaatctttttttttttgagatggagtctcactgtcaaccaggctggagtgcagtggcaccatctcggctcactgcaagctccgcctcctgggttcacgccattctcctacctcagcctcccaagtagccgggactacaggcgcccaccatcatgcccggctaattttttatatttttagtagagacggggtttcaccgtgttagccaggatggtctcgatctcctgacctcgtgatccgcccgcctcggcctcccaaagtgctgggattacaggcgtgagccaccgcgctgggcctagatcaaatctttatccatgcacattggaacacaggattactgggttgaaatcattctagttttgtcatttagatacttgtagatgaatctattttagcacaaggtataaataactcgggaggtcatctctatcttctttccttttgtgcatttggctataccacgtttaggtactaaaacagctttgcttatgttggccaggggaaaacatggcattctgtgcgcaaagctaatgatcgccagccctgccttggcccctcccttgtttatggtcattgtaagatgcccgcatgttaaggcttaagctgtcactgggctgggtgtaatacccgcttcattcctcctcccaccctcttacccgaaacatgaagggcactgtgctctattgagatctcgataagatcatcattttaacttgtattcaactgagggaggtaacatgatatctgggtgctggtggattgagacctcaagcatcaattcaaaattgctgtcgaaaatatgcactattttttttttccactctggctaagtgtaggctctgaagccagttttatagcttgatacattctggtgaaagatgtcttcatttttaatgaaagaacctacagttagtaggtgtcacctcagggtagaaattctgatagaaattctgattatttgaaactctgatagaaatcctagatgctagatttgaagaaaacctgggttttattgcatagatttcaccttttctggggcacatcttaccccaaaataattggggatttttttgttccttctccattccatggaaccttgtagggtgttgggattgggcctcccctcgccacccgccacatgtctttgtttttttctctcttttgtatgtggaaaaatgtatttttgtaccatatctcatacctggagagaaaccttttttctatcttcagggctgtagaatatattagcgtaacacttcactgaatgtgacgtaaaagcattctgatgaaaactggttctgttataattaagactcagtgtttaaaatatcttaatcagtgttaatttcccagtgtttcagtatcacagtaaatacttgttttactgagaacagaaaataatccagaaaaggaaaaggaccagccctctctagattgctggaattgtatggatgtgttggggttggtttagtgatctcttccttgacaccctagcaaagatgcttttgtggagtgcaaacctttcataaatatactttccaggctgggtgcagtggctcaagcttgtaatcccagcactttgggaggccaaggcgggtggatcacttgcggtcgggagttcgagaccagcctggccaacatagtgaaatcccgtctctaccaaaaaatacaaaaaaaaaaaaaaaaaaaaaaatagccaggtgtggtggtgggttcctgtagtcccagctactc

SEQ ID NO: 1885153 - DNA, 4001 bp, Homo sapiens; identical to SEQ ID NO: 916990

SEQ ID NO: 1885154 - DNA, 4001 bp, Homo sapiens
ggcccagggcagaaagagggaaaaaaccagacaccaagagtttgggaggaggaattaagtagagacagtcacccacagtttgtcagggttttaaagcctcagcttcatgctgagatggagttgttggaggaagaggcatccagccacagtcctaatcccacagcccctcatggaataagcagggactttgcccacagacatctcacatcctggtagccactcgcacctccccttaggatattggtgggacttttcctacctcacccttcccccagcggtatcagggctgccaatgggatttgaattcaaatcctgaaaggagaacaccaaggaggagctggcatttcgggcactgtgggaatgaagtggcaaaaatgcaggcacattactttcttcagctgtcctttggatatcaaggtccttacaggctggagggttgactctcggagctcctctcctcaatctgcttggaagtctggggaccctggacaagcgggggttggggaggggatgttaactactcaccatcctgccaggattgaggagaggagggggtggaagtgcttccctagacctccagatgcatccctgctcggaggtcctagacgccgggggtgcggctgtcggtcaagagcacccccagggtcactctgttgctgcctaaactctttcaagtcgcagcccaggctctgtgagctaaatgcaactagcttgcagggtggagaaaggggacagggcgtgtgtgttggggtgtgtgtttgtgtttgtgtgtgtgcgcgcgcgcgtgcgcgcggtggggggaggaggggtgacatcacaaggcaggcccctccaattctttcccgtgtgtgtggggggacccaggttgcctactgctctagtccaggaccagagacccccaactatatagcaggtaagagtcttgagggtcaccccaagagttttggagaagggtctccgaatacttaggagatgacaaccggaagctctcaaagccccaataggggtcccagcgcccccctagcttcagcttggtttcttccactttccagagaattggagtattgtctcctggagaaccgggtggtcgggatcgtggaccagggaaggggcttttgctggtcggggagcgccaactgggggttcatgggtggaaaaactttcggatcaagacggggtataaggctagaggcgtgtgcagaggaggggaccgacggaacggggacccaactgggtctacgtgggggcgggggcgcttgtggacgtccaccaaatagcttggtatgcagatgagatgtcaagcagcaggtagatgagttcagtgttctttggctcacgggcaaagttctgagccgagccaagttacgctcccagttcctaggcaccgctcggtgatcgggcctggggagctgcgacccgaggggcggatccaggtataaggggcagctcgccagctgggtcaagcgcgggggaggccgtgggttgctgtgaaaggaggggcagtgctgcggggcgagggagggggccagccggggcaccctctcctctgctccacctccgcaccgcaggatacaaaggggcctgtgtcctcgcagctgccggcacggaagggatcagggcagtgactcttctgagctccctggttttgtctgcaagggaaaaagactatatgtggctcggtggctgccctccatctcccaggaatacaaagcctaggaatacacccagagcaatcctgagagtctgcccttagtctgcaggcattggtgcagagtccacctgccttgcttcctgcggtgcaacctgcgggaatcccattcccacacgcggagggaggggcctttaaatggcggggccagtacttccttaggaccgcctccttggagtcgacgcagccctagctggattggcttgcctctcagccaaccgctatttcttttccttcccgtctcttccctggtgaccccggaagtggaagtaggcccaggtcgccggcggccgcggggacggaaggcggaagcagagcgtgagcgggaggcggagccgggagagcggctctcgtagctcaccctggccccaggccgggcggctcgagggggaggagttaccgccgttcttcggtacgtccgtcttttttttttttttcgtttttttttgtttttttgagatggagtctcgctctgtcacccagactggagtacagtggcacgatctcggttcactgcaacctccacctcccgggttcaagcgattcttctgcctcagcctcccgagtagctgggactacaggtgcgcgccaccacgcctggcgaatttctgtatttttagtagagacggagtttcaccatgttggccaggctggtctcgaactcctgacctcgtgatccgccggcctcggcctcccaaagtgctgggattacaggcgtgagccacggtgcccggccaccttcgtcccttctacacagccggtgggttccctgttagtctttcttaggggcagccctaagctccgcccccagattttcctccagggccgcatggcccccacccattactggaagtctgtggccccctttccggcggtctttcccattttcctaagagtgacccaccctcccccgaccacaccctttacggtacctccctgtttccctgattgaaggttatagttttctggggaaagaagaaaaacttaagtgatttggaggagaggggagggagcaagcagggttgtggtgagtctagttttggcttattgctaggaatagcgaatgccccaaaagaacttgggaaaacaagggaggtggatgaattaaatgtgtccactatttgagattgtttaattcctctcttggtctcatccttgactgtctccaccttgatatctgttacaggcatcagaacacaccatgatggctgtgacctaagaccctcaggaagccccggggtcatggcccagaagcaccccggagaaagagggttgtatggagcccaccacagtggtggtgcctccctcaggactttaggaccctccgtggaccctgaaataccttcattctcaggactcagggactcagcagggactgctcctaatggtacccgctgcctcacagagcactctggtcctaagcacacacagcacccaaacccagcccattggttggacccaagccatggccccccagggggtccaggaccacctagagatgcagaggaccctgatcagagtgagacgtcttcagaagaagaatcaggagtggaccaggaactctcaaaagaaaacgagactgggaaccagaaggatgggaactcttttctttccattccatctgcttgcaactgccagggaacacctggaattccagaagggccttactctgagggaggaaatggttcttctagcaacttttgccaccactgtacctctccagctttgggggaagatgagttggaagaggaatatgatgatgaagaatctctcaagttccccagtgatttttcacgtgtgtccagcggaaagaaacccccatcccggagacagcggcaccgctttccaacgaaggaggatactcgggagggtggacgtagggatcccaggtcccctggtcgacatcggctgggtcggaaacgaagtcaggcagataagcgcaaaggcctgggattgtggggagccgaggaactatgtcaacttggacaggcaggcttttggtggctgattgaactgctggtattggtgggagagtacgtagaaacttgtggccatctcatctatgcctgcaggcaactgaaaagcagtgatttggacctttttcgagtttggatgggagtgtggacagggcggttagggggctgggcccaggtcatgtttcagtttctaagccaggggttttactgtggagtaggactgtttactcgttttcttaagctgctgggtgctttgctgctcctggctctggccctctttttgggctttctacagttgggatggcggtttctggtgg

SEQ ID NO: 1885155 - DNA, 4001 bp, Homo sapiens
acaattaacaaaattgcaaaagtaagttcttacttatcaataataacattgaatgtaaattcttcaatggactaacctctccaatcaaaagacatagagtagctaaatggataaaaaaataagacccactgatctgttgcttacaagaaagacacttcacctacaaagacacacatagactgaaaataaagggatagaaagatactccctgccaataaaaaccaaaaaagagcaggagtagctatacttagacaaaatcgatttcaagacaaatctaaagaagagacaaagaaggtcactatgtaaggataaaggggtcagttcagcaagaggatataacaattttaaatgtatatgtgcccaacactggagcactcagatatataaagtaaatattattagagctaaagagagagatagttcccaatatgatactacctgaagacttcaacaccccactttcagcactggacagatcttccagatagaaaattaatgaattggacctaatctgcattataaaacaaacggatctaatagatatttatggaacatttcatccaatggctgcagaacacacattattttcctcagcacatagattattctcaagaatagaccatctattaggtcacaaaataagtcttaaaacattaaaaaaaaaaaaaaaaaaactgggccgggtgcagtggctcatgcctgtaacccaacactttgggaggccgaggcaggcagatcacaaggtcaggagtttgagaccagcctggccaacatagtgaaaccccatctctactaaaaatgcaaaaactagccaggcatggtggaacacacctgtagtccccgctactcgggaggctgaggcaagggagtcactcgaacccaggaggcagaggttgcaatgagttgagatcacgccactgcactccagcccgggtgacagagggagactcagtctaaaaaaaaccctgaaataatatcaagcattttctctgaccacaatgaaacaaaactagaaattaataacaagaggaattttggaaactatgcaaacatatggaaattaaacaatatactcctgaacgaccagtggatcaatgaagtaattaaaaaggaaattgaaatatttattgaatcaaatgataatggaaacacaacataccaaaacctatgggatacagcaaaagcagtactaagagggaattttatagctacaagtgcctacatcagaaaaaaagaaaaactggccgggcgtggtggctcacgcctgtaatcccagcactttgggagggctaggcggacagattacctgaggtcaggagttccataccagcctggccaacatggtgaaaccccgtttctactgaaaatacaaaaattagccccttctcccggcagttagtgctcagagtgcggagtgtgtgctccaggctcggaacatacatttattattaaaaaaaaatctaaaaaaatattttaaaaactttcccacaatttacaaaaaatccgcctctcccctgccatagacttttatttttttcttcttcttcttttataaagtaaccccgtgaagcagccgaggccgactcgcccgcccgcagcagctccaaaaaggaaccaagagaccgaggccttcccgctgtccggactgacacctccaccttcgcccgcagccagcggcagcggatcaacaccattctggggcggtgaagtagttttcgattccgggtgatttttgtccctctgcgcttgcgcttgcgcttgcccccgctcaccttcccccagctccggcccctagccccagcattcgctctcctcctctcacggaaaggtcgcggcctgtggccctgcgagcagcagtgccgagatgaaccccagtgcccccagctacgtcctcgctgtacgtgggggacctccatcccgacgtgaccgaggcgatgctctacaagaagttcagcgcggccgggctcatcctctccatccgggtctgcagggacatgatcacccacggctccttgggctacgcgtatgtgaacttccagtagcccgcggacgcggagcatgctgtgaacactatgaattttgatgttataaagggcaagccagtacgcatcgtgtagtctcagcgtgatccatcacttcgcaaaagtggagtgggctacatattcattaaaaatctggacaaatccattgataataaagcactgtatgatacatttttctgcttttggtaacatcctttcatgtaaggtgggctgtgatgaaaatgattccaagggctatggatctgtacactttgagacacaggaagcagctgaaagagctatggaaaaaatgaatggaatgctcctaaatgatcgcaaagtatttgttggacgatttatgtctcataaagaacgagaagctgaacttggagctacgtgaaagagttcaccaatgtttacatcaagaatttcggagaagacatggatgatgagcgccttaagaatctctttggcaagtttgggcctgccttaaatgtgaaagtaatgactggtgaaagtggaaaatctaaaggatttggatttgtaagctttgaaaggcttgaagatgcacagaaagctgtggatgaaatgaaaggagctcaatggaaaacaaatttatgtaggtagagctcagaaaaaagtggaacggcagacagaacttaagcgcaaatttgaacaggtgaggcaagataggatcaccagataccaccgtgttaatctttatgtgaaaaatcttgatgatggcattaataattaacgtctccggaaagagttttctccatttggtacaatcaccagtgcaaaggttatgatggagggtggtcgctgcaaagggtttggttttgtatgtttctcctcaccagaagaagccactaaagcagttacagaaatgaatggtagaattgtggccacaaagccattgtatgttgctttagctcagcgcaaagaagagtgccaggctcacctcactaaccagtatatgcaaagaatggcaagtgtacgagctgtgcccaatcttgaaatcaacccctaccagccagcacctccttcaggttacttcatggcagctatcccacagactcagaacggtgctgcatactatcctcctagccaaattgctcaactaagaccaagtcctcgctggactgctgagggtgccagaccccatccattccaaaataggcccagtgctatccgcccggctgctcctagaccaccatttagtactatgagaccagcttcttcacaggttccatgagttatgtcaacacagcgtgttgctaacacatcgacacagacaatgggtccacgtcctgcagctgctgctgctgccactccacattataactatgctgcgggagttcgcagtcctcagaaacatcttaatgcacagccacaagttacaatgcaacagcctgctgctcatgtacaaggtcaggaacctttgactgcttccatgttggtatctgcccatgctcaagagcaaaagcaaatgttgggtgaacggctgtttcctcttattcaagccatgcaccttactcttgctggtaaaatcactggcatgttgttggagattggtaattcagaacttcttcatatgctggagtctccagagtcactccgttctaaggttaatgaaactgtagctgtactacaagcccaccaagctgaagtggctgcccagaaagcagttaaccgtgccaccggtgttccaactgtttaaaattgatcaggtaccatgaaaagaaacttgtgcttcacagaagaaaaatatctaaacatcgaaaaatgtaaatattatttttttaataaacattgcaaaatataaaataaatttaaaaaggaaaagaaactttgaaccttatgtaccgagaaaatgccaggtctagcaaacataatgctagtcctagattacttattgatttaaaaattttaaaaaaacacaaaaatagtaaaatatgaaaaccaattaatgtttta

SEQ ID NO: 1885156 - DNA, 4001 bp, Homo sapiens
cctaacaacttgctaattaaaacctgatttttaatttgcattattgagcttaataccattgcttaaatgtatgtgaatactgagatttttataaaggaattagttacctctaggaaaataattatcactaaaagaaataatatcgcaatttgaataaaagtaagtcgcttaaatcataggaaacatttttagtgaaggcgtttgttttaaatgtattctaacctagcaatgtagaaagcaggcaaacatttaaaaaaaatttaaccagtttctaaaacatagtttggagctcagattctggggaaatgattaacacaccctacatccaaggtctcctttcctttctagaaagaaagcatctttaaacatacatattcatcagaaatacaaatatttgtcatcagtgatactaatttccaggcaaacattttaattgcagtcaatgtattagattctaccaggttttaatttggatcggtaatacgggtttgattagggttctaggcctaattataggtcactagtcttcctttaggattatgcaccatctgttattttaaattgaccattgagggggttcccaagggttctccttcgttttgttatcaaacgttaggtttaggattcttgcgggtggtgggatccaaagccagagacggtttcaacaaaaatgcaagcgcgaatttgtcttgcgtctgaacgcactgttcaaattaaacaatttagacatgccccaactatgacactaagaagtgaatggtatagtacacttttgtcacaaattcaagggtaatttaagtgcccgattgtagaggtctggcttcccctgggtttctggaacaaaagaagcgttcgcgaggagaggggtaactccccgccctccccctcccaaagtaaatcaaatcaaggaatatgagtgcctgcagacaagcctcgcttcttttcttccccttcagggctagcgtttggggaaggcaaggctgcggctactcttggagcttcagtgtcccgggaggaagaaaggcccagccaagggtcctcacactggcgtggaattcggcgcgttcgtaggcgatcgaccccagagacgaaagctgcttctcaagctgggggagggagaggaaacggcgcacaaaagcagtacgacctgtcccttatcggcgtctaaggggaagggtggagaaaacgaaaacagaagcgggccgggagcctcggctcccgccccagcgccttttaaactgcgtttctacctcctctcgctcagcgcggcggctaatggaacccgcgcgagccgtctcgccaatcaccgccgcgcttcctcccgtcgcccgccaatggcggcgcgcgttcttggggcgtgggcgaagcaggctgctcgcctcctgcctgtagtgtgtgggctggggttggtgcgagcttccagcttggccgcagttggttcgtagttcggctctggggtcttttgtgtccgggtctggcttggctttgtgtccgcgagtttttgttccgctccgcagcgctcttcccgggcaggagccgtgaggctcggaggcggcagcgcggtccccggccaggagcaagcgcgccggcgtgagcggcggcggcaaaggctgtggggagggggcttcgcagatccccgagatgccggagttcctggaagacccctcggtcctgacaaaagacaagttgaagagtgagttggtcgccaacaatgtgacgctgccggccggggagcagcgcaaagacgtgtacgtccagctctacctgcagcacctcacggctcgcaaccggccgccgctccccgccggcaccaacagcaaggggcccccggacttctccagtgacgaagagcgcgagcccaccccggtcctcggctctggggccgccgccgcgggccggagccgagcagccgtcggcagggtaaggacgcggggccggggctacaaaggcgggcgtttggcggttgccgcgcgcgctcgccgccgtttgcagcccctccctcccgggcgccccctcgggcctcccaggtgcggggctgtccctgcgccccctcgcgtcgccccttccccgcggggctgcaggcgccggagcggagaggccagaagttggggccgcggggttcgcgttctttgacgtgtgggtctgggaggtgtggagttgcgttggcggcggttgttttgcacgcagtcgacgccgcttccctggaccaccagccgcctgcagcgggcgtttagacggggacttccgtgccctttcgaaagctctggaggggtggccccaaaatgctataggttaagttcgagcgttttcccgctttattaactgaaatgactcgcagcagagtctcagagcgctccctggagggcaactgatgacactctaatttctaaccaaaatttgaaatgaggaaattcccgcctttttatacttttgcgtgtggagggctttttgaaccgtttatgttttctagtttgttttaatttttcccagcaacaggccatcttttggcggaacaggttcatgccgaattaaaaggagcattttaaactatatttttaggcgcctattataattttttagtttttatttatttatttttttagatggagtgtcgcacttgttgcccaggctggagtgcaatggcgagatctcggctcaccgcaacctccacctcccgggttcaagcgattctcctgcctcagcctcccgagtagctgggattacaggcatgcgccgccacgcccggctgatttgtgtattttttagtagagacggggtttctccaagttggtcaggctggtctcgaactcctgacctcaggtggtcctcccgcctcggcctcacaaagtgctgggataacaggcgtgagccaccgggcccggccctgcaaacaaatatttgaaaattgcagtttggattgcgttttccccacatattggtaaattttgcttgaggaaacgaaagacttaggattcaggaaaaatttatttcatgacattctggtgcatcagtattgcaatttggaatgtctgatcctggttaaatctcaaatcggctccagcaaagcatgttttgtttcagaatagtttgcttttttacctgtggattttaatatgctttttgtgggtttgcttatgcctgccgagttaccaggcttcaaatcgtaataggatgaagctaaaactagtaattggtgtaacataaaatgccttgtaagagacagtgaatgtggtgtttggagttgttgggaatgatcactagtttaaaccgaaattattccttccttcaaattttactttagtttttaaggaacctgtctaatgtgttttcccggctactcaggcagaaatgaaagacaaatgtaatagacacatgtaaatttaattgaaaatcttattctcggcttcagagaagttgaaagttttaccaaacgtcttcagtccggtgtctggcacatagtagtgccaaatatttgtacaataaataaaagaccaatcacaccttattgtttaaacatcttgttttgcggaaagcttctttaatttcttaataaacaaatttacttttgaaataaaagcgtacccgcttacccgttatgtttccctgctctgaaaaagaaggtagtatttaaactctttaagtagagttggttgaggccgggcgcggtggctcacgcctgtaagccccgcactttgggaggcccaggcgggtggatcacctgaggtcaggagttctagaccagcctggcccatatggtgaaaccccgtttctactaaagaaaaaaaatacaaaaattagccgtgcctggtggcggcggccgaggcaggagaatcgcttgaacccgggaggcggaggttgcagtgagccgagatcgcgccatcgcactccagcctgggggacaagagcgagacttcgtctcaaaaaaaaaaaaaaaaaaaagttgtttgaaaataatatttaaatcagcacactttataaaaaacctaattttctatagaacc

SEQ ID NO: 1885157 - DNA, 4001 bp, Homo sapiens
caaccccctctgtggctgtgggtgtctggtgtgacagagcggagaaaagctctctaatctcccagtgcctgcctctgccgctcagtcgctcccctccctcccgcctttcctgcctcctcgcgcgctccctctcctttgcctttctctgggagtttcagtccctcaatgcagctggagtagccctggcaatctaaacccgaagcctgtgtatatacacacacgcacacacgcgcacacacatgcacacgcgctcggacatacgcacttcggctctcccccttgggatatggagcaaacccagagcttcatctacctgaaggggatggcccggccggacacttctttctcacttgtcatctccggagggcagagcaagactggaatgagggagtctcgctgtcgggtctgcaacctcctgccgtttgccgccaccgccgcttaaagtgcccagggtggagaaggcttttccaggacggatctccgtcgtagcttcgcggccctgggacttcctcctgctggttcactctagtctctcccacctcggccatccttttctctccagctgcagggtgtatggctcgggtgcctcccgtgctgtggccgccgtcactgctgctgcgagcacattccacccagaggaccgaacgccgccgctggagtggggggagaaagcgaaagccctaacttccctctctacaccctcgctcttcccaccgctcccgtccttctccctagccgagaaccggttggaaggctcccgcggaaagcgaggcgagagcgcggcgcaggggagggagagccgggagccgcaggcgcgcaggggcgggggcagcatgtgccccgccgccgggtgctcgtccgagaagtagcgcgcgctgggcaagcaagacgctttccaagttgggcgcgtcccagagctcacagcccggtgtccagagtgaggcggggctgatgggggtcgcggaagctgccgtcgcttgtgtccagaacccgtcttaaaagaacccgggccagcatccccagtcgcgcgccctcggcccgcgtgagctctccgatgcctgctctggctgtggcccgggtggcccgcccgcggggggtgccagagggggcgggggaggaggaggaggcggtgtgatggccctggacggcgagctgggggagcaagaggaggagaagaaaaagaagaagaaaaagaagaggaagaagaagaaggaggaggaggaggaggaggagggggccgagaagagcagctcacccttcgcagccgcgatgggggaagacgacgccgcgcttcgggctggcagcagggggctctccgacccgtgggcagactcagtgggagtgcgaccccgcaccacggagcgccacatcgccgtacacaagcggcttgtgctggccttcgctgtgtccctcgtggcattgctcgcggtcacaatgctcgctgtgctgctcagcctgcgcttcgacgagtgcggggcgagtgccacgccaggcgccgacggtggcccctcaggctttccggagcgcggcggcaacgggagcctccctggatcggcccggcgcaaccaccacgcaggcggggactcctggcagcccgaggcgggtggggtggccagtccggggaccacgtcggcccagccgccgtcggaggaggagcgggagccgtgggagccgtggacgcagctgcgcctgtcgggccacctgaagccgctgcactacaatctgatgctcaccgccttcatggagaacttcaccttctccggggaggtcaacgtggagatcgcgtgccggaacgccacccgctacgtagtgctgcacgcttcccgagtggcggtggagaaagtgcagctggccgaggaccgggcgttcggggctgtccctgtagccggttttttcctctacccgcaaacccaggtcttagtggtggtgctgaataggacactggacgcgcagaggaattacaatctgaagattatctacaacgcgctcatcgagaatgagctcctgggcttcttccgcagctcctatgtgctccacggggagagaaggtatggagggaggcggtgccccgcgctgccccaccccggcgcgcggctcgaacctctgggcggcctgcgaccccggggacccagctggcttccaatacccgggaagccaggggtggggggaaggaaacgaaagcggagtagggcagtcagaactccggggtctcccagatgcctcggggtctcgctgccgccaacttcgcaaactgactcaccggtgccaaaagatgaatgctgccccctcctctagtcgggacctctcctcttcctgtcagagttccttagccatcgaaacgcagggctctttttctgaagggtagctgataatctgagcgatgccagagtgacatgaaaagcttgccaagttactgtcgagggaaaatacgtggcgctgaaggccaagacaacagcgcatccaggttagcatgtcagggcaggtcagggacacaccgttctccacccccacccacaacatgcccatcttccctgactattagtctcctgccaggtgcagagcagaggatgggctttggctgcgtcaagtttccccaaacttcaagttgagattcggagtgaaaagagtggtttccagagataggctgagaggaccgggacgggggtggaggttgccaaggccagagccagcgataagtggcctcgcgggcgctgccagctctgtgctaaggcagggcgactccggttgtttgtttatgagttgctgcctctggagatgattccagtggccaagcggtgggaaagctagttgtcagtctcaaatgccttgttagtgtctttgccgcgttttacatttgtgtagttttgtatttttataaaaaatttccgagaggccgtggagcttttcaccacttgtttagagctcagacctcataatccaatagaactgagttcgaatctctgctgttcatctaactctggtggaggtttgaggaaggtaattaaccttttcctgacatgactacttctagtgcttattgcacgcccatgtactcaatccgacaagaaccctatgaggtagacgctattatcagcattccctattttacaggtggggaaatggaggcacaggtgtgtcacatagcttgatcaagatcaccaagagtgagcagacaaagcacggatttagacccagggagtctggctcttgagcctagacttttaattctaacttggggataccaataataatattctacttgtaggattggtgtagacgtctatgagtgaatgcattacaaagtacttacccctgtgcctggcatatagagtatccaccataaatgctagctctcatgagtgtcttgtggcagtaagctctcaggtatattgttgaatgaataagtgattcttgttctttgctctaattcccacattgctaagataacttagattaattaaatgactgagggcagatgaacaaccaaagtgagcttaaaaattaaaccaacaactttagaagaggaggcaggttacagatcagtaatgaggcagagcctctccttttctcaggtgattctcacaacagcagaaaatgggctcggagaagcccagggccctggaggtgagcaggcttgtcagtggagagttaggacttgaactttggttctctaatccctggaccagacagagcttatggtgtttggaaactctcagaagaagttattgtgtaagaggctggggaaattgcaatgtgttgtgaaagtaagcaaaagttttattatttatagagttctatgaagtaacctcctataaataaaatgcccaatgctttagtagctgtatgatagttaaaacctcctataagtgaatgtataaattattcactttcttactcctgacattagatatggatattttaaacccccttctaccacttcctccaacatgttctaaagaatacagattaaaaatattttttaaacccagaattatgtcaaa

SEQ ID NO: 1885158 - DNA, 4001 bp, Homo sapiens; identical to SEQ ID NO: 917036

SEQ ID NO: 1885159 - DNA, 4001 bp, Homo sapiens
agacagaccgaactgccaatctctgtttcaccacttacaagctgcgtcaaaaaacttactatttcttcaaatttcctgggttccctgggatgtaaaatgtgggtaatgttagagttggtgtgaatattaaatgtaaataatgaatgtaacatacttagctctatacctggcacccaagtaaacaataagtttgttggctattaaagacgttgatttctctactgatatcgtcagagatgggcctcatgctcattaaagttccttcctctgcgacctatttccactctggccacaataataactaattatagcagaggcctgacccgactttcggctgttggcctcccttccccacatcgaaaaattcaaatcatgacccagggtccatcctagaagtgtgccatctgtatttatgaatggagcctaagcaaatctgaaaaccaagcagccccaggcaactgagcccagcgtagcaaccgacgccggggcctgttgctaagggaaaagaaagaaaggacgtggtccgtcagctattgctctccgggggcagctacttccggtccccctgggagctgtcctgcggtctacgttcccccgaggtgctgggactgcggccgcaggttccgctgtctcgggaaccgtcgtatccctcggtccggcggcggcggcggcggtagcggaggagacggtttcaggcctccggtgcggctgcaatgctgagctcccgggccgaggcggcgatgaccgcggccgacagggccatccagcgcttcctgcggaccggggcggccgtcaggtgagattttggggggcggggctgccgaagaggccgggaccagggtccccagcttgggcccgtgacggctttttcatgccctagttggggtctccagggcccgcgcgggcattctggaaggttctgcgtcctttagggttggaggcctgggcccgtaggtgggaggactgacgggctccagtccttcggcaacaccaattctgtctgcactccccaggtctgtcagtccctccccctcctgtcattgttcccaggacacccggggcactccagtcttgtcaaggcccctaattctgtcagtgccctcagtcctttcagtgcctcctaggcctgccaagacccctcaatccttctagtatacccccagtccttctgggtcccccaatcatatcagtttctggactgccagggttccccaaccttggcacggttcttctagtcctataagtgccccgggcctgcgagccccgcgttttgttagtaccgccccctattcctgttagcccgccctctagtctaatatggatcgccacttctgtctgggtccctgatgttgttagtgtgagtaaaggcccttgttttgcaagggtctctaaattggtcagggcccctttaacctgttaaggttgcttggtcctgttaaagccctccgttcttgttaggactcctcgattgcctgggtccccaatcctgtcagggcccccatttccctcttattcaccctcccaagggctccaggcttcagaactgagtaccccctcccccactgctgaccccaaatgactgagacctgttgctcaggtcggcttcctctggaactggagcaggtttaaagagcttattatcccagggctgaaagtcctcgatacttatcctgtccagtgcccccattccgtagataggaagtgtggccccatagctgacctcatagcagagttgggaggagaagccagatcttttcatccgcaggccccaccactctcctcgtgatgtcattttgcagaggaatggagtttccaaagtcgccacttgtccctgggtattttttccttatgctgccaaagtcatggacaagtcctctctcccatccccttgacactcttcccttcagtttccatcttgaacttcgtggttttaagcacagacctggggagacagacaggcatgattcagagccatgttccttcactcactgtgaccaagttgggctcttagtttcttctgctataaaaatgaaagtgatagtagaacctgcatctgtggggttgttttaaaaatgaggtaagattgtcacagggcctggcagagagtatgtacccttaaatattagtgtttgattaggggattttaaagcactggtaaagcaccttagcacttccatgacagtcctttataatctttccaggcacttttgtgaactcacgtatcgtgtaaaagcacagtgatgtattaagaaacttcaagaatacctttcaccagctgggcatggtggctcacacctgtaatcccagctctttggaaggctgaggcaggtggatttcttgagctcaggagttcgagaccagcctgggcaatgtagtgagaccctgtctctacaaaaaaatttaaaaattacctgggcatgtggtgtgcagctgtggtcccagctacttgggaggctgaggcaggaggatcacctgagcccggaaggtgaagattgtgttgagctgagatggcaccactgcactccagcctgggcactagagcaactagagcaagacactgtctcaaaaaaaaataaaaataaaaataagaaaaaaagaaagaatagctttcatgaatgatcctgagattgtaatgcttaatttgtagcagctaacatttattaagttcttactatgtactgtatgcattcacacttatttaatcctcacaacagccctatgaggtaggtcttatggattgtccccattgtacagatgaggaaactgaggcttagaaggtgaagtgatgccaaatgaaatagcaaagccaggattgaaccagaataaggtaatcccactttcttaaccaagtttggtgcatattctgttgactctgtcttggaaaacaaatatttatctgaaattcagctatcagctatgatactaagaaatgctgattattataaaacagggtcaatattaccaccagtgactcttcaccaagttaatgtttactgaactgaaatcaaaacaatattcacatgatccaaatactgggataataatgtattacacacacacacacacaaacacgtatgtatgcatgtgtaacatatatgcagatacacattacatagctatatacacatagatggtttgtcttattttgtagaaatatataactttgtataaaaacaatgttttaaattgttggggaaatttcttaatatgtagcaaaagcataaccagcgttcaagtcaagcctgaagttaggaaatctttaattttataaatattcagctcttttataccattgtatgtgtgccccttccctgtctaatattctaaaagagaaattcatttctgtatattttctccagtattcagtcattcaataaatattttatatatatatacacacacacatatatatacatatatatatatatatatatattttttttttttttttttttgaggcagagtctcgctcagtcacccaggctggagtgcagtggcgcaatctgggctcactgtaacctccgcctcttggactcaagccattctgcctcggcctccagagtagctgggattacaggcacctgccaccacacccagctaatttttgtatttttagtagagacagggtttcaccgtgttggccaggctggtctcccactgacctcaggtgatccgcccacctcggcctcccaaagtgctgggattacaggcatgagccatcacacctggcctcaataaatattattgagaacctactatgtgctaagtatgatctagacacttgagctcattagtgggtaaaacaaagcacatgccagttgagggagacagacaacaaacccagtgcattaaaaaaaaaaaaaagaaaagaaaaaaaacatagcgaataggttaattttatgttagaaggtggttaagttctatggtaaaaagaaaaagtagaaacatgtcaaggggacaaggacaggtcccactgatatgttcaggtaggcctcttgaga

SEQ ID NO: 1885160 - DNA, 4001 bp, Homo sapiens
tcagctagcttttgtatttttagtagagatggggttacaccatgttggtcaggctggtcttgaactcctgacttcagctgatctacccgccttggcttcccaaagtgctgggattataggtgtgagcccccacgcccggccatgtgcaccattttcatcccgagaatagcagcatctttaaatccgttccctctgggattaaaccctcctcttctcaatccctcagataatgaatgtaatattggtaacctagagagctccgtctcctgatttctccctccctccaaaagcttttgctaccatagatgtaaaactacttccaatgattcatgaaagaaggaattgagtgagctgatttctctatacatatttataaaaacaatctattttgacctgaaaatggtactagctcaacacactagatgtacatagaatatgcctttttataggctacactttatgaactcccaatgatgaaaataagattcttaaaaatccatacctgactaagaagttgtccatgaaaaatgttatttacaacattcagaacttgtttgatgagtttcctttgagaagtggggataagagctggtaaactggtaccagttgtctctaattcacgttgtattttatctaaaagttcacaaagaaattcctgagcgtcttgttgggcgtaaccacgaaaggcaggaatgagtctccacactgagtgtagcatagcaaatggtgagaccaacgcccactttccagaccacatgacttggaacaaagtatgcaattcatgacaaagagaaatgtactgtgaagttggctcctttggctgaataagttccatctttctaccttttgatgctccaccacttagtcctgatgacagacttgattgtctggagcaaacaaaacctgtatctttttcctgacattcattcatttgatatactactgtatctgtgactggtggatgcttacaagatcttgtcttctcgctagcagtcatagccagccattggttcagatcaagctttaaaaaacattgtcgaaaaataagtaaatgactcaacacctgaagaacagaattcatatagcaagtatttcccaaatttctcaatcctgttacaccaggagttactattggccttcgtttaactgaggagtcactgactttttgagatatttcattttctgaggtagagagtactttatcttttgctggtgatgctggcgtttgtgctggcacctgaacagaaactatttctattatggtcgactgagcgagcccttgtaaacgtaaactctttcttggaggcatactttccaattctgctttaacttgatactccaattcctgccgtcttttctttacttctctttttactactattttttcctgaaatggttcttcttgcttttttcttccaatgggtgattgttcaaaccatgttcgaaagattttacccattagtatccttctcctgtgccaaagagcagtatacagttgatcttcactttgaagcagagattgggcaccgtcatgtaagaaataagaatcatcacctgtacccatggaccgtaaaaacctcccactacgagttgtgcagtgataattttgacttttgatggcacttaatgtacgtcgtagtaacttcaggtctccagttgtgttatcattcagaacataatcatcacaaaggtaacaaaaaacgtacatctcattcacctccaatgcaacaggatgactgctttcttgaaagtgcttgagtgcatgctcttcaatatatcttccacaggcaacatgggagcagctaaggcaagcccaaatggactcggtcgtgttgcagtccacacagtgccatttctgagggttgaggctggaatggtcttgagcaagctgcagctgcccaacatgtttgcacgtatccattgctagcatttatttagtctagctgagaaatgcataatccaaacaagtctctgttcacaacacttgaagcatctgaaaactaaacagaacaatgtcaagtgttaataacaagatgctaatatttttcatattttttcccaagaataataaagatttgtgtcctctgctcccaatttctaggctgcttatcataataccattggcagttctcccatttccctttctctaaacttccctaacctcacatccaccttgctctgaaagcacagacacttcactttctctaatgaggcgcctttagcttttgtttttaactttctgccaccatctagtggtgaaaaatgggtagtaatcactttccactgaaatagcttaagatctatccttttttacccagtagtctgagggcagtttccaaaactgcattcccttttttttttttttttgagacagagtcttgctctgtggcccaggctggagtgcagtggtgcgatctcagctcactgcaacccctgcctcctgggctcacgtgattgctgtgcctcagcctcccgggtagctgggattataggagtgcaccaccacattcagctaatctgtttttcgtatttttactagagacaaggtttcgtcatgttgcccaggctggtcttgaactcctgagctcgggtcatctacccgccttggcctcccaaagtgctgggattacaggcgtgaaccactgtgcctggccccttttcttaatgacaggggttggcaagacccaaatatatctcactaatatttataaacattatgagccttatgtggagttaataaaacataatcaaagatgaaaaggtgagttttaaggcagaaaaacataggtttgaattgtacctttgccacacactgttaaatgtatgattttgagcaaatgttttaacttctctaaaccatctgtaaaagagggaaaatcataccaacttcaattgagttgttgaagaactgagagataatatttatctgacacatggtaaatggtagttttaattgtatctatagtgaacgaatcttattaccctatttaaataaatcatattaccattaaacttatttttttccatttggtaaatcaataattacctttaattcatggctctataacatactctgaggccgaacagacttgacagttggctttagggaaagagaaagacagaagaggagaatgtgcttttgtatttgaatattctcagaaacatacaaggaaataaagagaaaaaaaggaagaatatgaagtgggtggcaataagcttttattacattctagcaggcctaaacctatctgaaattataagcttatttttttaaaaaagcttatgtgatttttgacacagaacttgttcctttatcagttaaagtcaggaacacttctgctgtaagttatttacatgtaatgaacagaaatcttatttaaaaagccgtgatcacaaacacttttttcattgatttaatacaaatcaaagacaaatttcagggtttgggtggagacctagttacggaacactaaaaacaccctatgtatcatgaccaaggcattaaatttttagggcagttgaaactgtgaatttcaacggtacctgcaagtgccacctccaggccttaagaaaactgcaaaagcagttgatttttggttccttcccacctctttttgtaaaatctcatattcgttccttaatttttaggtatcaggtactgaccagtcccaaatctcacatgttcacatgtttctttctttccttttttttcctttttttttttttttttttttgagatagggtcttgttctgtcacctaagctggactgcagtggtgcagtctcagctcactgcaacctccacctcccaggttccagcgattctcgcacctcagcatccccagtagctgagaccacaggcatgtgccattacgcctggctaatttttgtatttttggtacagacatagtttcaccatgttgcccaggctggtcttgaactcctggcctcaagtgatctacccgcctaaccctcccaaagtgctaggattacaagcgtgag

SEQ ID NO: 1885161 - DNA, 4001 bp, Homo sapiens; identical to SEQ ID NO: 917056

SEQ ID NO: 1885162 - DNA, 4001 bp, Homo sapiens; identical to SEQ ID NO: 917058

SEQ ID NO: 1885163 - DNA, 4001 bp, Homo sapiens; identical to SEQ ID NO: 917059

SEQ ID NO: 1885164 - DNA, 4001 bp, Homo sapiens; identical to SEQ ID NO: 917080

SEQ ID NO: 1885165 - DNA, 4001 bp, Homo sapiens; identical to SEQ ID NO: 917117

SEQ ID NO: 1885166 - DNA, 4001 bp, Homo sapiens; identical to SEQ ID NO: 917123

SEQ ID NO: 1885167 - DNA, 4001 bp, Homo sapiens
ccaaacatcttccatgggagaaattggtcacgtgagcccatccctgatgcccgaggagggatgggcttgccaaggctcttcccccagttcccaggactgctgccagcaccccactggcacaactcccctcagcacagtgggggagatgctgctgggtgtccattgggagccggccccaggggctgcaacacacagcagcactttcctgtagccatggctatgccatggccgtgagtgaccagggctgtttctgtccaggagacacactgtcctgcaccatgcactcaccctcccctctccctgcctaccctattcaggcctgggctggggatcctgagccacagtggctcagccaccagccctgccagccgcctgcccaaaagcatgctccccaggccacccagacacgaggagcccaagagagctcttcccagggccattcaaccacccctcagcctcccttcaccctgccctgcacttggagaggctctgtgacccaccccccacacaagaactcacaggaacgcccttctctttttgggagaaagttctgctggcatcagggaccactgagggaagcgagcacatggagagcaggactcgggtcccccatgactgtgccccagcagccccactgccagacacttctgagctgccatgggtacccgtttcacaggtagggaaaccgaggctcagatccagggagcagcaatatgtgtgggcccacccatctttctccacaagccgcaggagcccagcggcaacagtggggagaccctgctctgcctgcccccaccctgccactggcctgcaggctccccctgggatgtggctgcccacctgcaaagctatgtcctcgccacccaggtctgagttgtgcagagctggctccagtggctgtaggtgctacagtcgcagggcctcaggtcttcacaccccccatctgtgctgccacagccaatggcactgaagacaactgtcctcagatggggctgctggcctgggggttgccactgccaagggtgagctgtcaccttccaggatgctcaggttgggggagcctggtgtggccccaaccacagccctctccagcccctgctacctgcagcccatcacaggaagcttccataggcagggcccttggtttgcccctcaccttcttggtcttcaatgtggggggctgagagccatcctgagatggaagctggaaggagagcaggaccccaggcctcacttgaatcaaccaactgtggtgagccagccccgcccctcccgcagcctgccttcgggcaaggccgccaccactcccctaccatgtccagtggtgcgccccacaacagggggcccagcttgtcaggggaaggacctctgaggaatggccatgtccttgtctccagagggccaggtgctcggcctttctcctgggcccagggtcagagcagggaggagtctagggcactgtatgggcttgacctgaggctcacagaggatgcagcccccaaccactggtgcctgggaggccaaggagctgctcctgcaggggcggttgaacccagtccttctgctgaaaggctgagctcctgcaaggcctccaaaggctcacgggagagtaggagagattccacggagactgtgcagaagctgcacgccacagcttcatccagccctggcttcttccaccagaggcgtgagggctctgtgtcaccaagagtgttggcagctgattgggctccatgcagcatgatggctttgatctgagccccaacaccagccttggcctccagcccccttgccaggcctgttctgccagagctccagcctctctactctttccctggggaggccacatcccaggtggggtggcaggtttggtttcccctgatggaggagagccgagtgcttctccatcaacagtggtatcaacagggacgtctgtctctgcttctaaggccacctgcccaactgctcttcctctccaaggcttgttttccaaacaatttgcttaatatgattcctgggtgagttgaacacaactaatcttgcttacccaggtaatcctgctgcctcccagcaggtagggttggaaacaagcccaggaagaagaaatgcctcggatgtgccgattcactgccctggcatcgtcctttctcttgcagagccagaaatgccttcagaaatgggggcaatgggagcccggcctcaggaccttgtctggatgaggggcattgttctctgagtgcccacgtgggcagagaaagtgcatgtggatgttggtgggctgtggagccccctcactgcccatgccagtggggtgcaaggccaacctcgtggcactgggaaaggctggatctctcaggatctctgctaaggctgcgctctttggacatgggggccagctgggaacttgttctctgaaggatgagtgctcaggcctcatccctcaccttctgggctcaggcaagccgctggcccagatcctatgccaacaaggctggggagctgcctctgttcccttctggggcagacctgactccttcagctgctccgagttggcccagaggcaagggtctgtcttcccctggatgtcacagcttttatgagaaacaagctggccactcaccatggatggagacaggctgaaggggacctgcagtcaggctatgctggaagggggactcatagcactgggggtgctgggcagccagggggtgccaggacgacaggtgactcaaccaggcgactggtcccagcctttcccttgacccctaggctgcaggtccctccaggacaacactggagcatgtcctcccagtgaacctcactagagggatgtgcgctctgaaaacacttggcagaaggacttgctctgagggttttagagccgtttctgtggatgctgtgaccttgagtcactttggatcctcccagcctccctcctagtgctgatcccctaaatggggctctgctccggataccatccttaccccaggcggcagcctgggcctgggccctggcccgggatgggctgcagaacagctcccctgtgtcctaaggcccagagcagcaagaagtgctgctttctggccacctcctccccctcctcatctaggcctgggtctgggtgtgctgcaggccaggattcagggctttacccaggctgtggacaagaggagtgatgagagctgagcacacttatctgagcaacggcatgaatttcagggcacctggctatgggccctcaggcaccttggaaagagtgggaagagccctggggcaccccattaggcaccccacaaccaatacacagccacagtggtcaatccaatggcccctggggaaactgagggcccaagagaaagatttaagatggcttattgggaagccaagtcctctctcctgggaccctgtggtgggtacaagctaggatagggaccctagctttatactaggactagatttatgcttctctgaaacactcagtcccagggccagcccccaggaggactgagccccttccagtaacactgagccccttccaggccaggcccaggtcccagggctctgggctgcaaggacaaggcagcctgatgaaagagtccctgcccggcgtgggggcggggcccaggacccagcccacctcggtcggtccctcctctctttctcatgcctcagttgcagccaaggccttctgcttggccaccccaggctggatgctgtggactcctggtcccctcccctcttgcccagcccgcagccaaggccaggccctcaggtgaagcagaagactggtcccagggtccctccccagaattccaccccatgagcctttccaccctctccagaggtacctgggcttgacactgtgcccacctgctccatagcagtggcttcccagggcagatcctctgagacatggccctcaaactctctcccatctctactgctgcccctcccacagcctccttccctgcattctcgtggtttatgcctcagcccactgg

SEQ ID NO: 1885168 - DNA, 4001 bp, Homo sapiens
tggcaaaggtcaatcattatcagattgcaggactggttacaatggcaacaatacaggaagtgagaccatggaaacaacagaaagatcagaatggcctttttcccccttcttctgacttgtaaagaaagattgccttccttggacttaggaaaccccttagcttcttggaaaattcaaagaaggaagacacaggagatagccccacgggaaaatacaagattttctgctaaattggacatttcaagacccaataactaattagaaaagtcaggccaggcacggtggctagcactgtgagaggccgaggcaggtggattacttgagctcaggagttcaagaccagccagggcaacagagaccttgtttcaaggaaaaaaaaaaaaaaagaaaagaaaggaaaagaagtaaaaaatgtggctctttttatcccatgcatggggattatacttagaataaaatgaacaacattgagatccctagggataaaggtcttaaaaatcctgaaaacatcttgcactctacttctaactaatctagacttctgcttgatttctggctaaaaggtagactaactcattgctatttcaaaccatctgaacaaaactaggaactctcacctaatgtataagatggaatagttgcaattattttaaacttcaattcaatattaactggccttttaacataaacacttactttgtcaaacagcgagaaatagcgtaatcttctgcatcttgtccacacgtcttgagtaaagacattaatattttgtttaagaaggatgttgacaatacccggtgagtcatagtgcacagcaagcataagggctgttctaaaataacaaggaaatcactccactcaagaactttaataaagacttttttaaacagctagtttgatacactttaccaatttaatatccacctgtcagtgtagacataataacattttgcatgtactagcttgggtctataagcatctagggtgctcaggtgttcatctttataaattgtcaccaagtctaaaagaaaaggacaataaggaagcctcctgtcccactggggtatgacataatacaagttgctaactcatagtcctttgatggccaagaaactgtgctgaggtcacttatctaaagcaggtaaagatttagatgaagatttccccattgctttcctagtctgatatattgtaatttatatcagctaggggtcagataagagctatctgcagactgaaaacaacaacaacaataatgatgatgatgataatactagtagtcataaactaaaagtccacactttaaaaattaataaaactggccaggtgcaggggctcatgcctgtaatcccagcactttgaggagccaaggagagcagatcacaaggtcaagagatcgagaccatcctggccaacatggtgaaatcccatctctactaaaaatacaaaaattagctgggcatggcggtgcgcgcctgtagtcccagctacttggaaggctgaggcaggagaatcgcttgagcctgagaggtggaggttgcagtgagccaagatcacaccactgtactccagcctggcaacagagccagactgcatctcaaaaaaaacttaataaagctaatacaaaaccctttagctaataaaagattacagtaccaaaaacatccaattataaataacaaacactctgtattataggagaagatgaatcctactatatactgttctttatgttactcagtctaaatatttgctgatctatctgattattcatggtgacatttttcactacatgccaataattacattaatcttcttattagtatttctgacttgagtgactgttaccactctagaatactcaggtttcatttaaaaagaactactgtaccatctcaggctatcaacggcatgtgtacttgctttgtttttcaataaaaattccaccattttctctttcttgcaaattatagcgaataaaagtggggtattattgtcctataaaacagcaggaaaaattaataattcacaaaattacatatttctcaactgaactgaaaatcttctctaaggtgctttgaacttcaacatacaatatacaaaggaagtaaatgaaaagcagtcccttccttctcactcctctgtgctttctgatgtgctgctttttgccttgcaaacaaccctcctctgtctccccggattaactgtggtcattgccaaaactcactttaaacatttaccagtcccaagaatccttgctttgatcacagcacttagcatggtacattgtaatcatttcactgtgtcccactgaaaccaagagcttcttgaggcaagggctgtatcttttgtctctatagccccaaaaccctaagacacagtagcaaacattttaagttttttacataaattaatgatctaaattattctcactaaagcagtgtttcttaaactatattccaaagaatatttgccttaccagaagtattataccccaagagaaagactccatgaccatctgcatttgagaagtattataaaactgtatgttatgtccaataatcaagaaatctcttgaattttacctaatccccatttgacaatactatttgtggcaaacattaacatttgaggaattaagagttttaggggtacagttgccagagcttcccaatgcaggtggaggttttttctgggtggtacaaacttgcctgattcacttctatcaatggtgtcaggatcccagatgcgaatgtcaggcactcctgctccaaatgggtcactatggaaatgagctttgaattaagagagattggcttcaaatgcacttattttccttattattaaatagtccatgggttttttccctaatacaagagaatagatttttatctttactgtttgaaagctcagtatgttctgtgtaagagaaataggtttaaaaaacttaagaacaaatatttaaaaaaccaaagctcagtaagaaatactattctcaattataatggtaatcccgggaccccagggcagctctactttttaaatccatttttattggcttccacttaaagggctacttaaaattattttttattttagacaaaatataaatccgaaataaaaacataatggcttatcaaaaaaattctcatactgatccatatgaattatttctcgcataataaaagccagtaagtcacttgcatttctaaggaagagcactgaggagaaagatgtaatgtctgcaatattcataaattatccaactataaccaggaataacctaaaaaggcttctaggcattcttatgggcagataattatttgtggtatatataaagaaaagagtttcaaaaacttctaaattctaaaattcaactccataactgagggatttatatactctatagactatatattataacaaatacgtgctgacttaaaaaccttgaaatctttatcgaaatatactataacataggagttgtaaactcagatacttacaaggacaaaggaaggttgcctgagtaaaggaagtactaaggtgggcacagtaggaaactggagaatacctgccttctctaaaggggcaacctctgcacagcagaccaaacagtgatagaaactcaggggacaccagatttgatttttttgaataagcctgaagtccagatatctacaccagtcttctaaattttacatgttgattcaacttacagaggcaaacaaacaaatctgtgtaccacattagaatatagcccttgtgtttttatattcgctattaaagtgttactaaatggttgtgtataatccaagtatttgcatgtaaaatattttctttctctagtatcatgttttaccaaaaaatcagactctcatatataataaaaattgctaaaaaaaaaaagactcataatacctgcttcgagaatttttccaacatttattcatttaaaatatatttgtatataattttcccagattgttaaccaaatagataat

SEQ ID NO: 1885169 - DNA, 4001 bp, Homo sapiens
tgtctatatttatgtatataatgtgaatattttgcaagtatgttgtcttttattttgttaacttttttctgatgtaaggggagttttaatttttgttttctaaatcaacctgcagaatgcattcataggaaggtctttgtcaacataaaaatgtatctgtataaataggcattcgtgttttcttctggcattttctaattttgtatatttaagtttttacgcatattctatcaataacttatttttgtaacataaaaatctagctagttttctcgagttcacagacatgtcatttacaaataactcatctttccatacacatatgaaatgtcatcaggatcaggttctaaaatcttacacatttttcagtatgtgtgcattttttattctgttccacacatttatctgtcttctcatcttttagtaaatgaaacctaatatcacactttgatatatagaagggcaagtctttactctgttataaaaattttcttaatgtcatcataagagtaaaaggtagcatacgtaacctagaaatcttaaaaccttgatgcttttatttggtttatctaaaatgaatagagttcacatctcgagaaaaatgagtcttcccacatgcacacgtatgttgactgcggcattattcacaattacaaagacttggaaccaacccaaatgtccataatgatagactggattaagaaaatgtggcacatatacaccacggaatactatgcagccataaaaaaggatgagttcatgtcctttgcagggacatggatgaagctggaaaccatcattctcagcaaactatcacaagatcagaaaaccaaacaccacatgttctcactcgtaagtgggagttgaacaatgagaacacatggacacagggaggggaacatcacacaccagggcctgtcggggggagggggtggggggccaggggagggataacattaggagaaatacctaatgtaggtgacgggttgaggggtgcagcaaaccaccacggcacgtgtatacctatgtaacaaaactgcacgtcctgcgcatgtaatccagaacttaaagtataatttaaaaaaaaaaagaagaaaaaaagaaagaaaaatgagtcttcctattcaagaacagggaaccatcctctcacttcaaaagatccttctgaggtcattcatgaaataacttattactcaggtgtaggtggatataaaagggatattagattttatccaaagaatttttagcccagaagttaatataatatagaaattatttttctcatgatgcttgtttccataacatatataacattgtttaaaatgtgtacaataaaaataaaaagctatgtttcttaattttttttaaagcactaaaactttcagtaaagtaacgggaattatgagaggatcggaccagctaaagttttgtttgtcgcgctgctcatattgatgaccttgaggttgccacaccggctgctgcgggctgcagagggaacaaagcccagcgccctcggggacaggggtgagccgagagcaggaaagggggcctctccccgacccgccctcctccctcctctgccgggctccagttcctattacctgttcttctcgtctctgtcatccacgccactcttcggcagagaaaggatccgccgcatcgtctctgtccggtgtcggccggcagctctgcggagcctgtcgaaccccttgtccgggtcgtggcgcctgggctgggaggaggcgtggtcctcactctcactcccggcgcccgcgcccaccttcccggggctgctgaccgagccccagggcagctcgcccttccccctcctgaagcccgaggtcttcttcatggctccgtctaccggcttcggagacccgctggactttccgccgcctccggaaccctatatgaggaagcaaatcgcgtccgccacagcctccaaccaggaaactccgcgactctcagcccctcagaagagaaacggagacgcgccaagcaaagccgttacacggactgtgcacgcgcctccggtgtccctgcgcgtgacacaaatttggccccgagggagctccgtgtgctcagcctcagagccgtaggcgagagcgcctgtctgcatgagtgagcatatgggtgtttttgagtctgtgggtgtcacagagaggagatcgggagctgcctgctcacaggcactttgggaccccgaaagaaaaggctgtgccgagagagttcttccagtcagaggtttgggaatgggggagaagggagtgcccggaatcccgacctcagaactgagcctccgaagtgggaaacagtggctcccccacacgctcaagggccaggcaggtgcatccaccctgccttgcatggcccaggtgtgagccggtgggcagaggggtggccctgggtccagctgagaaggctcccgggattgacaggggttggggttggggagttctgccttcctgcgtggcccagtgctgggaggggtaagggatgagggcaggggtcctatcgctgggctctgacccctcaggccactcagaccctgcccatgtgggcactcaggggtcaggtgttcttagagggaactaagctgggcagggtcaccgtccccttctgcagaggaggaagctgaggcccacgaggtaaacagtgggctgggagtgggcctggtagaccccaatcccagcccatggagaccaactactgagggagcactacaaacgccccttaacggctggatcccccagttttcatgcaatggggtctacactgaccctggggtctcactgggagagagcaggaggtggcttgaggctgggcatgggtggccacgggggcatggactggctgacccctgtgcattgaccacactctccatcccccaggtgtcatgaagactggacatgggcctatcagggccatgggcatgatgtcagccaaggaactcgcggcctgcctctgccaagagaccagcatctcggcctgagcactcccagcctcccatcgccttcaacctggctgcattcagctgccatgcccctacctccttgtgtggtcagcaccctccaggacttcatcttgggtcacccaaaggccgaggacattgctggccagcaggaaattcatggtgcatccaggaagacttccaagaggtggtggagcagggggcgccacacccagacagctgtgtgtaattgcgcagctgcgggctgctgcgggtgctggccggcagtgcattctgggcacactggactgtgtcaccgcatgcaggctgtggccggagggggaactgctggccgccaaggcctatgtgcctggaaaccagcagggctgctgcaggaggagggctgcagaatgctccagctcagacctgactcagggttttagagggcatagggcataaggctgtggacatagacagccctactgcgcaggaagagcataaaccagccggagggcatgcatgtgggctgctgttagattctgttctcctttgaggtagggaaggatgtgtttctattttatggatgagcaaactgaggcagagtgctggagtgatttcccccagcaacgatggcagatttagctccagggcttagattttaggatcctccctctcaaataccatgatgtatcatgggctttctctccacagaaaattagaaactcagaaatggaaagggaacaatgaaacttacccattctcccactgctcacatttccttctggtttttttgcgtgtgcatataaaatatatctcagaaaattgagtttgtgctgtggatgccatttatatcctaccttttatactcaatagatcatgaaaatcccctttgttgctaattatatttcctggcagccccatggcccatcctatgcacgtgctgttattccttcggagagtcctagatttttgctcttagttgtaacacatcaggagtgacatcctgtctccacgatgttttctccttaagatggagacagatatagcgctc

SEQ ID NO: 1885170 - DNA, 4001 bp, Homo sapiens
attttctactggtgatcttaattgttgagataacattgaacctgtttaattatttgccttgctgatactgcttgttcttccttctgtagtggtttttttactcaaactctttcaaagtttgagagtctttaaattctgagaggtggcagctgtcttagtcggctctctgctttggttgagggtggagatgattgttcctgccctggagtagttggtaaggacttgacatgaaaactggatagctgtggatgcttctgaagtctgaccttaatgttgctttgtgattaatttgcagcaaattttcatatcacacacactgcttatcaaatattaagtacaaaaggcatactttgaaggaaaattgtaatgattctgggactatgtctctgcctggttagagttcttgatggaaaagcctggagtttattaccacggagaatttggcacaggatttctgaaaagtgaactgggcagagttgttggtcacttgaggcctgagttttctgaatatttctggagactacatgagaaagcagacttccccacccctttgaattgtgaaggctttgctgattataaataaagctatgaacattgctgtacatggctttcagtggacctatgctttcatctctcttgggtaaatacctaggaaaggaattgccggtcttagggtagatgtatatttaactttgcaagaaacggccagttttctaagcataccatttacactcccattagtcgtgtctgggaattccagttactttacatccttgccaacacttgatatattgtcagccctttccatttgatccattctggtggggtgcagtgttatctgtggttttaatttgcatttccctaatgactaaagagattgaactgtttttcacgtgctcactgaccattcgtttgtatagcttcttcagcgaaatattaaagggactttcagccatcttgtttgtatcacaatattccaaacatgtttttccaccacagcttcacccatgatctcagctgcccttttttactcgccatccttgagaacaccctggactgccaaaatggcacacctttgagatgcagttccatttgcctcttcacccttccaactcagaggtcacctttttttttttttttttttttttttgagacggagtctcgctctgtcgcccaggctggagtgcagtggcgggatctcggctcactgcaagctccgcctcccgggttcacgccattctcctgcctcagcctcccaagtagctgggactacaggcgcccgccactacacccggctaattttttgtatttttagtagagacggggtttcaccgttttagccgggatggtctcgatctcctgacctcgtgatccgcccgcctcggcctcccaaagtgctgggattacaggcgtgagccaccgtgcccagccgaggtcaccttttatgctggttaagcctctagccctgccctatctctgcagaatttaggtttccctctgccatgcttctgtagtgctgagtctacatctccgtggccacacttgccatgctgtgtgcaagcttctgtgcgtctcactctttgcattcaccgtgcttatgccatcatctgccatggagtctaagcccaatattgctggattaatttattacccatttcatcctcccagccactctgtgcaaaaagatgtgttagccttaaatcagggacaaaggcatagacccaaggggtcaagtgacttgtccagtgtgacacaacatatttgttatacagccaggcactacttactataaagttttgactctttgacattacagttttccaaacaagtatgttttaggtacagtgttctttgacctagcttgctacaggtacccatgtacatgtacagaaatatttttcaagggatatgcaggcacaggatggttttaagggaatccacttccagaccctcaacttacatacacagtcacctaaaactgactagccttagaaggtgccaagccatggaagacatgaagctggttgggccgtcccatctcctctctcatgatggccattctcccaattcatacagaaaggcagactttgcacctgtcatcttcctgaggtgcactgctgcaagatggaaaacttccaggctatgtaacaaagagacaatgagaaatattgatggtattaagaagtcaatgactttaacgactgaaatgttgctactcaggggtttccacttcttagctttcacagaaatcaaaggagacctaatcaagatgttaataaatgatttaaaatatttttaacttacgagagaccatatctggactttgtccatgtaactcagaagacttcaaagagttaagatatatcatgacaaatctccttgcgttttcaagtatttatttttgtgaacaaagtttttccgggtttgcataaaaatcctccaagacaggaaaacaagcgatgctgggccatacctcactctagcaaaaagtgatagtcattcaggggtaaattaacaaactaaaaaaaaagccctatacatttcattaaaaaaaccatttctgtccgggtgcgatggctcacgcctgtaatcccagcactttgggagtctgaggcgggcagattgcttgagcccaggagttcaagtccagcctgggcaacatagtgagaccactatctctgaaaaaaaaaaagaaaagaaaagaaaaagaaatacacttccagataaaactttgctttttatatgtaataatttataaaaatggtaacatattgttttcatcatttgtgtactcataatagttgtgttaactcagttcagaaaaaaatcatagcaattagattcttatggcttaatactcttaaatgtagagtcaattatcattatttgtggtagttatgttctagaaagttaccttgatcattgaattactgacaaatgcaacactgctctgaggagaaatatagcgttaggatccacgaagactctggccagaacattttgccaaccaatcaatacataaccttgttttatgtgtatttttgtttgaagatagcttatttaatataaatttcttacaagtactcatatgcagtatttctttataataaacactgtgtttcagttacagcattatgtactcctatgactgtactagtttaattctcagtcataagtacacacatgcacacaatacacatacatatacagtactcacataacacggaatactgtgaacatgctttatactgtatagcacagtaataacaaatacataaagtcctgaaaaaagcattaagtgaagattaagcatttaaagttttatacacattaactaaagtcttactgtaatggagctgcaggatgtgtgatggtcagtgagtgcactgtggtttaccctatcaaccttagcttgccccatgaaaatcaaaagaggctggtggaactcaccctgcacaagaggaagatgtcagtaagagcagcacattgtgatctggcagagctaccttaggagtttgtcttttgcaacttgttgatggtgttggcaactgtctctcaaactggctagaaaaattggttcagccttgtctgcctggctttttgcctcaaatctttaagcatctcagaataagggataaatgcagtggaagtgaggtgcttaaatgtgaggccacgttcaagtacagggtcacattcttccatgtcattgaaaatgttttccaaggcagaattctattctgatattttggctgctgtgagaaggacaattcttggagtcttagggtgactttcatccctgactatgctcccatgttttgccatctcatccaggtttttgtttgtgggttctactgccttctctgacaaaatttcctccacatcttcttccttcatgtcattgaaaccttctccacttatttgccttgcaatatgcattgtttttttacattgttttttatattttctgaaacaccttcaaagccttgaaaagttttcacaga

SEQ ID NO: 1885171 - DNA, 4001 bp, Homo sapiens
agtaggatgccaagaatttactttccaccgccgataaccacagtgtccttgctggccatcctacaattgctaaagagaatgtagttgtcagtgtagcatcgggactttccaggaaagtcagccaggatgcacccacctgggagtggcttccgcctggcctccagcagctgccgaaggagccgtgtcctttggagttaatggagggactggctgtgtattcaatcacatatgctacatggtctacacatcctgcccacaggtgagttaacaggtcatcttttcatctttcactctaagtcttggggcaggaggtagaagtcagtgacatcaggcccagggtaaatgagtcagtgttcccaatgacatatacggtggcttacagttaccccggcccagacttttttctctctgtccctccgtccctttgtacctgcgtgttatgtggatggcgtgcatgtgtctgcacagctgcgtgatgttcccctgtggactcaacctcccccgcccctggccgccccacatcatggacagctgggctccaatcttctgcttttataaatagtgctgcagatgccttgtgagtacatcagctatatttctgcgaggacagctttgggatcgctttggagaagggagatttctgagaaggggggtacgtttgcggtttgctctgtcagtgccgtaggaggatgcctgttctccacctacctcgccagcagcctgcgctgcccggcttgccagcttctgggcctgcctaccgctgctggatgagatgccacgtcctgttgtggttttatcttgtacttctcctgctaacaggcaggttgagaatctttttatgtgtttaagtccatttgctgttcttttctcttttttgaaaaagaacagcttgtttatatcttttgcccatctttcatttgggttgtgtcttgaggagctctttatatacttctttattcttgatatttttgtgtgcctgattcctgacatatttattattaataataatggagcaataaagtgagtcacataaaaaaaataatggagacagtgattcccaggccaagagacacataaattatttaactgcagtcaaacaggcttatgttagaagcgctttttccaaaatgcaatgtagagttatttaaatttaaaaacatgctgaggaattaaagaaagaagccatctatgttcttcctggggcatcatttgagctcattacgtggacaccgctgcctctgaagctggttctgccacacgcctgacaggccgatcacagcctgaccttgaccaggcagcatccagggcgtcgctgtctcaccgtggtccccagtgttttgggattgaggaggggttcggcttcactctcttcagcgcctggggccttcatcctgagccgcagttggagccacggtccctgctgctgagatgtgagaaaggcctgcgctggggtctgggaaattcgttttctcgcagaaggcagagaaggccgtggaataacagggccgggttctcactggcgggactgttcacctctgcaatctgccccttagtgcctcggctgattcttggtctttggagacctggtccccagtcccacctctgcatatgcctccagataacgctcgccatgtttggggtgtatgagcatgctccttgcgttcactgtcacccaggcatccctcccagcggccctgtgaggcaggtgccaccccacagccctgctctcccgccgaggaaactgagtactgggctaattcacctgccaaagctgcatgcttggaaagtggtgcttagagccaggcaggactcactgcggctcctgtgctccacgctgcccccccgagaggcagaactttctcaggccaccttcagggcctcctggagaggttgagccccagactcctgggaagctgttcccccacgttctgtactccactcacaggtggacccatcgcctccaaagcctgtgggtctcattggctggaatgtctcacactgcagggcacctggccacccaggggcgtgtcacaaatgcgggcggggggcagggctccaccccacaagcctgctcaggaggcctctccacgatccacaatcgaccacctgtccatggagctccgggaatgctggcccggccccactgcagggcttccccagccctcctagacaccctgcacttgcccctcccgagcgcgtgtgcctgacctgctccgcggtgggcgcagagctcctgccgagggctggatggcgcggacctgggcatcgtggcctctgcagtgccagctgtgccctagtagccagggcgccgtcgtcagtccatggctcaggaggaccactgtgggccgatgaaatgcgactgtggacgaggaaattgtactttccgaacattttcacgtgtccccaaacagttacttttcttttgatttttttcaaccatttaaggacgtaaaagcattctcagttcatggaccacacagacaggctgcaggctgcacgtggactgggggcgggtctgtgggcctctgcttcacaggtcagaggtcgctgggttttcgtgtcttctgctttccattgcacagtcccaccctctccttggatcctagaactctgcccagcttggacagtctctctacacccagagaccggttttccgcttcttgtctgcgtcccttgtagcagtcacccacagggcgcttgccagaggacggccccgaactgcctatgggatccctccaggtcctctcagagcctccgtttcttgcatgtaaaattgacacaagaagagcctccctgcaggactgcagccaaggttagccagaaccatttccagtcacggaaccgtcactcagagcagctcccagaaccatttccaatcatggaagcgtcactcagagcggctcctagaaccatttccagtcagggaagcatcaatcagagcggctcccagaaccatttccggtcacggaaccatcactcagagcggctcccagaaccatttccggtcacggaagcggcactcagagcggctcccagaaccatttccggtcacggaagcggcactcagagcggctcccagaaccatttcccgtcacggaagcggcactcagagcggctcccagaaccatttccggtcacggaagcggcactcagagcggctcccagaaccatttcccgtcacggaagcggcactcagagcggctcccagaaccatttccggtcacggaagcggcactcagagcggctcccagaaccatttccggtcacggaaacggcactcagagcggctcccagaaccatttccggtcacggaagcgtcactcagagcagattctagaatcatttccagtcatggaagcattacttagagcagcgtaaatttcttagcaaccctggtgttgacatatgttgattataatgatatccttacaacattaaactacaaagccaaaaccaaaatacaaattaaataaaacttagtctgtgaaacaggttagattccaggcagggtctacgattctggctggctgtgcgaatcgacctctgaccccaaataactaagggtcatgtccatcgttgcggtgccttcaggaaaggggaaagtgtttttcctggcagttctttctctctagaccctgcaggccacctctctcacctgcgtgttgggcttcaggatcagggtccccttccagtccaggagaggcacctgtatctgccttctgcccagagtgtgtgtgcttgttgagtctgaccactcactggggcgctctcttggtaacagggtccctgtcacctagaccttacctcccagggtctagcggatggcggggcaggtgggggacggcacgaaaaacagcagacacgatttcagaccgctggtggcggctgagctcaggtgggcctcacctggagagcctggacggtgtcagaggtgcttcttggctggtggctgaggcttcccagatgcctctttgcctttcttctggggcacggccctctgc

SEQ ID NO: 1885172 - DNA, 4001 bp, Homo sapiens
ttatgttaattctgaaacctatctgagcatatgttgcccatgtattggttagggcccagtcctgcttgttgcaaagtactctccggaaatttttcctctgctttgtaggtctttattcccattttctgagttatcctttcttctccataaaaagtagcctgtgtctggctgggcacggtggcttccacctgtaatcccagaactttgggaggccgaggcaggtggatcatgaggtcaggatttcaaggccagcctggccaagatggtgaaaccccatctctactaaaaatacaaaaattagccgggcatggtggcgggtgcctgtaatcccagctactcaggaggctgaggcagagaattgcttgaacctgggagacggacattgcagtgagccgagattgtgccactgcactccagcctgggtgacacagcaagactccatctcaaaacaaacaaacaaacaaacaaacaaacaaacaaacaaaaagtagcctgcgcagtttcagcctgctttctgactagaagtctggggagccttattttattttgtactatctgttccttttgaacaaagctaatataattcctttaacatctttgtgggtttcttatgtatcagtttataaactccatgccattagataaggctacacccacaaatctctttgtgataagctcttctctaccttgagctccccatgaagctgtagtgcaacaatgcctgcaagattttcagaagccctactgttagacagaggctgtttgaaaggcttccgtagaatccttaggaggccttttgtctacttgaaagagtctacaaaggaccaccttatacctttcttagatctcaacaaggagctttaaagtcatatgtttgtcttcatttttattatgagaacacattttcttgactgtatcctagatttgatcttccctagaggtcttttcttgccttgagaatctcctgctggataaattcagctgaaagccctctatgtgtcctcttaatttgacgtgaaagctgatcatcatatttttttatttcatcttcatcatttcagattttacacaggcagctataagaagctggtggcacctttagtatcctgcccagaaatctccttggctggactacttgagcttattaagtacgcttccggttttccgtattatctcagatgacagtgttgccaaattttctgccaatatataataaacattttattttctccagcttcaaatactattttttctcactttattcaaatactcaccatcagcttaccccaatgcctatctggcttcttcctgccactcagtcctcaaactacatgttttagtattggctaattaaatatggtagtcatgttttaggtgtttaaggtgtttaagcagtaccttatttccaggcaccaaactctgttcctactatccattattatttaacaaaccacctcaaatcacaactattttaataccttcatggcttaaaatgacaaggtttattctcttacagttctggaggccaggagtctaaaatcaaggtgttggcagggctggttccttctggaggtttctgggagagaatccatttccttgccttgcactttccaaccttttttttttttttttttaacagtgaaccatatttcaatttattgacattgtcaatttatgaacaagacaggatttttttttcccatgaaatgagatccttttcaatctgccataacatgtgcccatacatcttcaccttggaaatgcagcatttcaagctttagtcagggtagattattccttctttactttcacaatttttacgctgttgccagaagtctttttggcatttgctttgaattctgtcttcagtgcatctctcactacttttgcacagatctgggagtatcggatgtagctgagtccagcctgtctccagtaggccaccatgctgtagcgaaagcggagcgcgtcgggccaaatcgccaagactctggcaatgtccttttttttctttttttttagacggagttttactcttgttgcccaggctgaagtgcagtgatgtgatcttggctcactgcaccctccacctcccgggttcaagcaattctcttgcctcagtctcccaagtagctgggattacagacatgtgccaccacacccagataattttttttgtatttttagaagagacagggtttcaccatgttggcctggctagtcttgaacttctgacctcaggtgatccacccacctcggcctcccaaagtgctgggattataggggtgagccaccacgcccggccaccctttccaacttctaaaggctgcctgcacaccctggctcatggccttccctcccatccatcaccgcagtctcttgctcccatcgtcatcacatagccacattctggggtcaaatctccctgtgtcattttaagccacggcatttgtggtaatttgacagcagcaattcaaaaggaacacagggattaggtgtgggtgccttctctgtgctctttcttgcttctgcatctctgccccaggtgttctctgggcctggaactccctctcccagccaccttcctccaggctgcctactgtacgagaaactctgctaagactcactgaatccttcaggcttgatttttctttcctctgcgttccttgagaggaataaacctgtgttatatcacttgtcttgctgtgttataatttatcttttctacctgtctaatttttacttttgatgagagacttcttgggggctgggatcctatattttgcctctttctatcccccaccaagcatgagcacagtgcttggtaaataataagcagctcacacaagttaatggagtgaaagcaaacagaaaaccacaataagcagtcacaccatataaagaatcccttaacaacggtcacttgctctgcagtacctggtattcctcagcctggttctgatggtgtccacactccacgccccaggaaaactcccactcctttcccagtcagtctgaccttgaacggtgaggtctgagggcctgaaggatctgaagtcagacagccttcccaagccctgtgcagtttgacctcatgcctttatttctggttgctgagtctctataggtcagccaatgattaatgaggtgaagaagggttcacagacttctaagagccagacctacgtgtcacttgatacacttgttgcactttctgcagaaaaagtgtcaacaatgtagtcgatgttcttttaaataatggttatttttctcaatataaatattcaaataataaaaaaaatcatctgtaatccctctactcaaagttaatcattggtaatatttacaaagtttgctttttatttatttatttatttttgagacggagtctcactctgtcgcccaggctggagtgcagtagcgcgatctttgctcactgcaagctccgcctcccaggttcacgccattctcctgtctcagcctcccgagtagctgggactataggtgcccaccaccgtgcacggctaattttttgtattttttagtagagacggggtttcaccgtgtttgcctggatggtctcgatctcctgacctcgtgatccacccgcctcggcctcccaaagtgctgggattacaggcgtgagccaccacgccaggccacaaagtttatttttaattttaaaatcaatacattcccattgtgaaaaatacaaacaatgcagcacataaagtaaaataaaaggaacagccagtcggactccccagagttcactactactattaatgcttggttgtagctttgtctagtctttttttttttttaaactataagcaactgtttgaaaaagcaccaaatctcaacaataggaatggaaacaaataaaaaacattccactaaccctagcaagatcaactaatttcttttttaaaaaaatcctagtgtttggtttatgagtggctaaatggattgtgtgggagatatgcttagcaaggggaaca

SEQ ID NO: 1885173 - DNA, 4001 bp, Homo sapiens
taaggggaaaacacatcttctccaaacgcctatttgcaagatagtaagtagccttcggctattctcatttattgcctaaactcttccatgcatagtatacaatgatttatgtactagaaggttataccttgaaattctcttttatcattttattccattcttgatttacactgataacagctttcattccgaggctacacaccaaatgcactgatttcgcaaaacccgtcccccgtgttcagatgcccatcttcaaatttctaccgtacgcctctggccccaggagtgaagcagtgcctgggtgccttaatagcagaatcacaatgtaagtgtcaggatggtggcatcgtcacattttgacgccagcatccgtttcttctgtgtctcactacagagaaactaaggctaaaggttaaaagacgcggttcattaaataattcaagccattaacctgcaacctgcaaactgatggcagcctattaagtttacactgccatgattcatgtgtggtgtttactgatgcaaaagcataatgcctgttttctttccttgtattgctacacagtaatgtagcgaggaaggagggtgaaaaaaggtgacaagacccacgcaaggggacaataagagcagcagtctcacttgcataaagaagattgaagccttccctccctccctccctccctccatctctccgtataggccccagtgcacatctgcgtcacttacaggggaggaggaggcgctgaggcagagagaaaattgtactgtgaggaccttgacagcttcacaggcgggctttttcttttgcctccctatatgcgctagaatatctatttttctcttttacaaactgactatataaaaccacctcttctggcattgcagaaagcaattgactttctcagagccacccggcaggctatcggggcatcctcgaaaaggccagggacaggggcgcaggtgcaccaagagatctggcgaggggtacgcttcctcgagacttggggctctttctctctgcgctctccagacactgaactctgagctgcaaggacaagaacgccaccaccttccctactaaggctctgccacaagcgcatcccagtgaggtgtatccagctgcagccgcctccggagcttcggagcgctcagacctccctccctcgcgcatctccagcctaagggttgtcccacctcgccataacacggggctctcgcgcgggcatcgaggattctcagcttttggcgtcccagtcctgcctctgctcctgcctggtggtgtccccacgcccaggtcctgcggacccgaccacggctgaaacgcgcggctttgccgtctgcgctccagccttcgcctggcagagcgcgcagcccacctagcgtcttctggctctaggggtgcagagggcgcatcccgcctcttcctccgcccccgggccccgctgtcctcccccacctgctgaccagcctactcctgcgtgagctgccagccttttgccttctgtgcgtaaagcatgtcaggctctgggcgaaaagacttcgatgtgaagcacattctgcgactccgctggaaactcttcagccacccgtctccttccaccggcggcccggcggggggaggctgcctgcaacaggacggcagtggcagctttgagcactggggacccagccagagtcgcctgctcaaaagccaagagagaagcggtgtgagcactttctggaagaagccttcctcctcttcctcttcatcgtcctccccgtcctcttcctcctcttccttcaatccgctgaatggcaccctgcttccagttgccacgaggctgcagcaaggggctcctgggcagggcactcagcagccagccaggactctcttctacgtggagtcactagaggaggaggtggtgccaggcatggactttcctggaccacacgaaaaagggctggttctgcaagagctcaaagtggagccagacaactctagccaggcaacaggtgaaggatgtggacacaggtacagtaagtccccacggggcttccaagcatctctcaatttccactcatttcaccgcgtgtgctcatgtggctactaagtctaaaatgtttcaggttgaaaatgtgggttaagagatgccaccctggttttgattactcaagttctaatttcattacaagtttgctcattaatttctattggttcagacacctcacttttctttttggaagttttcaaagttgtagccaccaattgaacttacatgcatttttgtaagccttcaagtggaatagttctcatattcctgagattatggtgttcttctgtcatctaccgtcattaaattatatcagtcgttccattatctgaagatgaaattttgctttacacatcatcagaatgcatctcatatattggcctagtaactgacttagcatattatctaaggtccctgtggtttgaatctattccaggagtaatgaggtggacaaaatgaggccactggacagcaacattattttacctctctttttgctcctgaaatgcagtcgtcttattctctgtcccaacttctcttctggtccttttactttgtgttcactcttgccttgttcagagtaagtctttgagttaaactgtcgtggagtccctttgcatttagctgttgtgatttgttggctcagtattgaaattttgtctccttggtaaacagctcaatatttatttctagtttatttcaaatattatgcttctttgtgtagagttctgctactttaaagacttacagaaaatccttcatagacataaaactcccaagttttacattttgagagaattgactcattactattctaaaccacatcattactggttttggaatatagtcaggatatgaaatgatttgcatttagattcatgtgatatcagaatacattattaaagaagaactacaggagaaatataggaaaatgataatgtatatattaagaaattttaattactacacagtaacaaattagtaacagaagcatcttttttagtcttttggttgattgaatcagtttcttataaatttgattaagtaccaaaaagaatagataaaattatatatgtataacctatatgtgtatatatgtgtgtgtatgtatatatgtgctccctaattatgctgacatatgtggttatagatttaaaaatatccttaaaaattttcaattatatacattatatatattttttaattttaattttcagagattgaacatattctaatgttatattaagacatgtactataatgtaagataattttaatgagggagaagtataatctggaattatcaattgtgtcaatggtttttccatatataggagacctaaatataagtttatctatcattccattaagtgaaatattttaggaaaaagaattataacgttaggtactatgaatactatgaagttataaaatgttattaaaagttatttaatatgctagttacctataattttataatttaaaaaatcaaatgtactgaaatttttatacccttttgttgagtaaatataaacactttttgggaggaattatccagaaacattaagcaattcaccttatatattcaaaaggaaactaggttaagtatttatctgttactattttattaaaactgatagttttgagactctaacagctcaggaagaaatttaaacattatgtgtgtttgtcaatttttaaattctttgaataagctcctagaaatattaatgtttcatattttcttaaagtttactttataccaaatacattttaaaataaggcatattcagcattagtagtttataaagacttttatgtaatttggagttttgaaaacattaatggagtagtgacttaagaaattataataaattaaaactaataacagaacaaacagtttagttagggaaaaaacaccagacttaacaagtttcttacttttgaaaatagtttattatttttattcaca

SEQ ID NO: 1885174 - DNA, 4001 bp, Homo sapiens
gacaattgcctagggtaatgaaacaaattatcaagaaattggagccaggcaaggtggctcgtgcctgtaatcccagcccttttggaggccaaggctggcggatcacttaaggccaggaattcaagaccaccctggccaacatggcaaaaccctgtctctactaaaaatacaaaaattacctgagcgtggtggtgcttgcctgtaattccaactatttaggaggctgagacaggagaattgcttgaactcaggagatggaggttgcagtgagccaagatcacgccactgcactccagcctgggccacagagtgagactgcatctaaaaaaaaaaaaaattggaagtctaaaataagaggggaaaaaagaggaggtcttacaaatctaagatctatttctacctgtgtgtctaatacatgtctgtatttatgtgtcatgtatatgtttcattatcaaagatatataaaacagctctaattatttggccttaaagggaaaaaaggggcttaaatcaaatactttattagaaaaatagaaaccttaagcccaaatgctttttcaagtttatgtaacttaagtaaattcttaataaataagctggttttaaagttattggtaaaataaaattagaaatatcttcagaattgtcaatatacattgttgtttagagtcattggtcaggcagtttaacatttacctctactagatattataagttgtcaaaatttggcatgaggtttataaagctagaaatgcagcccacaagagtactatatttgttggtgtaatttgttgataaatagggcatttgatatcgttgatttaatgaaaacagctaaatcctgagttaatccaggacttcttggtaaagttgactgaagctatattagatatttccccacaaaaatactatttgcattctcccactccctccctcccttgatgggacaacatcctttatttttccttgggcatacatatcattacttccaatttgaaacaagttagtataagagggagagagagaggagaggagaggcagagagagaggagaggagagagagagagaggagagagagaaaggagaggagagagagagaaaagattgagagaggggagactgttttaagtggtattatttttcccataggctgtccttgtcactctttcatggctacagtttgatcggaattagctgccagggcctccgccggcttgggctcttctgcggaggctgtgggggcccgggccttgggtgtggaactaggggcttcctggctgcggggggtctccttggaagagggggcagcctccgagctgctgcggtttgcgtatcatgctggagcccgtcacttatggtctcctgggtggcaggagctgcaggcgccttagtctttttaggtttcccttcctccttgctgggctcctccccagtggtagggtccgcgctcttggcccgggccgtggtgacttcggcagctttgggggcctcgccgccattagcagggacgggggctgcctgctctttctcggggggtcagccttggcctctgcgcgctctctgtcttctcgggctcttccttcggggtctcctccttggcagccgtggcatccttcttgccctctgtctcctcggccttgccctccgcgtcctggtcagacttcttgccctccatggcctcggcgggctctgcagctgcctggggctcactctccttcggggaccctcctcttcccttgccacgccctcatccttcttgtctttgtccttggctttctcgtcgttcacattgtagcccttcttcttgctgagtttgcctgtcatcttggagtttggctctgggtgcctgtgcagcccctgggtgagcgcggtgcccccaagaggccagggtccctggcggtgtctagctcatgcctggccgctggcggaggctctctcctggctccatggcggaggccagagcgaggagccagttgtagtgctagctccgcctttgtcgcagctgccactactgccaccgggaaaacatttttcttaaaaaatgtgttcttatggccgggcgtggcggctcatgcctgttatctcagcactttgggaggccaaggcgggcggatcacgaggtcaggagaacaagaccatcctggctaacatggtgaaacctcgtctttactaaaaatacaaaaaatttgccagggtggtggcaggcgccagtagttcgacctactcaggaggctgaggcaggagaatggcgtgaacctgggaggccgagcttgcagtgagccgagattgcactactgcactccagcctgagcaacggagcaagactccatctcaaaaaaaaaaaaagtgttcttatttaaaggaaaattatttttgtgtaatttaaaggttattcatgaaacaggataaaaggaaccagtaaataggagagatgtaaagacagatacaaatataaagaggtattctggtgtaaggaagattaaaaagaaaattattttatatgagaaagaatcttgtatggtaaatttttgtcctaaaataaaatgactggttatttagaaaagaaggatgtttagaataaaacaggaagtccaaacatgtcataagtggtttgtgtatgtcataataagggattataaaaagaagatttatgtgaaaaaaattttatgtgatcaagttgtctacaattacaaggaaattatttataatagactttctagagatctatatgaaaaatacactaatacactaaggaattggttagaacaacaaaactttcttaacatattattttaataaaattatgagattttcattttttttacaccagaagttcaatttatattgcatcttgctgtttttagctatctcacctttgagaaggacagcaatgatatctctctctctctcaactttgtcagctcctgtaaatttttcgttcaggttttaactgctattgtggcctgatactaaaacattttatcttaaagttataaaggaaatattttctcccagtataacattctgtgctttggctttaaattgttctatgaaaccaaaaatgttcacttaatgtttcctgtaacccaggaaacactcttcctatgtctaactagttcaaatacattttcattagttttgactttcaggttctctaaatagactccctatatggaaaagcagtcacactgcagagggtgttttttttttttctttgtttgacttttagtaactagactaacaaaaaagatttatgttttatcgaaataagtcctacataattgttattaagttttgatttacttacaaaaactgagttacatttatttttaaagttaaagttactgtgtcaggaattggtgggttcttggtctcactgacttcaagaatgaggccgcggcccctcgcggtgagtgttacagttcttaaaggcggcatgtccagagtttgttctttctgacattcggatgtgttcaaagtttcttcctcctggtgggttcgtagtcttgctggatcacgagtgaagctgcagaccttcgcgggagtgaagctgcagaccttcgcggtgagtgttacagctcttaaggtggtgcgtctggagtcgtttgtttctgccagtgccttcatggtctcactggcttcagaagtgaagctgcagaccttcgtggtaagtgttacagctcataaaggcagtgaggacccaaagagtgagcaacagcaaaatttattgcaaagagcgaaagaacaccgcagtgtggaaggggactcaaagccagaagttcccactactggctcaggcagcctgcttttattctcttatatggccccacccacatcctactgactggtccattttagagagagccaattggtctgttttacagagagctgattggtccgttttgacagggtgctgatcggtgcgtttacaatccctgagctagacacaaaagttctccacctacccactagattagctagatacagagtgtggacacaaa

SEQ ID NO: 1885175 - DNA, 4001 bp, Homo sapiens
tcaagactgcttttgacttattttatggcatgaactcttctataacatgagcattgaaactaaagcaaacattggaagtgttgtagaatcccaaattcaggctcgtgtgcccaatgtgcagctggagccaaacaatgggacatcggtgcttggagatagagaaaggttttttcaatttggctaaagtgagaagccaggagaacaagctctctcaaatctatcttaacaaaaagatgaagcagagagtttttatgcagctggagagtaagggagggggagtttcagggaacccaggggaaaagtctgtcttcagtctcagataacaccttgagcagccagatttctgggtgtcagcagctggttgaaacattcttaaaggcattcatttcttctacaaaaatgttttgtgaccctgaagttatttccctctgcttgacaaagaaatagtacatcagcagtttataattgtattgtggggaaaaagggatattggtcaaagagggagtggttaacatgtgcaagcaagacaagacaggacctgaccagaattttcatgatttcagtcactaaaaatacaggggtactgaaatctaaaggggcctagttgtagaaggattagtaccatatagaaacatttagataaattaaaaagcaaaaccaaaaaataatcagacggaattaacaatgtatttccataaagttacatggtgatatagtgtggccatgtcaccatgcaaatctcaccttgaattgtaataatccctatgtgtcatgggagggacgctatgggagataattgaatcatgggagcggttttctccatactgatctcgtggtagtgaataagtctcacgagatctgatggttttataagtgggagttcccctgcataagctctctcttgcctattgccatgtaagacacgcccttgctcctcctttgccctccaccataattgtgaggcctccccagccatgtggcactgtgagtcagttaaacctcttcctctttataaattacccagtctcagttatgtctttattagcgtgaaaacggactaatacacatgtaacgtccctgcctctcctgcctccccttctacctccttcaccccttctgcctctgccacccctgacacagcaagaccaaccctcctcttcctcctacttttcagcctactcaatgtaaagatgacgaggatgaagacctttgtggtgatccacttctacttaatgaatactatatgtgtgtatgtgtatatgtgtatgtatttatatatgtgtgtgaatatatgcatatatgtgtatgcatgtatatatgtgtgtacacatacacacacacacacaggcacacacatattttactaggcaaagagctttattaacctttgtttcaaactttattcccaggcttcttcagcttaattagctgcaaagagtgaattgtatataagcaaaaactgaaaagagctgcagtgtccaaggggcttaaaaatattagagatctagattttattagatctgtaaacaaaacatttttaaaaagcagtcataacataaaacagcagctctcagtaactacttcaagttttatcttcttcagaagttgacttaattcagtttgcctcattgttggaagcctcatcagaattctccacaagatctagaacttcatcatcctctccagtagcaagtggtgcttttccacccacagattgtttgggcagtgttagccagtctctttgaactagtcagaccatctgcagcactggtttatgatcgatgctgagtagcatttctgtcagctgctttgtctcagcatggcctgtcatggtgaaagtgtttgctgccagcgatgcctgaacttcagggttgttaaagtgaatcactgttccttggtgtgtaaacatattcacctcttcaataccagggatattgtttacccctaatttctttaaggagaactgaaattttttatcctctgctgtcgctaggtttatgatcaggactacccttatgtataaaaccgttaacctctgagccttgaagggacaagataaatgccagctgccagtcttttggttgtaccagaaggcctggacaatgagaaccctttttctggattggttccattgctgttttgtccctgaagtcaagaagtaccttaccaaactgacttttaaagttcttttgatattggccaatgtccctggacattcaaaacctcatgagttcaacaccaaaggtgtcaaaggggcctacttgccctcaaacacagcgtctcagatgctgtgaaccacctttttcctgtgagcagttcctttccgaccagtgtgcacttctgcttgccgtttggtgagtttttggttcatgattgtttctttcatcttatctgagtggaaaaggggctgcgtgggggactagggttggcacttggggagtcccgggtgagaccagctgagattagaagcacacagggaggcaggatggcagctaaaggaatacattttcttttctctagcttaatttattgtaatataatacatacaatatatgtgttaatcaactgtatgtgttattggtaaggcttccagttaacagttaaggctattagcaaagtttttgtggaatcgaaagttatacccagattttttactgcatgggaagtcagcacccataacccccatgttgttcaagggtcaactgtacttaatttgccttttattaggatgaagaatgtttcctgagacccactgtcttggtttggccaggactgaggtgtttcattgctaaatccaagcgggtttcaggacaattggctactctactgggatttcagggaagggacacattgagactaagcctttaaaatcagatagcttgagctatctctagttttagttaataagtggcttttatgattaaagggaactaaaagcttcaaagtgccttaaggtctattcttttttttttctaggtcataaggacctatttatttattttattttacttttagttccaggttacatgttgagaatgtgcaggtttgttacataggtatacgtgtgccatggtggtttgctgcacctatcaacctgtcacctaggttttaagccccgcatgcattaactatttgtcatgatgctctccctcccatcgcgccccctccctgccccggccacaacaggtcccagtgtgtgttattcccctctctgtgtccatgtgttctctttgttcaactcccacttatgagtgagaacatgcggtgtttggttttctgttcctgtgttagtttgccaaggatgatggcttccagcttcatccatgtccctgcaaaggacatgatctcattcctttttattcttaatggattaatgaatgctacatttccaatgctagaactggcttgttttttccttttcttttttttttttctcagctgtgtttttggccaaatgagaatcacagcgtgaagccacaggatcgaaccttttgatttgccctacctacgagaatacagagaaggaatcagcttgtttgattctgtagacgtgtctcaaagcctttgtgcagtttgaatttttaaactgacaagtgaaggagcctgctttgcttgtagtacataagcgacccaactgcaattttgagttgtgagcttatctttggaatgctgaggtatcatggtctggtgggcctttgttaggctaatttctgtcctggtagatgaggctcatgcagtataaagttgaaccataaatctgtgtaaggcagacccatgattattcatttttaagggaggatatttttccctcccacctgtcccccactactgagagtccacatggagataggcaagcattcttgttgactccttgtgctggttggtgggtaatttttctagtgtctctaggacagccagataaaaatacagggtgtccagttaaatttaaatttcagataaacagcaacaaaaatttctaggagaagtatgttccagataat

SEQ ID NO: 1885176 - DNA, 4001 bp, Homo sapiens
atagaaaaaatagatataacatttgcttctaagaagtatgtaaaacttgaaagaatggacattggtgagcagaggagagaaattcaacacggaagaggtagagaaatttggtattgaatatagaagtgtttgtcttagttctctgtattttgtatcacctatttatctccttttatgtgtaatattttataacaaaaatttaaaaaatgaaaatcctaaacattcagaaataaaatacacacagacacagacatacacacacacacacacacacacacacacaccactgtggtcacagtgtgagggcagaagacctgatttcattaagggtaaggttttagtattcatttggactgggctatttgctaccgggggactggaacagtctcaatgagctggagatgtgaggagccaggagaagacacctcacagagcagatgtgccggttagaaagaaataaagttgcttcctggtgacccttggcttcatccagcccattcaaaaaactatcaggccaccaaatgccataaagtgagacatgttagaaacacaaacttatttgtaaaaaggtccatagaagttttgatattttctttctaatgccactgaactgtgctcttaacccagtgaatcattctgcataagtcttagatatgtgaccctatggtcaagaccaggcctcaagaatggtaccccattcagaaaccaagtctattggttgttgttatggaaagcactcagacttccaggctttggcaaatctccctcccagaggatggattctgtccccagatccccagaccctgcctaggtcatagattcataagcagcagctgtatgtgtcatctgtcactccgcatctcctgcttcatgacatgatatggtattagctctcacctgcactgcagctgggtgcttgctgccaaataattcatgatcagatctctctattggcctcgtgttgccaaaaatccaacatacctgtcacctgaggtgggaggatccatgacattgtatactactgaaaatgtcctgcggtgtcagagatgagagaacccaggagggcaggggtcatggcgatctggccctgtgctctccaccagcacctggcacagagtctggcatggagcagaccccgtgagtgttgctgggcagatgggtggatggatgaatggggtcaggctccagtgaatgttgctgggtggatggatggatgggttgtgagtgggtaggtggaaaaccacacagatgatgagtgaatgagatgaaagtaatgaagagagaagctcaaaggcagccgaagccgtcaggtgagtacctgcatcgcctttgtcacccttcgctccgtctcgtccatctcttccaggcagaccattgtgaccggggttcccagggattccagggtgcccttgcctgcaggtgtcctgtgagtttatgttccctgtgcagatttcaatggcaagcagaagccaccagatcctcatggttcagatgacagactgaactgaaagagggaaacagaaacccagaggagaaacctttgttgctggggccctggacacagcctccgttctgtgcagtgggaaatggatgagctgtcccctgccccagacccacacctggacagacttggcagaagactcagggcaggggagcaagctggttattaccaggatgacattgtccttggaaggtaacacttgtgattggaaccactcttcaagctgaacgggcaataaaaaaaagccaagtttaaggtcaggatactcttccgttcatcatttcactttgaagaaatcacttctcttaaccacagaccaatgcttacttatctcacaggactattgtaaaaatcaaattttatcacaatatgcataaaggcacatgacaaatagtgaagcaaacatagcattaccatctgatccagcaattccactgctgtgcatctacacaaaataattgaaagcaaggactagaacagatgtccatgttcgtagttgcattattttccatagcaacccaagggtccctcagtggataaacagatacatgcaatgtggtaggtccatacaatggaatattcttcagccttagaaagaaaagaaattctgacatgtgttacatgaatggacctcgagaacattatgctaagtgaaactagctagtcacaaacagacagacctggataacttcagttataagaggttcctagagccgtcaaactcatataaagaaaaagtaggatgatggttgccagaggtgaagagagaaggaaatgggagttgtttgatgggtacagagtttgggaagattttaaaagagttctggagatgggtggtggtgatggttgcacaacaaagagaatgtacttaatgccactgaactgtgcccttaagatggttaagctggttagttttatgttatatattttttttaccacattaaacaattaaattaaatttttaaaaaagtaaagcattccaaacagtcttactgtaatgagaggtattctttgagtcagggtcttgtttttctaggaggccactgtgaagaagggccacacacacagaaaacatcacctagttcgggagaagtgcattttcaagtcctttcctctgtagacactgcccccaccccaggttatccatgcagtttcccccgcagcaggagctaagacaacgcttgggcagtgctccaaacggagcagcaaacgcaaggcctggaaggaagatgaaacgtggatggctgggcctcctgactcagcaacgctcccactcagggctgtggagcaccctgttactctcccacatggcgcttgtcatggcaggggcttgacacttgtttacataattgtaggatgaagaatctgactccccgcctgactgtatttcctcattattgccttcccagtactcaatattaaacttggaacagcagattgaacaaatacttgttgaatgaaattaatgtatcatcatgggagatgtcttaggatatatatataatttttggagacaaggtcttgctccatcaccaaggctgaagtacagtcatgcaatcacagctcactgtagtctcaacctcccagctcaagtgatcctcctgcctcaacctcccaagcagctgggactacaggcatgcaccaccacacccggctaattttttttttttttttttttgagatgtagtttcactcttgtgacccaggctggagtgccatctctgctcactgcaaactccgcctcccaggttcaagcaattcagcttctcgagtagctgggattacaggcgccatcaccacgcccggctaatttttgtatttttagtagagacggggtttcaccatgttggccaggctggtctcaaactcctgacctcaggtgatctgcccgtcttggcctcccaaagtgctgggattacaggcatgacccaatgccactggccctaatttctcttctcttcttttcttcttttttccttccttccttccctccctccctccctttcgttttctttctcgctttctttttttttttttttttttttgagactgggtctaactctgttgcccaggctggtcttgaattcctgagctcccacctcagtctcccaaagtgctagtattacaggctaaagcccctgcacctgacttttaggatttaaaaaattaaagtaaaacaaaaacgtgggcctagtgcaactggtcagaacccagatcctctcacagtgctgatagccacgtaaatctgcacatctttctggaaaagttaaagagcaaaagacatctatgtctttcaccctgtattcctatccctaaagttcttcctaatgttccaaaactgtgtgccaattgtgtgccattacctgcagcattatctataacaggtgaaaaagtgcatactacatactatgtaacaataggggaaaggtttactatgtgtaatagtatgtaactgctgcaataatcatgaaggtcatgtagaaatatgtgaatgatatat

SEQ ID NO: 1885177 - DNA, 4001 bp, Homo sapiens; identical to SEQ ID NO: 917149

SEQ ID NO: 1885178 - DNA, 4001 bp, Homo sapiens; identical to SEQ ID NO: 917158

SEQ ID NO: 1885179 - DNA, 4001 bp, Homo sapiens; identical to SEQ ID NO: 917162

SEQ ID NO: 1885180 - DNA, 4001 bp, Homo sapiens
aacagtccaacaggaatttaaacaaatggtgctaaagtagccagagagccatatggaaaaatgaatctaacctctgattcataccaaacaaacaataattagagatggatcataggccacataaaaaacagctaaaagcaaagggtttaaaatgaaaatataggagaatatcatcatgacttgggggtaggcaaaggtttcataagataggtcataaaaaagcaataaccataagagaaaaaaatttatatacattagacatcatcaacatttaaaacttctgctcatcaaaagatgcctttgagaaaataggcaagccatacactgagagaacatattcactaagaatgtatctgataacagcctggtatagaaacagctcttacaaaaacaaagaaacaactcaatagaaaaggagcaaaaaatttggacaggcacttcacaaaagaaggtatttgaatgggcaataagcacatgaaaaagtgctcagcatcatgaagttatcagggaaataaaaattaaaatcacaataagatatcattgaatacctacaagaatggctaaaacaagagactgataacatctaacgttggcaagaatgtagagtacctgcaagtttcacacatggttagtgggaatataaaatagtacactttgaaaaatggtgaggtaatttcttataaaactaaacatacacttaccctcccacccagtaattctgatcctagatatttacccatgataacatgttcacaaaaaaacttgtacaagaatgttcatagcagctttatttgcccaaaactgggaatagctcacatgttaatctgcagaaaaatggataaacaaactgtgatagcttcagatactggaactcaattcagcaaaaaaaaaaaaaaaaaaaaaagaagacatgaactgcttatatgtgcaacaacatagatgagtcttaaaacatactgaaagaagccttatacaaaagagtacatgctgtttgattgtatctagataaagttctagaatagataaaactagtctactgtggaaaacacaagaaaaacggggggagtgggatcgactgggaaggagtatgagagaactttctagaaagatagtgtttgtttcatttacacagatgtatgcatttgtcaaaagttagtgaatgtacacttaagatttataaatttcattgtatgtaatttttacatcaaaagaaaaactaaatattaatatctagctagtgatatgcttgctgaaggatttaggagaaattgtactgaggcctgcaatttatttttaaatattccaaaaaaaaaaaaaagattgatagagggagggagagggggaagaagagagacagagcgagagagcaaagcaaataaaatgtttatggtagaatgtaggtgttgggtatgatatatggggtgtttactgtaaaattcaacattgctatatattttataaagttttatgagaaaatgttggggaaaacaaaagtagatttttagaagaaagaaccagttttcaataatctttagatataacactcccctaatacatttcacagaattgttttccaatgggactatttgataataaataactaatttgttcaatccattaaaaaataaatcacgctggtatcttgagtctcttctagtaattgtacaggtataagaaggtggaggggaaaacctgtaggtcaaataaattaggaagtatttattgagcttttactatctgcctacccggtgagatacagagacatccaagacttagttagatcttacctgcaggggccacactctcacttggcagccatgaagaatgaagcaaaggtcaggcctgcgggcaatgcagggtaaggataaggacccacatgctcagcagtaccttcaaggccccaaccctgcttctcccctccactctgatcttctctctttctcccaccacaggtccctctacccagactctacccagagctctgtctgccaggctctcctccccggcaccaggcttgagtattccgcctcactcaccaagcctcagcccccgcccatttcctcagggacatgctccctgacccagagcagagatcacgttctttgttatacagtttcagagtacagtagtcctttattagagagcatttgattcagtttataattacatggtcactgagggatcgtttgggtaatgtgtgtctcccctactagattttcagctccatgagaaaaagaattgtatttcctttttaattctcattatatccccagcaatttagcagcatctgctatgtagaaggttacatatgaaaacacacagaaagcattgggtgtcttttttttccttcaaataggaaagaaaaagaagaagaaaacatggttataaccatatgaagctactgccaggacgatatgttaataaaataaatttaagaaaagatttgttaaaatcaaaagaggaaaaatatttgtagaattataaaatcttatgtggtaagggatattgtgggtcatctggtccacctaagcttaactatactcctgtcaaatgtatgaatatctttagtaaatatcttttgttattttacatttttaaaaataactttttatatcaaaccgttaaaaattcaaaaaaaaatcaattctccatcttcagaaactgattgttatataaagaatttagtataatgcatgattcacagtgatagttataataactactactagtaggagtattaccaggaaacctctaagttgtagtgcatcattttgataagaacatgtgttttggatcatttaaaaaaaggggattaaattataactctgcctctaaatggcaatacatctttgagcaattttcctaatatctccaaacttcagggttttttttctcctggcattcaataaacggtagccaatcatggttataatataacaacaacagtgaggatgaataagaatctgtgtttattctcaaagcgctcacagctcagcagggacatggatacaaactccaattctgcgcagtaaatgcaacaatggaagcacgccaccaagaatgagagagtgactctcaggcctggtctattgggggaggaaagagtttttttaaaaagtaattaaaaggaattctccaggctaattaagcaaaaaaggcatcctgggtggaagaacactgccatgcatgcttgctatgatccagcagagtattccaaggtgcagcatggcaggtgatgggctgaagatcctaggataccttttgtgtcatgataagatacacagatttcattctgcaagtaatgaggagcccgtgaagggttttaaaggggtaaagaaacaatcaggcttatcttttaggaaaatcagctggggagtcatattagaaggggtgagccctggggcaggaagaccagtcaggctagtggatggaagaggtgatgagggtctaaactgggaagagtagtgtgggcctggagaggtgagaatgactcatggcagttcagaaagagtgtcaacaagattgagtgatgaggagtacagagggaagagcgccatccaagatgactcaggaacactcataacttgcttggcagactgagtgggtagacaaacaaatatggttcatggttcagtggagaaaatacagaagggagctgcgggggaggtgggggtgagaggtttagttgtagacataattgaggtctccatacctgcgagccaccaggagaaaggagaagatgtcccataggcacatgggacatcagaagaactgattctgggtcagggaatcccattatggagccaccagttggttcagggaaagactgtgatgtgaaaaggggtaagtgccaagtacagaatgctggagataccagcccatgaggagacatggagacgaatcgtggaacaggcagagaaatctaggcaagaatggggctatggaagccgaaagaataaagtatttcacaaagaaggaactgagcaactatgaaaaaggtg

SEQ ID NO: 1885181 - DNA, 4001 bp, Homo sapiens; identical to SEQ ID NO: 917169

SEQ ID NO: 1885182 - DNA, 4001 bp, Homo sapiens
ttcaaaaattagacaggcatggtgtcacacgcctgaaatcccaactactcgggaggctgaggcaggtgaatcacttgaacctgggaggcggaggttgcagtgagccgagataatgccactgcactccagcctgggtgacagagtaagacttcatctcaaaaaaaaaaaaaaactttgtttctgtgcacaatacctcaaagacttgttaggcctggggaatagacctgcctcatttgcttgtttgaagcctaattgcaggtatttctaatacttcctacagtggatttctctcgtcttccaaatgttgcttttccacagaattggcgtggtaattgctgagaagaaagaacttccttaactgaatcaagcctgcctccacctcttttctaggattgcaggttccttttcagataaaggtctcaaaagggcaggcagggcagaaggtcttctcataaaatccgaggattgtggtcctctgggtgcttcatctgctgcaaccaagtagaaaaaaaggaataaacacaaacacatttcactctgcctccaacaaacctccttcaggtcagatctagtatccaagaagtaacaaaaatagtccatctagcaaatgagccattttctttgagagacaggcaagcaagacacctgggtttgtctagatataattagttatttctcccgtggccagtatgggagtaaacactatgcagtaaacaccagctgaagaacattgtcctgtctatctcaggacagggaatgatagataccttttggtctctacttaaagacagtattgccgggtgcggtggctcatgcatgtagtcccagtactttgagaggccgaggtgggcggatcacttgaggccaggagtttcagaccagcctggccaacatggtgaaatcctgtctctactaaaaatacaaaaattagccaggcatggcggtgggcttctgtaatcccagctgctcaagagactgaggcaggagaattgcttgaacctgggaggcagaggttgcagtgagcagagatcatgccactgcatgtcagcctgggcaacagagcaaaactgtctcaaaaaataaaaatatagacaatattagtattaatattacagatcccattatatttcttttcatgagttttgtgagggtattccccaaagctctgtgttttggtgggggggattacaggtgtgagccaccatactggccccctcccccaataaatataaactgggtacttattaatacttaatatacatatgtttcttttcttttcttttttttttttttttgagatggagtctcactcttttgcccaggctggagtgcagtggcacgatttcggctcactgcaacctccgtctcctgggttcaagcgattatcctgcctcagcctcccgagtagcagagactacgggtgtgtgccaccacatccggctaattttttgtatttttagtagagatggggtttcactgtgttagccaggatgttctcgatctcctgacctcatgatccgcctccctcggcctcccagagtgctgggattacaggtatgagccaacttctttttttttttttctttttaatagagacagggtctcactgtgttacccaggctgaagtgcagtggtgcaatcacgcctcactgcagcctcaacctccagggctcaagcagtcctcgcacgtagctgggaccacagttgtgcaccaccatgcctggctactgtgtgcttttttgttttgttttgttttgtttttgtagagatggagtctcattatgttgcccaggctggtctcaaactcctgggctcaaagaagcctcccacctcagcctcccaaagttctgggattagaggcatgagccaccatgcccagccccaccccagtaaatataaactgggtccttccttaataccttaaagacagcaattttcgacatattcaagacagttgttccttctgctttggaatgctgagagcttctttcctcataattgtgttctagaagttctgcagggccttgctatgggaaccagagaaagcagaatggccagggccatccaattgtctccttcccagagatcaggatgaagggctgtgttaaaagatctctctcatcttcagctggaaacaaatagtactgaaaagaatgatctggactgtttctcttgtcttttaaaagtgtgaggcctaaagaggggagagagtatctttgtgctgtgttatgcctgacacattgtcggtgaccaacagatgtacttggccatttatatggggataacatacatgtgatcttagccaaaaggccctccaaaccttccttcagcagccctttagattgggctcctttgtcagtcatctgcttgagtatcagctatgctgaaggaaaagacatagggaatggtggttggaggtggtggcagccagagataaatgtatctctgaggcatggtttcatctggtcagtaagatgtgtgcctttggatctgcttcgggctaaatatcttaggggtttggtgggctttagaagtgtgtgtaaatgggaggcgggaaagtgaggccggagactcatcatcactgctctccaccctccagaggggactgcggaaagcgcagccagccatcggcctgttgacaaggcactggcagtcactgaaaaattcttttcctttctctgtcaattagcaaatgatggtcttctactgataaagtttaggaataaaggagaaagaggaagatggaatcctggaccactttcagcctgcacttgagtattccttatgtgttctcctgactccctggtgccactaccccctgccaccgtcggccctgtggcagtggggcccttccccccgccagcctcggcaccgcttcagtgtggctggtgcctccaccaccattggtactgtgtcagcattgctggtgcacctgccaccgtcggtccctcatcagcattgcccatgcccccaccaccgtcagtccctcatcagcattgccggtgcccccctaccaccgttggtcccacatcagcgtggccggtgcctccaccaccgttggccccacgtcagcgtggccagtgctgcgacccagttgctggctggaggatggctggccactgttggagctgctgatctttccaaggccttgtcacagtggccatagatctcaaggtgcacccaggacactcaggaaaccagcctcttggttaggcagctgaggcctcacttttctgcatccatgtactcctttggtatctggatcttccttttaaactttgactaacacgtgtggcagaaccaatcaccaccacagcctgcaagtgcactgaggacctgtcaggcccaggggaggtgcagcacgctcatgggggcagcccagcactgcccaggtggctggagcgagtcacggggagagcagaaagctttgggcgtcctggctgactggcctcttagtgagaatacagaacagctcctggcagcactttcccttccagctttcctcaagacaggccatgccaggcgaagaggaagggcaaggtggctccctccgggtatggagatggggtgagcctggggacagtggagcctctgagcagaggactccagaggctcagggagcagcagagccgcccaagatgatagacaggagctgaaggccagaggggaccacgcctggagtcttggcgggaggagcatggacacaggaccagggagggagccccagaggcagtgccgaccatcctgctaaacacacggaacggcctccccattctttcccctaaagagtaggggcttgggccaggcacggtggctcacgcctgtaatcctagcactttgggaggccgaggcaggtggatcacctgaggtcaggagtttgagaccagcctggacaacatggtgaaaccccttctctactaaaaatacaaaaattagctgggcgtggtggcagatgcctgtagtcccagcaactcaggaggctgaggcaggagaatcacttg

SEQ ID NO: 1885183 - DNA, 4001 bp, Homo sapiens
gaggccaaggtgaaacctgcgttttccaggtctgcccactcagttttggaaggactctcaataaaaccggcctcacaccccaagcatcacccctcctgtccttagtaagtacactctggctggaatctagggtcccagcatctagcccttgggacttcacataaattcatcaagtatcttcctccactcaaaaatctcttacagaatctttgacattttaagcttcattactgcaaagtggatatagttcattctcagcttcaggattccagaagcatacataccaggtcagaatggagaggcatcacgctttccttcagcaagcttcaggggagacaggatttagggtgggctacacatataccagttgtaggatgttttgaactatattcttgcaatcacagacaggttgtcccagagaaaataatctggctctaacttctcttgttatcagtgaaaagcaaaaattacttagtgcaggtatgcttaaaggaagaaaaaggcaagagaaaagtgagaggtaaaaattattaccattttaattccatgattctcagcaatgaaggagcatgattgaaatcccatgtgcccagtcatatctgtaaatgagagtatgatttttgaagactgtattcaattgtttcaacttgagcaattgcaagtaagacttaggactgtgtttaccagttactgttatttactattactttctaaatgtgacctgacttgaaacctttatagatgcaatttttatccatcacagaacaagctctaaagaggagagcagcttcaactttttcaagtattttttttaaaaggatttaactttgaccaacaccaaacttgcatcttgttaaggtaactaataactgactgctataacaatatttagaattttgtttaacagcaactgtcaaaaaaacaagttaaaatagcccaggagatggatggcgattaactctgcgttctttttagactgtgttattaattagctctctagactcaaataggttacatcctctgagcagtaaattgcatgccatttgcaagctctgtggatgaaatttacatgtggcctaaatgctatccacattgttttgttaagtagcattttatctctctggactggtcccttgcctcctcccccagccccagtggaaagttttattcacttttcttgcgggaagggaaagtcgcatgtagtttggtcatttggcgccatcttcttttttattgttaaatccactaaaggcagtcatgcctggcagtaccaggcgggctccttccggggttctggtcggctaagcattcagagttctttgctttttatttactagaaatgttttcagcttctgtctttgctttaagatctgattaaaaggaaccttaaaaaaggaacatagattttggtgtatgtttttcctctctacttctcttccctgtgccccccaaacccaatcaccaacttcccccatccccagcaaacacgggcttttttgtgtatttatttaaaagcattttaggaagcaccgtaataccgcacagcttggaggttaagatagaattggatgtttccctcaccatcagttgatggaatcatcagtgttccggttctatttatcttcatgatttgagaatgtttctgaacagctgcccttccgaggatgctggtatttagacagaccttcctgtcatttatctgactcacaggcacaactcttttgaaagaattaatatcaaacttacatatgaaaatctaccatttagaaatggattctttttcagtacctacttttcaattcaaccggggagatcccatctattttaaaaaatcattaatcacatacttctgacattttccctttcagtttcctcagggggaaaaaagttatttgaataacaaacaaacaaacaaaaacccctcatcgcaaatagctgtcagcctcctatgtgaacaaaagcgctctctcacactgagacctaccgtgttttgtttagttagaggcagcagggtggtagggacactatgcagaaaggcttgggttaatgagcactttctggattgagtgtctctcctgattaacccttggattacttgctttgagttgctaaccctctctcactgcccactcaagaatttcccacatggtagcctcatccatagatgcccttccctagatgcactgatggtagacagcataaaaatgtgtaagcactgtagctttccaatgaactgaaacaaaaagcttaagcattactttttatttccttgatctaaagaacatgttttgggggatattttcttaatcaatatctaagttatctagagttataaatactataaataaattagttacaaactaatttttagacacaagtcttttgttcaaaccaactcttacatagaaactctaaaaatttgggggggaaggggacagttggggatcagaatcactccccattatctctctgttggtgctccccaaaggatcttcagggaacgacgtttaaaaaccattttgtatcatgaaatgggacccgaaagacattctttctagtgactttgtgttagattgagtcatatgaaattgccactgtgtgacccattttgacctaaaaaaaaaaccaaaaaacaaaaaacaaaaaaccagcactagggtaccagagtatttttagtgtaatcactgtacgtgataagaaaatggagaaatgagaaagcttgaaacttagactataagctcctcataagctaatagcgacttcctcccttcttccgcagtcacctggcaagtcccttctatgtgctgctggttctagggatacagagataaaaggcgtagtcactgcctccaaatcatcacagtgcaaaggacaaataaatacagaaggacccatgggatgaagaaacagcccagggtggtgggaacacagagcgagagtttctaggatcttgaaagccatgttgcacggagctcccggtccctgagttttcagactgatctttctgtggactgtgcctaagtaataacagtttcagaacgtagaaactcagtgtacatccttcatagccaggatggatatgatagcctggaagtgaacagtaaatccagtgatttgttttcttcactcattctttcattttaagaaagtgcttagaatccacaagttgtgcttaatgccagcagacgcattacatatgccagccctgccccttagtcacaattactccccacactgacctcccattgcatttaaaaattgtcgctttattgagacatagttcagctctcataaagttcacatttgttttttttgtttttttttttttgtttgtttttttgagacagtcttgctcagtcacccaggctggagtgcagtggcatgatctcggctcactgcaagctccgcctcccgggttcacgccattccccggcctcagcctccctagtagctgagactacaggcacccgccatcacgcccggttaatttttttgaacttttagtagagacggggtttcaccatgttagccaggatggtcttgatctcctgaccttatgatccacccgcctcaccctcccaaagtgctgggattacaggtgtgagctaccgcctccagccataaagttcacatttttaaaggacacacgtcagtggttttcagtctcttcacaaagttgtgtaatgatcatcactatctaattctagaacattttccttaccctaaaagaaaccccatacccattggggttcactccctatgcacccctcttcctttctcctgacaaccactaatctactttctaaatctatagatttgtctgttcgggacatttcctataaatgggactatataaatatgcccttttatctctggcttccttcactctgcataatgttttcaaggtttgtccatgttgtagcatgcattagtacttcattcctttttctggcccagtaatgttcaattgtaggaatataccccattatccattccaatga

SEQ ID NO: 1885184 - DNA, 4001 bp, Homo sapiens; identical to SEQ ID NO: 917171

SEQ ID NO: 1885185 - DNA, 4001 bp, Homo sapiens
ctctctctctcaggctgcaggtgcaccaggccgtccactcactctctctctcgggctgcaggtacaccaggccgtccactctctctctctctctctctctcgggctgcaggtgcaccaggccgtccactctctctctctctctcaggctgtaggtgcaccaggccgtccactctctctctttctcgggctgcaggtgcaccaggccgtccactctctctctttctcgggctgcaggtgcaccaggccgtccagggagcccgggcctgccgggtatgccaggccgcagcgtcagcatcggctacctcctggtgaagcacagccagacggaccaggagcccatgtgcccagtgggcatgaacaaactctggagtggatacagcctgctgtacttcgagggccaggagaaggcgcacaaccaggacctgggtaggtacctcccacccggcccccgttgcctgctcagggctggcccggaagtggccaagatcaaagggccacagcgagactcccaaaccctccacggctggtaagttcccctgacggaagggtccatctacattcctcgagtgcagaaagattaaaacggcctttgaagcagaagccttacaaagcccttaaacctcaggaccttaacacagggacctgccttttaacctggtattgacttccgcaggctcccatgtgacccgtctgacccccgacccctctccagtggagaccaccaattacttcacctccttcttgtttttgacccaagttctgtagacttggagtcaggcaggggccatgaggggctggggttcatgtaagactctcccatacagccccccgaggaaaatggacccatggacacgtgtgcatgctcttatttaaggaagcctttgaaaggcattaacgcgacttcgaatacagaaaatgcaatacacacaaattacaagtggaggtagcttagtctgaggtcctctttgagggggtgacgggaagggtctctgggatactggctgtgttctgcctcctcggtgcaggttacatcaggcgttctgcccccgggaagcatgttgctggctcatggtgccttcacattcctgcctgtgcgccccgcctccacaatgagtttctaaagaacaacggggcaaaggccgccaaggataagggccaaaaatagatctaggaacagggccaaggaggcagcctagcaccgggcatgtttgctaaaggtggctgcacttctgggtctgagcttttcagcaatccatgtgaagagggaaacctgcttagctgcagcattcgttgtggccaggagataaaggctatcttagtctccagaagcaataaagctacatggaagggagaagggccaggactccttctggggtggctccttggggtcaaagagcgaccccttggaggccatcagagttttcttggggccagtgctgttaagaccccactaaggtaaggctcacccaaaatgctattccatgaagacgccactccctggtgatccaacttggcccagtatgtgtgagaacttgtagaagaacagagctgttccaaaatgccagtggagtctgatcaaaaagagaaaaagaaagaaattgggaagccttagcctggccctccagtaggtggctaaactccaccaggtgccctggggcgagtccgtgacacacagcctcctgggcctggctggggctggcaggtgcgtcttctagccacactgcactgtgatctcatgacccctccttccacagggctggcgggctcctgcctggcgcggttcagcaccatgcccttcctgtactgcaaccctggtgatgtctgctactatgccagccggaacgacaagtcctactggctctctaccactgcgccgctgcccatgatgcccgtggccgaggacgagatcaagccctacatcagccgctgttctgtgtgtgaggccccggccatcgccatcgcggtccacagtcaggatgtctccatcccacactgcccagctgggtggcggagtttgtggatcggatattccttcctcatggtatgtggtatttgcccagttcccctccccaaccacaccctgctggggacacagcaagaacagctgcctttgtgagaagaatcagacacggcagtccagggtgtgcactgcacaagggtagttggcccaggaagcgagcgagagctggaacacagcttacacttggctaactgagccacatgctgggcacagggcttcctccacccagaaagggctcattaatttgccaccaggcctttgtaaggagtgtaaccaggacgaacttgcctgttatccgtcttactaggtacaacaccaacaccaaaggtgcagctgctttgggtttaccagaagtctaaatatatgggagacttttctctagaatcctgatcttatttagaatctatctggaacctagaataccctgaagaaatacctattaactggctggcttaaaatggatatatattcgtgaggaaaattctggaatacctttgggtataaaatagagagcctgtggatactttgaaagccaggagaaggtgcacaaccaggacctgggaaggcaccgcccacccttccggatcgcctttgggtataaaatagagaaccctcagctttggccagattaggtttagcttaacctccaggggagagaccacagcaccatagtgtctcttgcaatattgcctattaaagcagaggctcctcaacttggaatagggtcccgtcccgataaattcattgtaagatgaagatactataagttgaaagtgcgttttcaatttatgatgggtttatctggatgtaaccccaccaaaaatcaaatagtgaattgaatacatattgcttttgcaccatcgaaaactcaaaaatcctaagtctaaccatggtaaatcagggaccatctgtatactattgtagggagaaaagaaagtctcactgaggacagtgggtcttccagtgagtttatttatatgcattataactgtcataactccagctatatggattggatgcccagcatgttaaatatttcataaattatatatatatatatatatatatatacacacacacacacacacacacacacaacataaaatataaattacatagtgattgctaatctttcaaaacaacaggaaaaaaaatccggattctaggaaaggaaggaaaagataaacaagtattggcattttaataggtatcgttgctatgataagttggagcaacaggatgctaaatcctgggcagggacaggcacaatttctacctttccagaagcttatcatggaaggtgactttggagcaaccttcttttgtttcacagtgaccttcagggtgcccctgtgtcaggaagtaagctttggttgctcctgtttttttcactcccgttgttaaattcaaaataaatgagcctctcccttgtgaagggcatgattacacagtatccagaaaggtcaggcatcccctgttccattagcatcaggtttcaaatgactgtcacgagataagcagacattatcctctgcacacgtaactctctgcttacataaatggctgacagccccagcaagcctggaacttgacatccccaaaaggcatgggttgagacggctcctgggtcaggacagatgggccagaagtaccttgacttctgagaacagaaagtccccattgtccctgacaatggataagtgagcagacacatctgtgtactggagatgtgccccctccagatgtgccctgactgccgtctaggaggcaggacctaaaccaagacagctgtgtgcctcgtctgcactttaaatactctttgatcccttctgtgtggtgacaagcatatggtaccactagggctgctggcatctcagcataataagagctgactttggagaggagaggacagcttggctgagagcaactgccccaccgtccccagtgggtacgcagaaggcgagagcagtgctgaggcta

SEQ ID NO: 1885186 - DNA, 4001 bp, Homo sapiens
aacctgggaggtgggggtggcaatgagctgagattgtgcaactgcactctagcctgggtgacagagtgagactccatctcaaaaaaggtcgaaactgtatttatcatgaacactaaaatatgtacacattttagttaacatgcattaaactgtaacaagtcttctggcaattgtagctttcatgagatgcttcccaaactgtattagatagatgctaaaattataaattaaaattttgggtcagactttgccataaacctggactcaatttagcacccccccaaaaaaagtcagattattcaattaatgcggttggaaaacctaacaagttacctagaaaaaaattaattggattattaacatgtctttcaccaaagtaaattccaggtacagcatatattttcatatgaaaaccctgcataaaccaagttgaaatctcagtaaggagaaaaaattcttgtgaaaggagaaatgaatgaaaggagaaaaaaaggtctacatgccaaacaaagctaataacactaatgtcgtttttataagcaattgataaaatgaaccaagtagacaaatgaggaaggacaattgataggaaatataaagatagccaataaatatgccaaacaaatgtgcaactcactgataatcaaaaaacataaattaagacagttggatattatttttcgcccataaaattatcagaattcataattcctattgatggtatgggaaggggaaatgggcaaattcataccctgcttgtggaagtataaatgaattcagttcttttgacgtccatttgggaacatgccgtaattgcaaaaagtacagagccttagactagcaaatctattctagggaagaatattctaaagagacaaagaagcaattatgtataaacaagggtactcattgtaaagttgtttatattagttaaaaactgaaaaaaatctaaaggtatacaaacaaataaacatttaaatcaaacaattcccagtttgtaaattaatttgaaacgtctgtatttcaacaatttctttcttcttcttttagacctagctcctggaggtggggacgattggatctatgatttgggcatcaaatattcgtttacaattgaacttcgagatacgggcacatacggattcttgctgccggagcgttacatcaaacccacctgtagagaagcttttgccgctgtctctaaaatagcttggcatgtcattaggaatgtttaatgcccctgattttatcattctgcttccgtattttaatttactgattccagcaagaccaaatcattgtatcaaattatttttaagttttatccgtagttttgataaaagattttcctattccttggttctgtcagagaacctaataagtgctactttgccattaaggcagactagggttcatgtctttttaccctttaaaaaaaattgtaaaagtctagttacctactttttctttgattttcgacgtttgactagccatctcaagcaagtttcgacgtttgactagccatctcaagcaagtttaatcaatgatcatctcacgctgatcattggatcctactcaacaaaaggaagggtggtcagaagtacattaaagatttctgctccaaattttcaataaatttctgcttgtgcctttagaaatacaaccatgcattccgtttgctccacggtaattaggcgatggcccagaaaggggaggggtgtcaaaaacgacaaacatagcctctcattccagctcagctgctcaataaacactgttgaacgaatgaatgagtggctctaggtactgtcaacaaatgccgcattttgcgcatttacaacagctgtttatggtaaggaattatgtaataaaaagagaaaactcacttaaattcacttttaattgggaattttagttctcccgggctcccagtttcctttcctaggatctctcacagagcacagattcgatttccaagtcccgccgcactcttaccgctcgcatggaaccttacgcctagagggcgtgtccacgaagggtggtgtctgcgcactgacgactaatctgacggccggaagctgcctgggtctacagaggaacagggcaaacctctgacttccggcggcattttgaggcggtcctcctagcggcctggtagtgtttttgttgccttttcttaatctacaatctcttcgttatttttcttcctgcgacccagtttcgcttgaccctggagaggcggcgggcgggttggttctgcttctcagccatcccgggggctcctcgctagccaagagccggttcccgggagccgcgcgcgcatcgctttctcctcgtcgtcgtcctcctgggtccaggcgcggggacagagtcgcctcccccgctcctcggagcggcggcggcggtggtgcctccggactgcacttgcgaagggagcttggggaggaagtaagcgttctgtgaattggtgtgggtatctggggaaggcattgagcggacccgtaatgcggaggcccgggttacccccccccgtctttgcttgagtcactgggattttgagctttccttgagcatcccacccttaactctgcaatagccccctgtgctcaggcgtaatttctcactctgattatgattctggcatttgtctaagggcgataagtagactcagacaataggctgtacccctcgttaccatttgatgtaagcacgggaacccttgtatggtgttcgtatttgtgtgcgatggaagggtgcagcaatttgggcttaaatttagaatcttcctctatactcattccagatctgttagagaaaaacatcttacttgtgattggtcttgtttttttttttttccctcagcagtgataacgatttaggtcctgggaattgagtgctactttatcttcacaagccttaggtaggtagttttggcaactgtcagaaacgggggaaagtggaatagaaagaagagagtctgtttggcggcattatctctctgtaataggctaacgcaatttatgtggtttgaaaattatttagagttgataatacttgaattatgttggtaagatgttgtttgtgaagggtagtcttaaggtatttggttatactatggggctttcaggtaattcgaactactttgaaaattatgggagtatgaagtctcttaagatttttggatttttaaagtagttttaaaaatttggaaaacatctttacacctcaagttttcgaagtccgcgataccgttggagaataaatacttatgcagttcagtctatgggtatatggtgccagttagcggggtctagttctgtaacatttgaaattactggctttagtacaatatattggagcgttttgtgaatacaatctatagattttcaaataatttttattttcttaatgaactatttagattataacagatgacagtttcaactagagactagcaaagttgatgcaagcttgtaacaattgcggctttaaaaatagttgcactctgaaactaaggctttcactctgtgcatctggtaggattcagttttatcaaatgtatgcctcttactggcttcctgattactggtcattctaaatgaacattgcatattttgagatttgcaagcttatgtgattttcatatttgtaatatgaatttaacatactaaaaatccagcaagtggatggtatcttaacatctttacaaattattaaaattgtaatatcatcagtatttataatatgcattggcatttacatagaggaaacacattgtttaacttaaatttacttagagagttggttttcagtggatgatagtcttcctcacctcctcatctctcccaactccatctcatatagaggtggagctatttctccagctgttagtagtagttgaagcattaactgctgttgatatagaaagagtcttttattcttttttttttgtatttttgtatgatgcagttctttttacttcactttagagtagctaccagcat

SEQ ID NO: 1885187 - DNA, 4001 bp, Homo sapiens
gaaacatcatcctacggtcctgttcccacggaggtgacaggggcccagtgtcagaaggagccttgtgaggatcagtaaacctattacagcttgattctcctctttcactggtaatctggtggtccagaggattccctgggcctcttgggcctcttcctcctccccctggagggaaaggtgagagtctgagtggaccctccgacaaagttggaggatagagaaaagctctcgtttcagatgaaggccgacccaatggtgagggaccatatgaggaatgctctctgccaaatgctgtgtttggaacatcaagtgcataaggatctttttctaaaaatttaattttaaagtctgtttcaattaatttttgtctgttgtgagcattttctttccttaaatcattgaggtttctttcagcggtctgtgctgccaaacaattatcatgtgcttttttctcatggtatataatcttcccttgataaaaatgaatagttctctcaagttcttcttcaagatatttggctcgctttctgtaggtctccagctcctcagtggcatggctgatcatttcgtctactttagaaaatttctctttctctagccggttattttcctctactattaatttcctgtagagtttcatttcattttcttgatataattcagtcattaccttaagtttctgttgaagcttctgattctcactttcaaaatatgtgttttctgactgcaaagatgcttgttccgtctgaagatttttaatatgctctctaagctcttccttggttttatcaacttcagataactgaatatagatttggtttcttactccttctaaggttgttaaagaagcatttaacttagcagtatgaatcagtttcttcaaagctccttttggaggattatctaagtaagcaccatcttccgattcactgttcatttctaattccaagttttcatcatctgttatgtcttcttccagcatagcagcccgatctttgatctttagcaagcgttcagtcagagtctcgatgtgattttctttatcatttagaacttgttctgcgtgtactttggagtcttcaaatgttattttctgtttattaagttcactcacttgttctttccatacttcagcttcttgcaaaagctgtttctggctttcctgaagttgagaattttcattcaaagcatcttgtattgctatcttcatttgttcttcattcatttgaaatctcttgaaggtcattttggcttcagctagcagtgattttagggattttgactcatcttctagagactgtatccttttggaaatatccgccatcacctcatcttgttcagaatgtttagatttatcttcttttaactccttttctagacagagtatttcatgctccagttcagaattggacctgttcagcttttcacagtttgcctccaaactttgtgcttctgttgcctccttctcaaagctggcatcctctaaaggtgactctgcttcatagccttcatactctttttgaacaaggctaaatttttcaagtagtctacatttttcttcaattagtccagaaagcgctacagcaagctctttctctcttcccacataaagccgactcctaaccgatctaaaacttctccacaagaaaaagggaacagcaacaaatccaaggacagctgcacatatcaccaattcccatggaaatccataaggattcgaatctggtctcctgccttcaggcagtgctgccacaaccctgcgtggctcctccaggaccagcccccagtaaggctgaggggtagccccgggctcctccatagcgccaaggctgctgtggcggtggccgcagtaacccaggcctgtcggggccacagttaatggcgaagaacactcagccttcagttaggaacagaatccgcacctggcaaccggagcggaccactgaggagccggctgcggggggagctgggggacgcgagaacccacaggccttacaggcccatagaaaagatactgtaaaaatatagtataaaatgttttttaaaagatctgcttgtatagagtacttaccataaataaatggagcttgcaagattggaaattgctgtgggtgagttagtaagtggtgagtgaatgtgaaggcctagggcactactatacactactgcagacttcacaagcactgcacgcttaagctacactaattaattaaagttgttttcttcaataataaattaaccttagcttactgtaactttttaactttataaatgtttaaacttttttaatcttttttacttttttgtaataacacttcacttacaacacaaacatattgtacagctgtacaaaaatgtcttctttgtatccttattttataagcttttttctattaaatttttcttgtttttacgttttaatagttttttgttaaaaaaccaagacatagacacacacattagcctcagcctacacagggtcaggatcatcaatatcactgtcttccatctccacatcttgtcccactggagggtcttcaggggcaataacaggcatggagctgtcacctcctgtgataacaatgcccttttttggacacctcctgaaggacctgcctgaggctgttttacggttaacttctaacagtacactctaaaataatgacaaaaattatagtacagtttggtccaatgatagtgggttatcagaacttactaacatttagtgtcactaaagttggtataaaaccctccactgctaaatttaaatggtttacagtttcttggtttttttttttttaaataggctgggtgcggtgactcacgattgtaatcccagcactttgggaggctgaggcagccagatcacttgaggtcaggatttcaagaccagcctggccaatatactgaaaccacaactctattaaaaacacaaaattagtcaggcatggtggtgcacacctgtagtcccagctactcagggggctgaggcaggagaatcacttggaccaggaggcagaggttacactgagccaagatggcaccacagcattccagcctgggtgatagagtgagaccccatcttaaaaaaagaataatatagtatatacataaatatcaattcctcattcatggggaatcttgttgatcattctggctgcttgatattgatgaggggcatcctgggcagcctcataccatgggtgactctgtggccccccaggaatcaaaggttaatctaatactatccttttcttctgaaacaatctttctttttccagtcccctacttccaccaaagacaaatctcagcaagacaaacctacctgcgaaataagctgcaatcccataaacgtggcttgattaccccacaaagtgcagcaagaattgctgtccacataggctctcctaaattggccttgctggaacctctcacaaggccatttcagtcaaagacctgggaaaatagccagttcatccatctgtgtcgcagtataaaataaaatagattcttattgaacttatgcaagcaaacacattgccatgaattaagaatattcacaaataatttacaaattctggataaattaggcatagagagaactatgcctcaaattctgtttgaggaaagcatactgtattcaatatacttaaagtatactcagaggcaataaaaagctccaaagaaaaaaattctccagactctgaaaaacaaaacaaaaagaatcagcaatatttcaaacaaaaaaaccataaaaaattatttcagtctccattaattcagtccatgcaatcaacttctggtatgcttcatattgagttagcaatctttatgaacatatcagcatttcaattagtgccctggaagttttctctctaatccaatggcacagtctacaaagttataagaaacctgcatttgagaggttgaatttttcataaacttccccaaagaagaaagccctggactgtagctgattataagtcactttttgagaagga

SEQ ID NO: 1885188 - DNA, 4001 bp, Homo sapiens
gaaggcattgacccatccattttatccaaagaaggcatattaaaacttctgagttctgatggtccaggcagtctatcagaattagaataaaatctgtcttccctttgtggaggaagagctgaatcaggatatgattgtcctggtggaggaaacatcatcctatggtcctgttcccatggagatgacagggacccagtgtcagaaggagctctgtgaggatcagttaacctatcacagcttggttctcctctttcattggtaatctgatggtccagaggattctctcggccgcttgggcttcttcctcctcccgctggaagcacaggtgagagtctgagtggatcctccaacaaagtttgaggagagagaagtcctcgtttcagatgaaggccgacccaatggtgagggaccatatggggaatgctctctgccagatgctgtatttgaaacatcaagtgcattaggatctttttctaaaacttcaaatttaaactctgtttcagttaatttttgtttgttgtgagcattttctttccttaaatcattgaggtttctttcagcagtccgagctgccaaccaattatcatgtccttttttctcgtaggaaataacctgcttttgataaaaatgaacagttctctccaattcttcttcaagatctttggctagctttctataggtctccagctcttcagtggcatggctgatcttttcttccactttagaaagcttctcttcttcctctatccagtaattttcctctattgtcaatttcctgtggagtgtcatttcattttcttgatataattcagtcattattttaagtttctgttgaagcttctgattctcactttcaaaatatatgttttctgactgcaaagatgcttgttgagtctgaagatttttaatatgctctgtaagctcttcctttgttttgtccacttcagataactgaataataatgtggtttctttctccttctaaggtttttaaagaaacatttaacttagcagcatgaatcagtttcttcaaagctccttttggaggatcatctaaataagcaccattttccgattgactgttcacttctaattccaagttatcatcatccgttgtgtcttcttcaagcacagcagcctgatcgttcatcattggcaagtgtccagtcagggtcttgatgtgattttatcatttagaacttgttctgcatgtactttggagtcttcaaatgttattttctgtttattaagttcactcacttgttctttccatacttcagcttcttgcaaaagctgtttctggctttcgtgaagttgagaatttttattcaaagcatcttttattgctattgcccatcgttcttcagtcgcttgaaaaatcttgcagatgattttggcttcagctatttgtgatttgagggattttgactcatcttctagagattgtatccttttagaaatatccgccatcaattcatcttgttgagaatgtttagatttcccttaactctttttctagacagagggtttcatcctcaagttcagaattggacctgttcagcttttcacaggttgcctccaaacttcgtgcttctgctaccgccttctcaaagctggcatcctctaaagatgactctacttcatagccttcatactctttttgaataaggctaaatttttcaagtagtttacatttttcttcaattagtccagaaagcgtttcaccaagttttttctctcttcccacataaagccgactcctaaccgatctaaaacttctccacaaaaaaaggagaacaacaaaaaatccaacaacagctgcacataccaccagttcccatggaaaaccataaggattcgaatctgccgtcatactctcaggtagtgctgccacaactctgcgtagctcctccaggaccagccccaggtagggctgaggggtagcaccgggctcctccatagcgcgaaggctgctctggcggtcaccacagtaacactggccacaacaaacggtggagaacacgcagccttgggtctggaacccgaatccgcacgcggcaaccaaccggagcggaccactgcggagccggctgcggggggagctggggaacgcgggcacccacaggcttcacaggcccatactgcatccccaaccctccctggcccccttgttacactttacatcctgaggcagcgctggtcccagcccgacccgcttcagttctggcagttttcacatcacatattttgaagcactttttggtgaatacacttttgaaattgctgtcttcttcatggattaaacctttgatcattatataatctctctgtttctggtaattttctttgctttatctgatatacatacaggcactgttgctttcctttcattaatgtttgtgtaatgtatcttttttcatccttttaatttggcctcccctgtattggtaaatttcaagtttcttgtacacagcatacaagaaacatataagaaagggtcatacttttaaatacactcttctattatctgtcccttggtagaccattcataattaaactaattgttgatactttagtgcataagcctgacattttttgttttctgtatcaattcttgtttctctgcttatttttcatgacttcctgtgggtcacttgaacatttgttttagaattccatgttgttattcatagtgtttatagtgtatcttctttttaacagtttttttggttgcattttatagcttagtggttgcattttattattattattattattattattattatactttaagttttagggtacatgtgcacaacgtgcaggtttgttacatatgtatacacgtgccatgttggtgtgctacacccattaactcgtcatttagcattaggtatatctcctaatgttattcctcccccctccccccatgccacaacagtccccggtgtgtgatgttccccttcctgtgtccatgtattctcattgttcaattcccacccatgagtgagaacatgcggtgtttggtttttttgtccttgcgatagtttgctgagaatgatggtttccaacttcatccatgtccatacaaaggacatgaagtcatccttttttatggctgcaaagtattccatggtgtatatgtgccacattttcttaatccagtctatcattgatggacatttgggttggttccaagtctttgctattgtgaatagtgccgcaataaacatacatgtgcatgtgtctttatagcagcatgatttatagtcctttgggtatatacccagtaatgggatggttgggtcaaatggtatttctagttctagatccctgaggaatcgccacactgacttccacaatggttgaactagtttacagtcccaccaacagtgtaaaagtgttcctatttctccacatcctctccagcacctgttgtttcctgactttttaatgatcattctaactggtgtgagatggtatctcattgtggtttcgatttgcatttctctgatggccagtgatgatgagcattttttcatgtgttttttggctgcataaatgtcttcttttgagaagtgtctgttcatatcctttgcccactttttgatggggttgtttgtttttttcttgtaaatttgtttgagttcattgtagattctggatattagccctttgtcagatgagtagattgcaaaaattttctcccattctgtaggttgcctgttcactctgatggtggtttcttttgctgtgcagaagctctttagcttaattagatcccatttgtcgattttgcttttgttgccattgcttttggtgttttagacatgaagtccttgcctatgcctgtgtcctgaatggtattgcctaggttttcttctatggtttttatggttttaggtctaatgtttaagtctttaatccatcttgaattaatttttgtataaggtgtaaggaagggatccagttttagctttctacatatggctagccagtttt

SEQ ID NO: 1885189 - DNA, 4001 bp, Homo sapiens
gagttagaaactctgagggagaacctaggaaatcctataagggattacgtttaagacttaaccctagactgcattgccatcaatcatagcgcaagaaaactgtttaattttcaagtattcacttgaccaggtaaatggctgcacattaaatgacatgccaagcagattgggactgtgtgccaattagtgtgattcttattccagtgaattaatagtcattcctttgtaaggacatagagcattagaaagaaaagaaagtggcccttcagagaataccaataacaaataccaaaaaattcagaaatatatatttggaaatacaatttattttctgagcttccattatactagattagtcatatacttcagaatatttatgggtcttctctctctctcttcttttatccccctttacttttcttgcaacttctggaacatagcccatcagtgaacagtggacaccatgatttgctgtagctcaaacgtgatggagccttgaaaggatcaattgagcaaaagcaggaaaccctgaagttggaaaaaggccctataagcagacagacctagatttcaatccagaattcaccttagcatcatgagcctcaatgagttggaggcgatgaacataggtaacagtgtacagaacactagaactgttaagcaaattttaattctcgacaccaagtttacacactgtcataatattaactctaaaaacaccaaagatcaggaaacacatgccaggctccttatacacagtgttgtaaatcctgctaactacttaattcagtatgtattagttattaaatgatgcacaaatattcagcaggattaatgtttccaagttttcccagttgtccactgggatgagatttaagtccagttctatttaattccaaatattctgttgctctgtctttaagagataggaccatcattttgcctctgcttggaccctttagtgagtagccattcacgggctgtcaagctggctggtttaacctgtgaaattgtttcaactgctaagatttggaagagagatgcgtttgaaataatacccaagttctaatgatgattgtttctaagagttcgtcatcgaattaacctctctaatttggttagcatgagaaattagacttctggagattcatttttaaaaatgtgtttaaaatatataaatgatctttcaagggcaaggttcaaaatggaaaaataaagtataaccttcaggattgatttttagataatttttactgatcactgctgaaaaaggcaagagtcaatatgaaattgaatgtatgtacatgaatggataggacacatctttgaatgtgatcaacttaaaagcatcgtaaacaaggcatgtaattattttgatgtctttagagcaataaaataattctctacaacattggagtttctttggtatttttcttgaggggctctgactatatcagtttattaatagattttcttttcttttcaatggagacattgtattagtcagggttctctagagggacagaactaataggatgtatatataaaggagagggtattaagtattaactcacacgaacacaagaccccacaatagggcatctgcaagctgaggagcaaggaagccagtctgagtcccaaaactgaagaacttggagtctgatattcaagggcaggaagcatccagcatgggagaaaggtgcgggctggaaggctaagccagtctagtcttttcattgataaaagaaaaacttcagctgaattaatttaaaggagtttaactgagaaatgaacgattcgcgaatccggcagtccccagaaccacagcagactcacagaggctccaggggtgccttgtggtcagaataaatttatagacaaaaaaggtaaagtgacgtacaggaattagaagcgaggtacagaaacagtgagattggttccagctcggcgtttgccttatttgaacgcagtttgaacaaaagcagtctatgagtggttgaatcccactgggactgggcaacattcagccattgttacagtgcatactattaaattaggttttaaattttgtctgactattaagctaggttacagttcatccacaaggactcacctatagaagtacagagtccttctcaggccatatttagtttgcttaaccatcatgattttctgccttctttatatcccggccgagctggtagctgatttagttgctgcccacccagataaagggtgtgtctgccattccagcccactgactcaaatctcctttggcaacaccttcaaagacacaacagcatcaatactttgcatccttcaatccaatcaagtggacactcagtattatccatcacgggcatatattaaaatatatttaaatgatactaatgtattaaacatagcaatatagaactctcctgtaaaataataaacagcacagaccagttttgagaataagtgagttaagggtctaagcttaagtctggctctaccactcgcaaattggatttccttataacgtctcagttcccacatctgcaatatgatgaagaacaattagctcatggcttaacttaaagcaggtgttcccaaacattgccattcatgaaactcaccaggggcaatttaaaaatgttaatgccagattacaccctacaccaatcaaaacagaatctctatggatgggatccaaacatcagtatttattaaatctcctgtttctcaaacttgagtacatggtagaatatcctgagaatttactaaagcctgtatcccatagcaatattttaagaacactaattagaacagtgtttctaaagctttaaggtgcatgagaatcacttgggaattttggaaacagcagattctgattcagcaggtctgggtgggcctgagaggtgtatttctaaccagcaccctgggaacgctgatgctgccggttcacagatcacacagctaagcatccagggcttagacttccagcacagccgtccagctggtggcaggtgtgtagaaatacggacccgctcgtccttaattggtctccttccgtcacactgtccatgtgtgctgtgccagcattatcaccttctatctgtttcatcataagaaatctgggaaaccctggtttcgatgtgtaagtgtacaacacacctaagagggttactagtatatggcggctgttcaataaagttcattgacatacattgaaaagtgtttgtcttcgaactagaactgtaataatcccctaattcttttcaacccttgacctggtacagccccagcttgccttcccccactccaatcactttcacacttagtgtgtagttaggtttttgtttgtttgttttttggaaaaataacacagggcaggaggagggaaggaactttgtttttctatactgttcttataaaaggtgtgatgctgggagctctgaggatataggggctatctggtaatatccccgacttattttgtttattaaaacctctcttaagaagagattttctgtaatcaggaaaaactcccaaataaagcctcagagttccaactgcaatagtagttcctagtgaggagtgtaaattctgacacttcccagaggacttcagaattggaaagggataactaataatcgtgagatttctgatgatagctctaccatgaaccagctctgtgtcttgagataaattatacaatttattgagttctcagttatcccatttgtaaagtgaaagtaataatatcttccctgaatatttcataagaatagaagagacaaaaatagctatgtagagtctgaaaattaacaaaaaattgtcatttttattatttatactatttaaatcagcatgatatttaaattggtttcttcttgttactaaatagagcgctaggattattctgcattaaaacgagttccaaaataaataaaggttgtattttatggtatttcccacctataattgtaagcagtatctttcagtctaagtttttgtga

SEQ ID NO: 1885190 - DNA, 4001 bp, Homo sapiens; identical to SEQ ID NO: 917192

SEQ ID NO: 1885191 - DNA, 4001 bp, Homo sapiens
caaaagcatctgtatatttctgattaattttaattataatattttgccttattctaatttaaaaacaaacttttatagggctacacacttaagtactagtacgtaaattattgatttattttatatttattttactacatgtattagcaaatatttatattttctaattatttttgtcttgttaaactgtgtatttttaagcattttctggagctaagctttctatttttaaccaatgaaatattttttcttccttgcctcctctaaacagatattattttcaaagaaaatatgtgatgtaggaatcacaactcctttctatgctgaattcacggttctttgaaaatcagatattagatatataaggtagctttttacatatctgttttaagagtaaatgaatgaaagaatcaaattgctgatagggagaggtctttgcccactaagtacatagaactggtttaggaagccctttttaaagtgagaatatagaaattggaaatttcattggtgatggaaaagccaaaagtagaaaaaatctaggaactttttttaaaccaaagggacatttggatcataatttgaatttaagaagaatatcatggttaaattaaggtggtaaatagaagataatattcttactttgtttcataatgaatctgaggaagattgaactttattttctaattaatatactatttttctcttaagagatttttgttgcttgtagtttatatacatggagctataaaatattgccattttatttggtgcttttatctgtgttattaagaataaaaagttaatttaagttattgttacttagtattatagtgtctgaactctaaacctagcaatatgtgaaatttttggtgaagttttttttcccttcaagattggttaatggttgtcttaatctttatttgatcacatctataagtacaaaatttgttaaacctcacttatacagtctttattagcattcattgaatggtgaaaatataagttttaagaggaaaaaaatgtggtaccttatttggtactagtaattaattatacaattaatgggcaaatttgataacattacatgaaagtgaatttcttataacattaaattggactaagagtattttttaaatggaagagaattttaattgcgtaggggaaagaaaagataataaggatgaaaagttagtatattcaaattgaaaggtaattagaacagagacttcagtttggtcagttaactgtgtgtgttgctttgaagagtgcacccaaggtgcgggtgctttgcttctgaagccagcaactttaaccacattatttctgctactgggattaactcactgtgggtggctgctcagcactagtagtcatgctgtgtgcgtccagatgttgggcgtcctacacgaggatttagagcattaactttcctctacctaaaacatcatcttcagtgcctgaaattccatctattagctaataataggcctcatgtggaatgcaggcggaacctggcattgatcctcagtttagaacaggccagttaccatattgtccggagtgggtccttgacattcaggaaagatacatccttagacctttcaaaatttgtcatgcctctctaacctaaaacagccctcattaaatgcactttaatccgagcactggtaagttgacaacttctcacacagagtcaacagtttttgttttgttttgctatgttttttaaataattgagagtaatttatacaagtagcaattctgtatttatagatactgagtagtagtaattggcctcattccagtcttaaaatgagtgtgacacatttttgcattaccaaaatcagagaacgttacctgtgatggacttttggggtcacaggatgatggttaaaactgtgaaatcagagtatgctcctatttcacctttcatacatgataggttagggccagagggtttggcagagaaggcaggtagtatcacttggaggaagtcagcatgagtcaccttgggtggctggaggagtcacaggattctgattctagaagggcaggtgttagctaaggacaaccaggtaggtgggaaaagaaggggaaatgctagaggcaagctttactcaattcccagatttattaggacagagccagctcttgtgtacttggtaatcattgactgactttctgaattgaatctaagtggtactttataaacctgacaattccctggaatgattagcaaggcatattgtagtttctggtcctgtgcctgccttttcattctttttccagttaggtaatagcccaggctatcataaaagtaagtatttcctgactgtttagctgtcttgttgtaaacttttccctattactaacaagacagagtaatctctccaaaattcatattcttgggcccttggcctttcctcatactttctccattgttcctgtgtttctcagatagtggtttaaagtaaatggagtatttcagcccagtacaaggtttctttgcataaatggccatatacaagataggaaagttataaataggattttatcacaatcaaagtacttgggtctaagctggttatagattcaacttcaatgcttacatgtagtgctgattttgagtttagttcataggcttgtaattgggaataaggcccttttttagtgtttggtagtaactctgattagtcagttctcatgctttagtaggatcctctgagatgcatgctagataaatagtactgttttattgtttctattcatcttctgtattttgacagttatctttcatagatacatcattaacataacttatcttctaattggatttgacttcctggcagtagtaaataaactttatcctaatcccaatcgtctcatttatagaatgagtttacaactgcattgttttccttataataaataccattgtgattagaatacctgtgcccattgtggcagtttctacatggtatctgctcaaatcatccttcagtttttgcttatttatgaactaagtgctaatatctaggcctgtattttgtaatatggtagctacatgtggcttctgagcatttgaagtgtggctagtctgaattgagatgtgctacagtataaaatacacactggatttcaactatttaggaagaaaaagaagtgaaatgtcatcaataaatgttttatattggttatatgttgaaatggtaatatttggggtatattggattaattttattgaaaatagttttgcttgcttgaaatttttaaattactcatgtggtttacattatatttctcttggacagtgttgatctgtgtgtttgcttatgataatatatctcttaccaaccttccttcccaggaaaaagattttcatggcctcagtgtctggttccgtatctggctgtttgtttcatatgcttctgttggcaaatcccatgtttctgactgcttcccactttctcaatttggctacttaacctgtcttaataattgtcagctgtattgttgtaagatcaccttgagttatctttatttggtttagttttgtggttcttgacataaagtgaatacccttatgaactttttattttattttttttttgagacggagttttgctcttgttgcccaggctggagtgcaatggcgtgatcttggcttactgcaatgtccacctctcgggtccaagtgattctcctgcctcagcctaccgagtagctgagattacaggcatgcaccaccatgcctggctaattttgtatttttagtagagagggggtttctccatgttgctcaggctggtctcaaactcccgacctcaggtaatctgcccgcctctgcctcccaaagttctgggattacaggcgtgaaccaccgtgcccagccatgaactttttagagtgttacacagtctatattttttagctttagtaagtgtaaaaatgtcctataaattttttttaataactacatttccttcagggtattattt

SEQ ID NO: 1885192 - DNA, 4001 bp, Homo sapiens
gaagggagaaacctgcttgtggctctcacctataatcttaccgctttgggatgccgaggcaggagggattgcttgaggctaggagtttgagaccagcctgggcaacatagtgagacgccatctctacaaaaagtaaaacaaatagctgggcatggcggcacatgcctgcagtcccagctactcaggaggctgagatgaaagggtggcttgagcccaggagtttgaggttatagtgaactgtgatcgaatcactgcactccagcctgggagacaaagtgaatccctgtccttaaacaaaacaaaacaaaacaaaacaaaacaaaacaaaacaaaaaaactagaaaaaaagaggaattcttaagctctttactgaagttagattttaggtttatctagcaatgtttcttttttgcttttatactgttaactgtagaaattagcattatcctatgctgtttctttaagctccagcatctaaacacatttacctcatgatgtgtgaagtgatgataggtgtttaagttgctgttagacagcagggggggaaattttacctgtggtggtacgattatttttgttttatagcaaaagcatctgtatatttctgattaattttaattataatattttgccttattctaatttaaaaacaaacttttatagggctacacacttaagtactagtacgtaaattattgatttattttatatttattttactacatgtattagcaaatatttatattttctaattatttttgtcttgttaaactgtgtatttttaagcattttctggagctaagctttctatttttaaccaatgaaatattttttcttccttgcctcctctaaacagatattattttcaaagaaaatatgtgatgtaggaatcacaactcctttctatgctgaattcacggttctttgaaaatcagatattagatatataaggtagctttttacatatctgttttaagagtaaatgaatgaaagaatcaaattgctgatagggagaggtctttgcccactaagtacatagaactggtttaggaagccctttttaaagtgagaatatagaaattggaaatttcattggtgatggaaaagccaaaagtagaaaaaatctaggaactttttttaaaccaaagggacatttggatcataatttgaatttaagaagaatatcatggttaaattaaggtggtaaatagaagataatattcttactttgtttcataatgaatctgaggaagattgaactttattttctaattaatatactatttttctcttaagagatttttgttgcttgtagtttatatacatggagctataaaatattgccattttatttggtgcttttatctgtgttattaagaataaaaagttaatttaagttattgttacttagtattatagtgtctgaactctaaacctagcaatatgtgaaatttttggtgaagttttttttcccttcaagattggttaatggttgtcttaatctttatttgatcacatctataagtacaaaatttgttaaacctcacttatacagtctttattagcattcattgaatggtgaaaatataagttttaagaggaaaaaaatgtggtaccttatttggtactagtaattaattatacaattaatgggcaaatttgataacattacatgaaagtgaatttcttataacattaaattggactaagagtattttttaaatggaagagaattttaattgcgtaggggaaagaaaagataataaggatgaaaagttagtatattcaaattgaaaggtaattagaacagagacttcagtttggtcagttaactgtgtgtgttgctttgaagagtgcacccaaggtgcgggtgctttgcttctgaagccagcaactttaaccacattatttctgctactgggattaactcactgtgggtggctgctcagcactagtagtcatgctgtgtgcgtccagatgttgggcgtcctacacgaggatttagagcattaactttcctctacctaaaacatcatcttcagtgcctgaaattccatctattagctaataataggcctcatgtggaatgcaggcggaacctggcattgatcctcagtttagaacaggccagttaccatattgtccggagtgggtccttgacattcaggaaagatacatccttagacctttcaaaatttgtcatgcctctctaacctaaaacagccctcattaaatgcactttaatccgagcactggtaagttgacaacttctcacacagagtcaacagtttttgttttgttttgctatgttttttaaataattgagagtaatttatacaagtagcaattctgtatttatagatactgagtagtagtaattggcctcattccagtcttaaaatgagtgtgacacatttttgcattaccaaaatcagagaacgttacctgtgatggacttttggggtcacaggatgatggttaaaactgtgaaatcagagtatgctcctatttcacctttcatacatgataggttagggccagagggtttggcagagaaggcaggtagtatcacttggaggaagtcagcatgagtcaccttgggtggctggaggagtcacaggattctgattctagaagggcaggtgttagctaaggacaaccaggtaggtgggaaaagaaggggaaatgctagaggcaagctttactcaattcccagatttattaggacagagccagctcttgtgtacttggtaatcattgactgactttctgaattgaatctaagtggtactttataaacctgacaattccctggaatgattagcaaggcatattgtagtttctggtcctgtgcctgccttttcattctttttccagttaggtaatagcccaggctatcataaaagtaagtatttcctgactgtttagctgtcttgttgtaaacttttccctattactaacaagacagagtaatctctccaaaattcatattcttgggcccttggcctttcctcatactttctccattgttcctgtgtttctcagatagtggtttaaagtaaatggagtatttcagcccagtacaaggtttctttgcataaatggccatatacaagataggaaagttataaataggattttatcacaatcaaagtacttgggtctaagctggttatagattcaacttcaatgcttacatgtagtgctgattttgagtttagttcataggcttgtaattgggaataaggcccttttttagtgtttggtagtaactctgattagtcagttctcatgctttagtaggatcctctgagatgcatgctagataaatagtactgttttattgtttctattcatcttctgtattttgacagttatctttcatagatacatcattaacataacttatcttctaattggatttgacttcctggcagtagtaaataaactttatcctaatcccaatcgtctcatttatagaatgagtttacaactgcattgttttccttataataaataccattgtgattagaatacctgtgcccattgtggcagtttctacatggtatctgctcaaatcatccttcagtttttgcttatttatgaactaagtgctaatatctaggcctgtattttgtaatatggtagctacatgtggcttctgagcatttgaagtgtggctagtctgaattgagatgtgctacagtataaaatacacactggatttcaactatttaggaagaaaaagaagtgaaatgtcatcaataaatgttttatattggttatatgttgaaatggtaatatttggggtatattggattaattttattgaaaatagttttgcttgcttgaaatttttaaattactcatgtggtttacattatatttctcttggacagtgttgatctgtgtgtttgcttatgataatatatctcttaccaaccttccttcccaggaaaaagattttcatggcctcagtgtctggttccgtatctggctgt

SEQ ID NO: 1885193 - DNA, 4001 bp, Homo sapiens
ttggaggatttccaaggacagttaggctgcagttgcttgagcttgtggctggactacagaaattggtgtgttcataaccagactgcaatatagactgtaatgtgttaggatttcactgtattgcatatggcacagtgcaaattaggtacagtattgggccgctctgtatcaaatcccattctagaatttctctctccaaattccccacattgctttggatgacaagtgcaaaggaaagcattaaggagatgaatctgtgtttttcagtatgtttagctctggcaggcagttactaatgttatattgtttttttgaatcaccaagaagggaaaataaatgacccagcttatttctttttcctctagaacttattggattgtaaacttcttcagggcaggtaccatattttataggtctttatgacccagcctgcacctggtggcctggtaacttagatgtgcagtaactatatcctgtttggttaatatttctgaaagaaatgtaaaaggtaacctacatcttatgcgtagtactggaactgcatgtaaaaactggaattgtgctcttcatttttcagatgctcattttataaatatgtaatcatctttttgattccttttaagagataaaacaacttagagggtgtaataagtagtattaaattatacaagaaaacttaatggtaattcagttatttagaataagttcaaactttatcaataatttaagaaattaaattttctttagctgttgtattataattcctgacaagcattttttagtgacatgttggaatgtggataattttggcttatgtttcagtctgaattgggagtgtatggtttataaggtttgtggtatataccccagctttaaaaatctataaatgagaaataaaaaagcttttcatttctattacacatttgagagcaacttaaaaaaaaaaaggaggaaacaccctagcaaaccatgtattcttattagtgttagtcaattgacagaaattgcaacccccctccatgcccatttatctttgaggttttgttttttgagacggagtctcgctctgtcacccaggctggagtgcagtggcacgatctcagctcactgcaagctccgcctctgagttcacgtcattctcctgcctcagcctcccaagtagctgggactacaggtgcccgccaccacgcccagctaattttttgtattttttttagtagagacggggtttcactgtgttagccaggatggtctcgatctcctgaccttgtgatccacccgcctcagcctccctgctgggattacaggcgtgagccactgcgcctggttttaaggtgtggttttgtagtcagtgttgttgttatcatttagtaatcatccaattggaattatgctcatctttcttgttaagatttcatttttgaattctttgctccataaataattcagaaactgcttcagcagctggctgtcccatcatagttctggggactgagggaaaggaaggagagtgaggctggatttttgactcattcccagcctaggtactcaccaacccttataagtcacttctgtgctgttcaatttcctgttctctaagatggggataatagcgagtttttagggttgctgggtatactagtaatcgcaaagtgtccagtaaggtgtagtagtagtgataaggtgggctgtatcatatgggtacctagggacccatttagcaatcttgggttctgtctcagttaaaggcccatttggtctaaaggaacagatccctatacaatatctactgtaatcctgaaaggaggaattgtaaagatacacaagagtagcacctctaatcaagctggccgtcacaaaggactggaaccaggaactaaaagctgacagcttttctcagtctctttccctctcaggccatccagtgtctctttgcttctcactaggcatagctccactgttgattctctgcattgtgtggcttcctctgctttgatcttcacacagccaagcctagaacctcataattccagatagacatacatgtccttggtccgtgcaagagtagagcctgattttcatatctgaattccaattctagaattctgggaaaatggagatttgattggctctgcttgggtttatattctgccttgtgtttagctgcggctagggctggcttacaaggaacagtgaagactggtgggcctacctctatggcataggcattctcagagaagagacagtgtgcaggaggcagatacacccacaggtgtctaccttgtttacatgtggggatctttggagatttcttgatgacagtcttggtgctgaaagactgagtctaaaatagtttgcctagttttagtagttttgtttccaggttgcacattagagttacctggggacctttaaaattatccatggcaggctccatctttgggtattgattcatttgggctgggatattacataggcatccgtattgggaaaagaaaacaagctttcaggtgattctcatatgtagtcaggttgataaccactgcctaaaatgttccctgcaccatggtagggctggggattcaaagttgaggggaacatagtacctgcgacatacaaacagaaaaggaggtataaacacaaactgcaagacaaaccattatcggtgacccaagggaattgtaaacaaaagggctgtgggaagaaggaaatgagatcatttctccataataatgaaggttgatccacccttactctaaatttttatctgcagtacctacttaatctgtttacctcacatctgattcgtccatctgactgtgagtctcctgaggccctggcaacatgctggctctggggatggcattaggaaactgccactgcatagatttttcaacccccatatttgagccccaaagaaatatgacagcatgtgaaaggccccagagggcagcccaacataactgacacccagcaaaacagagctgctggtaaattgaccatgacaaaaatcaagcccacaggagaggcagtacacatttaaaatggatttagatggattacagactggttatggggccctagaggaggagaagactattgggagtatccttgagaatgagtgagctgaacccaggtgatgcctatatggatcttactgtgaaggaagcagaataacattggtcaaagtttctgaacctcaggtgtagtattttgtgtaccatggtcttttctataagtcttctaccaagcctatggggaagatgcttgtttgcctcatagtacagttaagaaattcaggctcagagagtttaagtgctcaagatcacacagatgattggtatcagagctggattctgatccaggtgagtcttatcccagagccgaggctgttcacctctgctcagtactgctctattgtgccacagtgcaaggcaggatgtaaaagtgctaggaaggcacgcttgatgtgggcaagcttagagaaccttcctgaatcaggcagcatttgaaaggtgagccaggtattgagagggagaggactgcggtagtgtcttggtcaaggcccagaaataaacagaaaccaaggtaggttggtttaaggtgaggattatttaggaaagtattaaaagagaaaggctggccggatgaggtggactcacaccttactgtaatcccagcattttggaaggctgaggcagaaggatcacttgaggctaggagtttaagaccagtctgggcaacatagtgggaccgccgtctataaaaaaaaaaagaaaaaaaaaatgtggggcatggtggtgtgctcttgtaatcccagctacttgggaagctgatcgcttgagctcagtagttcgagactgcagtgagctatgatccctccattgcattccagcttgggcgacacagcaagaccctgtctctaaaaaaaataataaaaaataaaaaagaaaggaaaagggcatattggagatgctgaggtaaatcagagattattaact

SEQ ID NO: 1885194 - DNA, 4001 bp, Homo sapiens
gcagaggttgcagtgatccaaccagcctgggcaacagagtgaggctccctctcagaaaaaaaaagaaaaaaaatgctgacccctaaaggcactaactgtagtttgatttttgaacaaccattaaagaagccagtttaaaagatcaatgactgactgacaataacaaacatttactaatatgccaagcactgttgaaattcctttaatatgttagctcatttacatccttacaacagtccaatgaggtattaatagtacttgttttacaaaaggtccaacagataatttacccaacaaggcacagctagtaagtagtggagctgggattcacccaggcagctcggttccagagtcgacccacttaagtagtgcaaaaaagtaccagagattaagtagtgtatttatactactctgccacgttacttcttgctgatctcaaattgctaaaatccatttcttttccaagacacttaaataatgcaaaccatgctacccttctcccacttccttattagtacttcaggcactttcatatctactctcttatttaacattcacaatgaaggttttaaaatatttacaactttatagggctccacgcggtggctcacgcctgtaatcccaacactttgggaggccgaggcgggcggatcgcgaggtcaagagatcgagacccttctggccaacatggtgaaaccccgtctctattaaaagtacaaaaattagctgggcgtggtggcacttgcctgtagtcccagctactcgggaggctgaggcaggagaattgcttgaacccgggaggcggaggctgcagtgagccgagatcgcgccactgcactccagcctggcgacagagcgaggctccgtctcaaaaaaaaaaaaaaattacaactttattatcgttaattgtcctatcagagtgcccattttttttgaaggtagacaggtttgcctagatatggtgcttctacttaccagttctaagactttggggcagatttcttaatctgaacctcaggtgtcctcatctgtaaagtgaagataatacctacttcataaggctgttgtgagcaataaacacgattaattcgtaaatcatttatttagcacagtgcccagcacacagtacacagtcaatacgtggtagctgtcagtataccaacgtgttgcacaacagaaactcgtctttgctggattcagttcacttatcacgccattaaaaaaaaaaatcatcctaagtgacacagaaaaactgcccattcctatctcaaaaagtttatgaacaagttaagacggtaagagaaactgaattcaatgaaagcgccttcgcaacaggcagcttaggaccgggaagaagggcttcagcaaacttaatcattaactctaggcaggcgcgcgcgcacacacacacacaccgttgaagaaggagaccacgcctcctgtgtgggctcaggttgaatcgtacagcgtggtagagaactccagggctgctgaatctgacagatgtggattcatccacttctgtgccacctgtgctgtcttgggcaaattacttaacgtctctgagcctaggtttcctggtcttcaaaacgagaacagtaatagttcctacctggtaaagttgttccgaggcttaagtgcgataacccctgtaaagcgctggagaacggcaaaagctctacaagccggcagggcggttttaaatgcacgtgtatccatatacaaggtctcattgatacattccgttgtttggagtttagacactggctgtaagacgtttttcttttctcctaagcaggacccgtatttgtttacctccaacgtagactaaatgcctgtgggctggtagctataagacgacccctcggccccacaacctctaagttcacttcacctccgcggctttgcaaaagcgctacacgcacgcgcaagaagcaagaggactgcaaccgaagaagcaaagggagagccgtgcaccacgatgattctgcgcatgtgcctggcgggaggaggggggagggttggagtttgcgcatgcgtaaaaatgtcgggaaagcaagagaaggggggttaagaggcggtattgacagctgtggaggcagcccgcgttcccggcattccctggggcggcggggttggctctaacgaatttgaatgaggagcctcagcgctttcggcgccattttcgagtgatgcctgatctcatcaatctagcgggagagacaggataacctgtccgagagtatagcgccactatgactccgccggaaaaattactttaaaaatcgccaaaaattacttggagcaaagggcagtcggcggagcttcgccaaggctggcgcagtcggtaagagcctgaagaagtagcagagcgggactcgggaggtggcagtggtgggacccgcaggcagtggtgggtgcagggagtgggcgcggggtctactctcacttaatcgcgaaaaatccgaggaagtagggttaggggcaacttgggcgtctgcgagtgggcggcggcgggcggaatgtggcgggagcgcggagagacggggctgtggggggaggggagctgcagtttgagcgggacgcggaccggctgcggcggagcagccgccgcccagcggatctgtcagcaagaccccccgcccgggaccggagccggggacggcgcactgcggggtctctgcaggcggccgctccttgacaggaggactggacgcgcgcccctcccccatttccgaaccgggccgccttttctcgccgttttctcgacccggtgatggccgtcatctcgtgacaagaaacttaaggtcgacagaaaattcaggacccggagtcatgggtccctccggtgggtcgtggcaacagtcccccccgccaccgcccggcacccatctatctatattgtcttttgacgctgaagcgtgaggtgccccaggaaagagtttcccaagccctggctgccctcccccggcgcgctgggtcccggtgaggtctctaggtaggtaggactggccgcggctcgcgcttccaagatggggcaggggcaggcttttgaggttgtagcgggctcttaggaaagatgctggactttagcttctttctggggatttttgtcatttgctctcgcagcgttgtcctttctcaaaggggaggagtgttcacgggtgagatgaaagatggggcttcgagctaacgatttccttctcgtggctatttcctccgagtcgcactttcttagaagacttttttcttctccggtgtttgaaacatgtcgcaaggaaaaaagcaatctgtgaaactattaatgttttcctcccccaaaagtctttacccggacaacttaacggtaattttgcgatccccaccttttcttgacgctgaggaggagggacgagagttgttatttgtctttcccttcggtgattttttttttcccccttagctggtggtttctatcaattcttactccacagctcttgagtgatgtgagccagtgacggcattaactttaggtaatacttctatggcctttgtaaaaatcccgcgttaaggatgtattagatcttgagttcttttccgcgctggaggcaccactagattaaccctttgccggtgtattgcgtgtggggcgcacggctctgggttgcaaatattccggagatgctttctgcagcagctattctgttcagttgttcgcaaagaggaataacgcttcctgggaaccgcggtgacacgcttctttaggactgcctgcctacagagtttttccccgtggaattgatgtaacgattgatttatttcttatattctatgaagactgggggacccgccctcgcttagaatgtttcccggaggagaatagaagagtgcaatgtgatgtttttcaaattgtgtctaacggagctccctaaactctggacttgttaccccctgattggctggaaggaagcgggcctggggggtttgaatgttgaacgctaaactataattctcgactttac

SEQ ID NO: 1885195 - DNA, 4001 bp, Homo sapiens
ggaggcggagcttgcagtgagccgagatcgcgccactgcactccagcctgggccacagagcgaggctccatctcaaaaacaaaaacaaaaacaaacaaacaaaaaacaaaacaaaaaaaacccctggctttataatctcctatcccctatccctattcccaaatcctcctgcagtgagaaataacctcttgtagcagccatttcagtgggagtcaaaacacttcacaaaaccctctccttgttccttggaacaagtctctatgaagtggtccaagcagccaccagaagtggctggagagcacccacatatgctgcccacgctgtattttatgcctgaatttatttgccatgtagacatcttactgtagtggttgaggatattggaactacttagatgaaagaacacctaagcccctggtgggcttctgttaaactgtgtaggtccatagcacagataggggagcaatgacagtactctgtgaagaggagaaggtgtgcttacaatgaacggggccttggcgtccacctcttcccgatggagagaagtgttgctttttcctagagaaaagaaatgaacaagacctgttgatagtgaatgagttgggtccccatgctcccctttctctgccatgcccttcaggtgggatgctggcacagggaggattagatgtttgacctacttactcattccaacttatagctcacaaggatggagcttagctggaggctgaatgctggaaccccatcagagcatttcagaatagcctaggccatttccacaggtctgaatctgtgacctaggggcaggctcttagaacaacatattctcatataatgtgactggctggctgtaaggtgtccctaagaaaagctaacatcctctgctctaatcaggcagaaaggagtgagaggaggaagagagaggaacctggagaaaaaaaatgcaataaaggcctgtaaaaggaaaactcacaaagcccttctctgaagagcttttaagatggagtttaccagcaaggtactagcagacacatacgagcaggttaacatccctaaaataaagcaggagccagcaataacagggtcgggcaacagaaagctacagctggtaaggaagtcagcagcaccacaccattagatacagcaattactttagatacagggtggggtcccagctctgcagcacacactctcaggctggagaaacaggctgtgcttctgggaaagcattctccatcctggggtacagatccctggagtcttaagaaggcgttgcagaaaaattaagcattatctcgtctgagtcccctaggctgggttagaagttgcttgcctgattattgcgtgcagctggaatggtcttggtacagggagggatctgggctgaggaggatgggctgagaggggagaggggagagggaagaggggagaaggggacccgcacacatgcgcactgtagcagaagctgcaactttgccggttgcagggctgttgtgagatagggtgcttgctactgtgactggggccccgccttgcagatctgcttgtcatcacttaccctctcttggtggtttgggcatgcacttctttgggggaacaaacaaaattttaaaagttcctgagtttgacagcagcagccaatcactttcctccctattaccctcctctcttttttctaaagtagtcaaatgccagcttctatttcactagtttctatttctgtgaaaaacatttcagaactgctttcctcatccttcccactaaaaatcaagcatccccccccctccccgccctcctgttctgtgcaggaagggttggcccacactcacctgatgtgttccctcctcagtcgtggccagcaccaggtggttgctgccatcagatgatgttctgccctggcaagcacatgtttttaaatgactctgcagtacccaggcttataaaaacaaatgcacccagacgaagttccagcgccccgcggggatacactgaaattctctggccttgctgagctgggctttggcttcgagtctcctctcaggcagacctggatacgtcttcattcatgtgcctattttagtcattgcaaaatgctttataataattccagacgtgaaatgtgcacaggaggactctagtttggagcacaggctttggggtcagaacctcggcttgaattttgatgcaatgtatctgtataggtaagactttttcacctctgtgccacagttttcccatctacagcagcaacacctgtctgtgtagggttcttgtcagaattgaatgagataaatgtgatgtatttagcacagttcctggtacatagacaaacattagttcaataaagtttttctagtattatcatttccttgttttttccaaaaagtagttaatctgagcacacatctgtttataggaggaggtctgatggccgggaggacaggaagaaggaacccacaatgaagcaaaagttgcgtttaactctgtcctcaccattcctctcctggacctgtcctaaactggaagctgggggaggatggagtgctggaatgctgcagaagtctcatgggagggcgcctggtgttcaccacatgtgtacactgttgcacgaccaggttggcactttgcatgtgggaaacgatcagagaatggtgggggatgcttaagaggcatcactggaatcctacggtaccacagaccagagccttcccttcccttcctctcccacagatggaaatttgaatgctggggctcagtggaacacctgaaggaagctggtgaggcagatgtcccgctatgccttccaagtgtcatgcaaccagttcatgcctgtcagcatctctgccggtggactctgtgagtcagcaaatctacagagcagagagccacaagtggggacagatgtggtcaaatgccatttaaatcagtgattctcaacccaggagttgtcatggcactggccttgagtgagctggaccaagggaagtggtagaattccccatgaaggaccaagtgagcagatagaagtttctccattttaactttttctgagtcaatttaaaaaacacctagtgcctttttctgtacatagtgcctgtgggtttgaatttaagcctacccaaatgtgcttttatcccacctattttgaaccttgcatgtctccgggataagaattaacataagctataaatattcttccaggactaattattaaccgtgaatgttgagcggccttgacaaatataaaatgttatatataggcccaagagtagatcagagagttatctatctacttcaagttgagactcagagttttcattaaactctgcagtctcacagtatttccaatcatttcagggcagacgaaagttccgtggtatatctttttaatgtggcaggcctcgagggtggattgagttaggcaatttatccccttttatgccctatattcacatgcaacactccaatggggtaacataaaaccacagacaggtttctttacaccggtatttaagggaactaggaaagcagcccaaatcatgtggagaaagctggggaaagaagtatcagaggagaaagaggaccttagcagaaatgacaaaagtgaaaaaccttcctaactccttcagacatgatgcttaaaattgtgtttctttggcaacttataattttctgaagctggttctcagcctcagatcctcccccaaggtttttatgttgtattttgactcagtaggagggatccagtcccagaccttccggctctcaccagtacaccacaggctaacgccatccagcaatcagatgacaggaggaggagaggttcaaagaggactactgtatttctcagaaggggctggctcatctaccctccactgtattactcacactgtagatgcagaaaacatgtcaaagtatactggggctctgcaatgcatgcacccacacacatgtacacatacgcacagacttccaaactaaaaaggagaacagagctcaaa

SEQ ID NO: 1885196 - DNA, 4001 bp, Homo sapiens
attttacaaatcctgcaactaacaacgcagttcttgatagactgcgatctactgggaggactgctcggttttcacctgaattattgctcgtggttcacacactaacacccaaaaagacactctacgggtcatgacgtgtccctaaaatcctccatctactccagaaaacgttctaactttttgagacgaactgttgtaactagtctcctggcgaggcctgctatgtcttataccacaggctctaactgccaaatctttttcagaagtctttcagttgttgcctccaaacggagctctttgcagtcctcgggcggacgaatggacggattcgagcgaagcttatttcccttctcctaacgcatctacctataaatagcgctcaccgcgctgagtcaccaaaaccccgagtttccccaaatagcgcgtaacgactgctgggatcgcgtccctcggggctctgtgacagactccaaccacacacccgctgggctggactgcgggcccacacggcccagcgggtctctcaccacccggcgccccagggacgcgggcgaggccgcggtgtccggaccgagtcgacagcgtcggacttcccgcgcgcggacggcgctctggggaaggaggagccggcgggcggctggacctggccttgactgcgcggggtccgcccccgccccctcgggagcgcagagttgcggggggccggcaccagcctccgccctgcgccgcccgctcacacaatgggacgcgtcgggagggggcggccgcggctcccattccggtcccagggcggggactccgggcggcgggagaagcagtcgggctggggccagaaggaaaacccctctctccctctgcccactcaaactgcgaaagggctccagccggcggtgccaggggctggggagcagctggggagggagcggaagtgccaccccctgcagtcaagggtggtgacgtcacccctgcagccagcctgtagcgggggtgtctgtacatcacatgacccggcccccctctccccgccgaagcccgcgcgcgcgctctctcccccagccccgactcccacctctcccccgccccctctccccaactttcgccctccccgctccggcaccgctgtcaacagcgccagctccgccccctccccgcgccctgtggaaccgccacggcggcgcggcgggcgctcgcgctcaggtccgaggctccgagaagcgagcgtgccccggttccaccctgccccccagctcagtgcttgctggctgcgtgggcaccagagccagggggcacggcggcgtgcagcgacagcgcttctctgctccatcctcccacagcagttagaggacgaagctgaggcgccgggtccgagctcggagggagcgaggcgcatgcagcggcctccgggccctgacgcgtagcctccgggggtcggcccacgggcgagagaagcagccgggagcccctcctcgaccccagcaaggcggcccgcgcctccgctctccctaccgcccgggtggcgcacgccagtcctccgtctttggctgcggcgcaggcaccggccatacgacgaggggccaggcggggaccgcctccttgagccccctcggccacccctgccgtgtggactgctggggttgcagatttgctggctgttgctgcagcgcctcgttctatttttcctctcagttcccttctaaaagtggaggctcgggggaggaaaaagaaagcccacagtgttgaaaggggcggtacggactgacctgtcaacggcggaggaggaagacccccgttcggggcgagctctcgagcccgcgcagggatcggagctctgggctcgcgcggaaaggcacggcggcagctgtgcctcagccaggtgtcccccctcggcggggcccgcgccgccgcgcccgccccctcccccggcgcagcgctccccgccccatcgccggggaccagggaaccccccggctcgattttttgtgcagtttcagcaaagctccgaggaagttggtccttttgttccactatttatagattgcgtcaacattgcgaaaaggagaaggcggagcggtggcccctccccctcccctccccccgccggctcctgggagagaaaagccccagcacacgacctaagtacacagcgcgccagccgcccgcccgcggccttctgctccccgcttcttccccctcccagccggggcccgaacgctgccaaccccgtcacgtgcccgcccgggaaaaccagctccccggggctccgcgccgcccgccaggcttcgtggcggcggcggcggcagcggcctcacccagctcgtgggctcgggccgcggctcaggcgtcacgcatagcgtgggcacccacgccctcgccacccgacgaggatctcgggctccgcgacctgtgggagtgctgcggggcgtcccgcacttccgccctctctcgtctccggctccccagtcgccgccccgctcgccgagtgtgcgcgcattcgggcctcgcctcggagccgggaggctgtcctgtccccaggcccctcgcgcggccgctcttccaggcattgcggtgctagccccctctcccgcgcacgactggggagggcagaggtgtgagggatgcgggggtggctcgcagccgttcgcgggcaggcgggcggagcgcgggaagcgcggtgcgggcgttccatggcgcacccagacgctctccctcctccgcaggtgcagcggggcgttgcgcgagctcgagtcccccttcccggacagctagggagaagggagtttgcagaccggagctacagttggaagaatatagtttttgagaagttactggaagttagatgtgagacaaaaacagacgaactttccttcaaagccttatgacgaaatgataggccttgccatacccttgaaatgaaactgagctccctaccggcctaaagccgctgttcctgagcttcatgtaaacaaggagggcggtaaacaccagaggaaggccttacaacaataccaagtgcaagtagctcatttgagtgttatttatcttagcagcttccctgagtgatttatgtatattgcagtttaactttacagggtgggaataaaataatttggcttctcagctcactggcggaagaaactagagctgagctgggacgagggcaagaagcgcgtcgcacctttcctggcagctgaacagtgtgatgaacagtctggaagggttatgttattacttaaggggtttggggaaaccgttcccgcgcacagaccctcattcgggccaactgcaggccgtgggggactcttcaaggactcgcgcaacccgagccgagcttcctggctgggcactgggctcagccagtgctgagagcgctttcgctgggccagtcaagacagcaataagtttgcctctatttgggaaacctttccaggcttgcctgccctcttttaagagggagactaggtggtgggatcgtcagctgccaatgtgtgcactcgttctaaagaaggcgagaggaagtaaagcgaacctgtgcagtgtttgctgggcttccaaaacgcggagcttagtcgaccccccagcgaaccggacggcgctttggtcccctcacacctaacggtactcagagcctggtgcgggagctggcgcgctcgctcctggtttccttccaatttaggcaaaggccctggccgcccgtcttcctgcttctgctgtgccctgccacagcactcctaagacggcgaattcgtttctgcgccaattttgttttgaatatctacaaaccacttttccttgcatgaagaaaacaaggcagggccccctggcccgtcccacacctgcgagaggcagagatacagaggcctcgggcctcagccttcatttccccgccctagcttcgcgccaagctgcagtgtccccgacacactgtcaggacacgcgcttttcgcccctactttgttcttgcgcagtcttcccagctgcggagaggagggagcgaaagcaaa

SEQ ID NO: 1885197 - DNA, 4001 bp, Homo sapiens
tgcagctgtgttccttaaatcaatactgactttctgtcccactgtatcttttttgcaaagacacttaaggagaactttctcctggcatttggggagaacttttcaagtcagacctcctaattaggaacaatcattgtgcactggatccaccaaaaagaaaaaagtgtttttggcctggttaagtgtttccatcttgggttacagccttcatctaaagcagcttctcccttggcctgaatgggcttttccgtggagacagaaggtaagattgcatgctggctgacccaacagagatccagaacaaactctcaggaaatctcaacccctcaggcagttgaattctcactcctctgagaccagctgaggttattttacttcatttaactagccagatgataggttgactgatggggccattatgtccggcgtcaagtaattttagaatgaaaattatgcaataggttagaccacagctcaatttttatcaccccaattgcatacaacgtccctaatgtgattgcctttgggctaagatggaaagaaatgttcagtcccaaagtggctatattttctggaatagattgagtgaaacgtctctttttttcaaccaaaacacatggaaataaatttcttcggttttactttctaaatatctggtacaaggtaaaaactgcagtgattaatatgtcctatggggctgccggttggtgaggaaaggttgtcaaactttagataactccaccaagttgctattatcatttttaggcctgggtcagtcaagtaggtagacaagcttcttgacatgtggaattgactgggacactggtaattgatcctatttaagaaaatgtcctcaacgcaatgattttgcttaagtaccttcttattttaaatgtaccccaggacaccatagttgtttctctctgtggctttttaatttccctttttgttccaactgacctttctaagtttttttttttccttctgaaataaagaattctaaactcatgattttacagaaaagctcagtttgcaagaatatcagcaatttcttatttaaatatcttctactatacccaattgctagagcataactcttggctcctaaacccaatttataaatcagtcatcctttccacccctactcaccccaaatttgttcttcttcctggtgttgctgtcttatttcttggcaccctcatctactcaacagcagcagaagaaaagaagaaacttcatagttggaggatcttccttctatctatttattcatccattcactcaacacatatctgtgtcagatactgctccaggtactagagacaagcatgtacaggacagatatggaactctgttctcacagtgattatacagcgattatattcaagtacatttcttctagaaacacttggtacttcttgcagggacccccaacctcatataagtatatatacttaaatatgtctaacagatcttgatatattacatatttaagtaaataatgatagaaaatgaatattcttacatggatgccccaatttctttcagctgcctcagatactcactggatagtgatagccaatgatatgccagacttgatattgattgataatgttatggccccaccagggaaggttagaagaatggaagctgcttatttcaaatttgaatgagcaatcaaacattcctgttctgattaatgtttttttgccttgatgcacatataagaactgggactagcagaaagggtttagcttaggactgtggagaaatgcttttcttcatttctgataaagctccatttgctgtttgatcctgtcttcttgatctcccaagttcctgataagtctacaaagctaaaacactcacagtttgatcattagtagtgtagatcttcctctcattcaatggaagtcttctcttggaggtcagcagtaaatgtctcattgccgtgacccactggtcagtccttatgcctcttcatctttgcacatgctgatccctttctcagaaagaaagtccctttagccaggcatcatctcctttgagaagctttcgctgacctcagactggagaactctattatagcatttgacactccccacaaaggggagaacagtaagttgcagtctgatgaagtcatatgatgcccgggctggcttatgagtaaagaggtgagaaggtctcctactgaaacagattttccctctttcttccccttacaatagcctttcaaagttcttgaaatgtccattaaggaattcctatactttacttttgatttcacaatttctcagtcaaaagctcaatatcattgcataggataatacattaccttaaaaaaaaaaacaccaaaaaaacctcaacactcaaagattaaatttgtgtttggaaaaggctttataggcagtggtacctggaaactggtgcttgagagaagcaggaggagggaggggagatgtcaaataccatcttttaaaaaatttgtttgtttttgatgaccatctttaagagatttttaaatgccatgtatgaattcaagaaagagaataaagcaggattctaagaaataatagaaagcttcttaaggaagccggtatagtatcattttatatctctgatatttctgctcatctactaaagctcattaaaacctattaatgattaggaaatacttatgttttatgaaatgtataaaaaaatttaaagataacaatctaaactctctttaaaaattaatttttatatatatcttaacaccatttaacacacttaattttagtacttctttactaaagtttgcggaggcagactactcttaaaagtaggaaaaaaaaaggcagaggagcagaccgacttttttttttttttttttttttgagagggagtctagctctgtcacccaggctagagtgcagtgagtctagctctgtcacccaggctggagtgcaatggtgcgatctctgctcattgcaacctccacttcccaggctcaagcaattctcctgcctcagcctcccgagtagctgggattacagacttctgaaattctgaatagtataaatacaactggaattacactttatttttaaatatacatttctaggtaaaaacataattaaagatcaaataattttggttaaattttaaaataagcccaatatgtaactaaataagtcttagcagaaaaatgtgaggataaagttgagattgctcctattttttaatatttatagcatttatttatttgtaattacttgtgaagtttcaagtattaaatattactccgagctgtctaatatgagtcagaatttagggcaatagaaaatataaaacaaatttttccttactaatacatgttttttaaaaagttgtgtttatgttcttcattgagaactaaataatcactaaaagaattgcagaagtcataaaatcattaaattaaggagagaaaatctctatatattcaggataaagacatttagtatgctaagatctctatccaatggtcaaaaaacaaccaaccaaagatgaaaataaaaaataatttcttggaatattatctgaggacttccaattttaacatgcagagctaagtgagtattttcttattcatatctcagaaaaaccaaccaaaacatcaagggaatcaagaaaaacagtaatgcaaagcttatcctttgtaaaactaggaaacaacagagatttttaaatgagagagagagaagacttagtggcataggacataggaagtaccagagtgaagatgcctgtggattctgagcttcaagaaagtcataaaagcacaattctaagtgatacatactgaaatgtaaatggaggtttttacaatagagggcagcaaaccacttcttatacaaccaaatagtaaatattttagaatttctgggccatatggtctctgccataactatcaaattctgccactgtagtgctgaagcaaccatgtacaataaacaaatgggcatatctatattcca

SEQ ID NO: 1885198 - DNA, 4001 bp, Homo sapiens
ctccactgtattgctagaaataagccatgcctttatattattctaatatgtcatttactttcctaagtgaaaatttcccatcttcagcaagagtttatagggataaaaagatagaaataagaaaccctgccttgttatctgtggatatttctgagtggaacagttaagggtgatttgtgttttgctctttttgtcccctgtgaggctttctgaatgttcaaagatgtgtttgtatttagtgtatgttaccttctatgtgatgagaaggcagcagggagacacagaaaaagagggaagaaaagtgattggaaaataaaagcaagtagttaggaaaccggggtgtgtctgggacaaaaggtcctttacctgtttaagtggaggttatttacgtctttttaaaaataaattttattgtatatatttgaggtttacaacaggttatgggatacataatgtaaatgagctttaactccattcttgcaaacaagttttgagatcagggctgaagaggactgaatcctgaaaatgagaagtaaaggccatgaccatagagaggaaaaggaggagaaattgaactgaagtagagaaacatgggaaaggtggagaaacattagaaacatgggccagttcagacagcagaacttggaagcttgggaatttttgtagaaaccgtatctcctggatagcctcagcaaagagtgctaagaaatgaaagctcacctccagattcacccaaaccttaatccagtcataattaggaatgtaaattcattggaggaaagcaaggctttcaaactacagctcctgagaaaatggcattcatagataaaacttgtaagcagttccccaaacactggaaatcttttttttttttttttttggttgagaattagatcatggttgagaactaattctcatggttgagaattagatcatattcatttaattagtcccactttctgctcattaaattgctcccctttcacatgacggaattcaatatggtaccttagtatttcatgatagaaagatcactgtgaattccaggtgttctgccagctgtgatagattcacaattcactggacctaaaaaaaaacaaaaacttactccttgaggaaaaatttccctccaacaacaagacaaggtagatcttgctctgaaactatgaccgcaaccataatttgctatgtagcaaaattatatggacataagttacccctgttccgttggccaaattgtaagattggtttgagatactggcctcttgacatttttttttattaatgtcaaatctgcctacttgtgcagaatgcacacacctatcgttccccaacagagctttgttcagacagcttgtctgtattggaaggtggtggtgtgtcatttagtgttgtgcacattagacacgaagttcatcctggctgcttgctgggccacacctctagctgctgtgtatattctacagttgatgggagttgtagccaaccaggcttccaaagtgtttaatttgtgtgaattttctactgacatgaggaaatcttgaatgactagaagcaaattgtagtcttcttgttttctttgataagtaaaatccacgaatgtcaaaaccctactagatgccacctactgagctagaccaaagtatgcgtcagatggtttctacacttgatctcatgtcttcacagtcgctgttcaaggtcagttttagggtcatcattttacagatgaggatgctgagactcagtttacctgtgcaaattcatgcctatgataagtggtacctgaccaaagcctgtacactttccaccttaccaaactctctgattattcatagcttagcagagtgccttagaggcctggggagatcacttttcccttttcgaagacctgtttcatataccttacttgagtactttttcccatctataattatcgcatacctgtgatggcacttctctgttggaattaagatgtcacaaatggcacctctgtatcagctgctggtggacagtaaaaatgagtacatattaataaatagaagcccagtcagtactaagcaagtgttcctttcaactctgttagtttgctgggaggttcatccccaaaacataaatgtattgatagatttgcttgttctacaaaagaattctgtactttcctagaggattcaaggcagagtttgtttaaagtataagttgtcttaatacttagaaaatgtaattcttgagcctgaaattgtgtgaaacctactagaggtgactggtatgtctaacaaagccgtcaatgtgtgttttaagaaccagctcctggccgaccatggacataatcctctcatgaaaaaagtttttgatgtctacctgtgttttcttcaaaaacatcagtctgaaacggctttaaaaaatgtcttcactgccttaaggtccttaatttataaggtaagttgcttcatgggcagtggttagatgttttccttcttcccccggaattgaagggtacattaccgagcactgacctgtctgtggtttatctgctgcttcctctcatcctgtctagtttccctcaacattctatgaagggagagcggacatgtgtgcggctctgtgttacgagattctcaagtgctgtaactccaagctgagctccatcaggacggaggcctcccagctgctctacttcctgatgaggaacaactttgattacactggaaagaagtcctttgtccggacacatttgcaagtgcgtgtggtttagctttccaatacagatttactctgtagaatcctgctgtatcaggaaaactttgagtatcacattaaccaatttaccttgtcataaagatactgcaagatctggaaaactgggaagccacgtttgctggcttggtttatttcatgttccattactataagatatgggcctgagatgcgtttctgttggtaaattgacatttaaatattgaatcaatattggactgactaaaattccattgaatcaagaagtgttagaacctatgtgaggatgcttaatagtaaacattttaggtaaggaacaagaagcccaacctaagtggttcttttctgtcctctatctgctgacacatctgctatctctgcagaattaaagcatcctaaattctctgctctgagagccagccaagataatgaccaaacttgtgtatttttgtaaactctctttttctacaaacacatggtaggtgtcccttttccatctctgtatttaaccctttttttaaaaaacaatatttattgtccacataggattcgtggatacaaccatgaacaaaacaaccctctcccagccctcatggagtgtagtctaatggaggtcacagacaagctctggaactctgagagtacaagtgtgaccactgttattgtagaggaacttgagtgtatcaggaggggcacctagaggatgtgaaggatgcataggggctcatggttgaagatcagtgagcatgttccaggccacagtgaactacggggaagcacccatctggggaactagagatgttccttactgcggagtttagaatatgggtgagaaggagttgaggaggacccatggtggcatatccaaatcattgcatatttggacagatcttctggactcctgtgttgatgatgggtcaagggtagtctagacctcagctagggagaccattgtcaaagctaggtcagagaggatggtatcctagaccagggatggtgaggtaagaaggaagaggagattgagttgacaacatttggtgactgattgtaactgggtgtggtgaaggaaaaggaaaataaagatggcctccatgctttagctcaagcaactgggtaaaggcagtgctattcattgagccaaaaaaagacagagccccctgtggcatagttaatctatccatgttctgataaagtattgcaaaggacagtctacccatagcatatttaatacatttaagttcaaactgaaaactgagaaataaatcatg

SEQ ID NO: 1885199 - DNA, 4001 bp, Homo sapiens
cacacacacacacacacacacacacacacactctactgtaatcatatagctcttaaaaaaagaaaagaaaaaagaatataaaaccctacaaccttaggtgcttttgttgttgtttttaatttaaaaagacaaaattgttcgccttgtatagaagtagatacagcttagagagccaaggtaacaagaggggaaaagtttgtgttgtctggtacttttgagggagtcagaagcctaaagggaggctctaactcatgattctcagaagacaactgttgtcaacagttcaaatgagaactgaacggccacactcctgcagctgaaaggagtcaatgcgagctgagttgctctcaccgaacagagtgcgttccccggggaggcagggaaaggccggcttgcacctgctctgtcacccagctccactcttaggacagaagaggtctggaaaatgtctgggccattccctcatttcacggaggaggaaatgggttagtgtgtaattgtttttatcatcacccttgttttatctttcaatctgccaggctcactcaatgctacatcctgcagtccccacccactggagaaacaatccgatcctgcaagtaattattgagtgcggacggcatacctcacctccagacctgcccattaaacccagaacggaggtgttttgctctctgcgctagatcggtattttcccctaccactttaagattacgcttcaggccagtgttaggctttctggtggggtgggacgcaacaggcggcctcctccaccgcagcgatggcggctatgaaacctctgggtatttgggcgggaggcgcggcaggtattctcccaaaactgggttttcaagaccaccactctctgcggaggccgacccggcaggtaaggaactgtccatcggaaggcaacgggcgtggcgtgagcagcccgaccaatcagcagagccgccgttcagtcaggctccccgcccggggtacccgcccagtccccaaccactgagcatgcgccgcgggcctggcgcaaatccccgcctggcgcgccctctccgcggccctgtgagggttaggctgcgccgggcttcctcagagagacagaaacggagccggggcgggagcgggcccttagggacaggaaagcggttagggtattggggggaaagtccctcacagggtggctgtcgctagcggccgccagctctgcgtcacggtgggctcgcaagccggcgcatcgcagtttccctggtaccccgcctggcggtccggcgcggaggggcggcagaccggctaaatcggccccagtgagggccgccgtgtcacctgagccccttccaggccgttgtcctcaggttacaggcgacataaccgaggctccgaagtattgcccacgtccaaggtgacgcagctggccgtcccggcgggccggagtctgggagtctcccacgcctggcccggcccaaccgtcatcgtcccgccgcgagctccgtgcctccggggactgaacggtggggaggccgaggcgccacacgagcgcgcggcgccccgcgccaggttccgagcagggacgctccgtccaggtccgcctggccggccgcgggttccgatcggtgccacataaataaaggctactttcctgagacctctgtccccgcagaggccccgggcgcagagggggggcgtggtgcaccgagctccgaccctgccggtgacttcggggtcccctcgagcgcagccgggctccctgggcaggaaaccctgctccgaaaccgcgcatcgtccagcctcggctgtgcgccctcttggtggcgtgcgcagtcccctcctccggtcttcggacgtgcggcccggggcggaggcggccccgaccccccaccttccccagtgagggtcccgcgcggcacgccgcccctgccagtccggccgcctagctccagcgccgggccgcgccgacctgcctggcccgccgtcccgccgcggcggcccctcctccgccgtccgggcgccccgccccgcccgcgccgcgccggacaccccgccccgaggaggcggcccggcgagtggtcgccgagggaggctggtggcatgggggagccgccgccgccacacgcacggtcgcccggagcgagcccgggcgctgctgcgatcgcggggggccgcggacgccgaggggggcgccttggggcgtgacacggtgcagagggcgcggcctgggctgcggcggccggactcgcggcgagcagcggggggagcaggcggcggcggcgccgggagcggcgggcggagcgggccgggcgccgagggcgcacctggcggccgcgcggccgggccgggccgcgggagcaggcggaggcggaggcggcgggggcaggaggatgtcgcagccgccgctgctccccgcctcggcggagactcggaagttcacccgggcgctgagtaagccgggcacggcggccgagctgcggcagagcgtgtctgaggtggtgcgcggctccgtgctcctggtgagtgcgggacgaccgcgggccgggggaggatggcgggggcgcaggcagctgcgggccccgggccgggcgcctcttagtcggcagggctgaggcagagcggccgaccctgctgggtccgcggaatcaagaggtggggccggcgggagggagttggacaggggagaagagaaggtcctggaggggctgcaactcccagacccctccccgccacccaagatcctgtccccatcgctgtccccttcctcctgggaaatttccgcagagtgatgtcgccctgtcactcttttcaccccgctctctcccaatttacctgctttctgtcaactgggaaattacactctcccccctcccccgcatccctcccccgtatccctcccccggcctccctctccttccatgttttggaggggcgcaggggaattgaggtgggggcttcctcatccagtctgcgctcagggtgggagatgcccctgctaaccctttgagttggctgaactccaggagggaaggacttcggcatcctctcctgcgccccccacctccaagccggtatcctgaagtttggccgccttttaggaaggcttggggggcatgatgggaaccctcgctaatttagtattggtgcaaattcctgtgacgtttgggggttctaagtaagcaaagccatcagcccaaaacgaatcttcccgtggcagaacgtctttagagaataggcctctgggtgtgaggaagatgaagttttcgattaactttttcacagccagcgccggtcctgctgtatttggaaacgcactacaacccgattcacctggatggtgcgggagtggagcgacgtttgagcaggagcgagctctgcagggcagctggaaacttttagcagctccttgcgttgccgccggcatttgttttcttgaaacgggcttgtttgtgggtgggtgtgacttgtgtttgttggaacagtgcaagaagatgggccttggaagtggttgtctgggccctgtgggggattgtcggggcagagtgccgggccccttaacacaggggcggatgcatcattttggtggcagatcgatgcccttcctgggcagacacagaattgcgtgaatgacgtttgtggagattggagatgaagcttcgctgatttctatatccagtttgctcagtttgaattttctctcgattgctagctctgccaactccaaatttctccaactccagtttgatccatagtaaacaaggatttaatttttctattttagggaagtcgattaggtaaggagtagagcaggagttgggaatagaccagaacctggccatctcttccataaccagctaacttctgtgtggcttcctgcatcttcctgagttttgccagtgcatgttaaggataaagcctgcaacttctttggcatcttttctgttctcacacagaagttggttcctttatctggggcctgccgtggtcatcagggatttgaggcagaagaagagtaaata

SEQ ID NO: 1885200 - DNA, 4001 bp, Homo sapiens; identical to SEQ ID NO: 917204

SEQ ID NO: 1885201 - DNA, 4001 bp, Homo sapiens
ttgctttgaaatcctggtctcctctaggctataagatctcacttggagctaaggatgtactgggacctgtgtccctcttcaggactcataaatcaggatctcaagaagaaatagaagtcaccacacctcctccaaaattattcaaatgaagagactataataaagggaataattacagagctcggggaaaggttaaaggaaccaacaaagtatgttgaggcactgataagccacagaaggaagtcattactatgtatttggttaaagaagaaaagggaggaaatagtgttatcaagatacaatgaaaactggagccacgaagaaggttctgacaggcaagggctgtatttcagcaactgccaaagatgcggtaccaaagaggggaggaggtggagatgaaataccctgattatctctccttctgtcctttgatctcctgccagggtttctcattggctgaacccaatcagaatctagaaagggagcagttttcagggatcagcctcctgggtaaaaagcagtaaaagaatagattgggagaaaaacaaacacagaagaactagcatgaccactgaagagcaggaaaaccaagagaaggcaaaaactgcatggccttccaggctgctttctccaaactgctagacacttctgagtgaattcttgaaagaactatatactcgtatagttttctctagaaaactgatgaagccattccaaataattctggcctacacatgcagggagtacttggagattttaatcaggacttacagaatcagaaacagccaacaaatatagtccactggaggctgaatcgggagcccagagttttgggaaacactgatcaaccaaggacctggatgaaggtgtatctgacagcatatttcagtgacctactgaaactcagaacaactttatatctttccccagcttccagacacctccatggaataaactaccagcatttcaaactaaatatgtaccaaaagcaaacttaccatttccctttctgcctagactctcccgtatcatcctcaccctgagccttcccctcaactgacacatacacactccccaacaaccaagagtctattcttctttctgtcttccttatttgtaataatggacattataaaactatcacctaaggaatttattgtcatgtcattattttttattcctccctgtgtactgacatctggagactgatgcctgtaagagccaacctcccccaacatggcacctgccaagagtgaccaccagtcactgtgcttagctcaccccattgtcttgaagcattttggcccttctcattttaaaatttcctttctcacttctggatcccaaggactgtgttatatctgttaattcaagacccggcttcaagacaccttgattcaactgagggcatcatttacacctgccatctgcactactcttggttttcggcatctccatggtaataaataccctgtctggactgacccagaaacttccctcatatatctgatttctccttccaagtttgctccagcctagataagcagaactgaacaattgcctcctaaaaccaaccagctcccaaatcccatagattctacataagcaaatttctaatttaaaatagtttttttaaaaaaatgttgtgagttctttttctcttctattatcatgtgaatggtagcatctacacaaagttgccatttaaatcaaactaaggagtttgctctcaaacttccctgtgtgaggtcactacagcagggataagagactttcttggtcagtagttctcaacttgggctgaactttggcaccacctgaggattatggggaaaaaatatcaaagcttgggtcacagcaccctggtttctaattccactgtgctgagtatggtctaggtaaagggatttttaaaagctcttcccaccgtttgattctgatggaacagtcaaagttaagaactactactataggctcagcaagtgtctccatcccttctgcaatgggtgtgattaattacataaatgcatggggttattatgacatcaaatacatcacatatatgaaactgactttcacagtgcctggcatatggtaggtgctcaatgaatgtgttttcctattctcctgcatccttccagactcctccctaaaaatgcctctgcagttttaagcctctctggaagagaccacattctttttaggtgacagctatgttatcaaataatgttcaggcagaaacaaaccactgaaaaggaaaattacttagagattagagaagagtgacagcaagaatgagaaaagtgttgttctcaggaaaaatggatgaataccaaaaattaggtttacctgattcagactcctaactgattgtcaatctcttcaaaaaaagccaaaactgtttgtagtgcatggagatttttccttggcagtcagtttgcttctcaaaagttctaccattatggactcagaattgtcaattaatgcaagcatctttaaagtgccacttaatgatgagaacacatggacatatagaggggaacaacacacactggggcctgtcagagggtgggaagagggagagaaacagaaaaaaaaaataactacaataaagggccatttaagatgcatcagaaaacccttctttctatctcattccctcatacctactaaaggcacctctcattcctcagtgtgctggtcaaaccctatgtcttccaggaaactctcctagatcctctggggtagaattattctctccctccaccttaccattgtgactcttcatttatgagcacataataacttatcattagagacatttgtgtgtgtgacaatctctgacaaactatgatgctagaaggcagggaccagaactgttcatctttgtatcccccaccatgtacaaaatagtgtctgaaacataacaagtgctagatcattgtttgtggagtttaagagtgtgatgatctatatataatgcgatatacacattcctaaaaatcactgccctatgcaatatcttgtaatataaaccacagggcatctgagaaaatatgggattaggtgccatgcatgtcagtgacacataaaaacaagacaagaacctggaaaaaagagtagcacacattaagtggttaagaaatacacaaatactgcagtaactattgcactttacttgaacaaaatccgaagtttgcttgcagaagtgggtgtctggaagggttgtagcttgtgagtcattgtaaagtgttgaaagaggattttccaaaatcagaaaaacaaaaatgttgttaacagtagatgtgaaggggagtgagggcagtggatcataatacacccaaagactttagttaaccgggagacatttgaggtgcacagggtgggctttgtgtattcctttgatgtaagggccagctgcaagggctgtagttttctgtgtttacctagtgcttctgaggatgaaattgtacatttatgaacatgaacttcatatcatgttcaaattctttctttatatattaatcgtgttgaagccaattcacattttcaaagtgtagcagaatcgacttaccatattttatatacagtgtgaaatgttattgattttgaattgaaaatcgtcagaaagctttacatcaaaacacattctcaaggttacaaatcaaaaatgagggctatgatctcttttcaagatgtaattaatgtaggtaaatcacttagactcaccccattcttctttttcattctctaaaatggagataatatgttgtcttcttaccagacaggtgcagtgtgaagactgggtaatattccacagaccactgaagatgaaagtcatttagataaactctgaggaatgagcttttataagcttcataacaaagtcatattctttgcatatcaaagactgagttttgtcaacagatatgtttgtaatgtctataaaaagtttagtagttgaatgaaagtcaacattttcatataaagtatacaggtcc

SEQ ID NO: 1885202 - DNA, 4001 bp, Homo sapiens
agtgtacttccatatgcagagctaaaatagacttggatggttgagaagatagagactgctctttaagtgccagtacgggaaacacttggttacctgtcttctggggccgacttatctgaaagaatgaggtgggtttacatgtttggatatttccatctgatttataggctggggatgggatggggagagtctggagaccgccagtgttgcctttcagtatacatgtacacagtgggggttcccagtgggagaaaacactctgtaaaggggtctgatgcaccaggccagtagagatagcatatgttgccactgcattacaataagggcaactctcaagaagaactgggagacagtatagagcatgggcagggagtcaaacagatccaggttcaaatcctgcctctatcacttacttgcccaataatcttggcaaaattacctgaactctttaaattcaaaaacagggaaactaataataatacctccttagagtgattgcaagaattaaagtattaatatacgtccacacctagtaatgtgtctggtgaataaaatgtgctcaatgtatggacactactgtgtcaccactagggaaattcccttaaatgtaaatgtttttacagatacgttttttagcatggggtaaattatatggaccacaaaatggccttggctaaggcgttttgagggaattatgaagttgtcttatggtaggaatacatcttgataagaaaggaaaaatgtaaatgtgagcatccacgtgtgatcagtgagaatgatgcagaatttaacatgcatttttttagatttgcttaatggcaagactatgcgatatctacctctacctgtcactacctctaccctgagccgctttatgatagatgtgttcctacaaacttgtgtaaaactcagttttaactctaagcatcacttctctgcactggaggaagttttgtaaagcaaataacccccacctaatctatcttgctttgaaggctgaaaccttctcctatcttcgagtggacaggcatgtgttctgtatttttttgcactgggctatcaccctgagaggtgagccataacttctacccactttggtatgctccacagcaccctttccaaaactgcaaaagccaactgaaagtatgggcaataagaaaatattaaagaatcgacagagtaattattggcaccttgaacacactagtgtttggggatgtttaattagatggcaaggtagatttaatttttgaagctcttagatcatagatcttggtcgagtccattctacgggaagataacaagggggcattgactacctgctgcactgttttcaagcaaaacccacactgggcgggctctgggtgccatctccacaaagccccctccccaagggggattcttccacaggggaattttctcaaggaaggtcccgtgtcaggaatgctgctcaggtacgggttcccacgtgcccacacgcagggcacgggctcacacggcagggcgggctgcctctttaaaggcgcggacctcagggacccccgaatttggctcctcaagtctaggcatcaaactttctcctggaacaaaacctctttcaacccacatggaggcaggaggaggacggagccctgggatgccatcagcggcggcccggagacagcgctcccacccccgcccgcttccctcggtccccaccctcttcctccgagggaaggcggcccagaccgcacagccccgcccggccccacccacccactccccggcagcgagcccacagcctcacaaagctacctcccgggcgctgcggttccccggggcgaggggcaagcggggctgggtacctgaggaagaggccaggacaccggcgcccaacgagacccacagcatcgccccggcgccgccgccgtagttgccaccgccggaggctacttcgctgcgccgagcgctggagccccgggaacctggtgccgccaccgcctgcgctccctgcgctgcgctgcgctcgctgcgcccgggctctgctgcccggcgaccgccacggtcaagcggagccccgccccgtgcgcgccgggcgagctgcggaccctccaaggacgcgccgccaccccgattggctgcgggagtcactggccccgcccctgctcgccgcgctcctcccacgccgggggcgcgcgctgctggcggcccagagactggcggcttctccaggggcgtcgcgggagggtgcggtccgcgctgggcgaggcttcctgcgggcaccggcgcgctcggcctccgctcctgggcgctgcagttctccctctccttgccagcccagagataaatagacggccagaaagaaaagaaaaagagaaaacatctctagagctctgcgcggggagggcagtggccgcggcagctgtggtgtgaaatcttatttgtataaattcgtttctcacggaagcccaggaaaggctgtctagggtgaagcactggaattgtcaccaaggcttttttgtttttgcttgttttttaacctgaaggtgtccttacacacctctagacttctttatcttatgaagaaactaaatccagttaaacaacttgtccaaggtcatagagctggttacagattgattctgtatttcaatgctaaatcaaagctgcctcagcgtttatttcttttctgtccagagaagagttgcattctcatatgtaatgctatgtatactgtatagcaaacaatcaattaaaaatatagagatagaaagtagattagtggttgttggggtgggagggctggggagtgattgctaatggatgggactctcttagggtgatgagaatgttctgcaatttgatagtgggaatggatgcacagctctgaatattctaaaaaccactgaattgtacattttaaagggctgaactttatggaatgtgaacagtatctcaataattctgatgtttaaaaatgtattggccgggcacggggctcacgcctgtaatcccagcactttgggaggcagaggcaagtggatcacgaggtcaggagttcgagaccagcctggccaacatgctgaaaccccgtctctactaaaaatacaaaaattagccgggcatggtggtgcgtgcctgtaattccagctagtcgtgtggctgaggcaggagaattgcttgaacccagaaggcgatggttgcagtgagccgagattgtgccactgcactccagcctgggtgacagagcaagactccatcgtgacaataaaataaaatataactgtattaacacttgagcccgggtggctgaggctgcagtgagctatgatggtgccactgcactgcagcctgggtgacagagagagacactgtttcaaaaaaaaaagtatccagagtgatggtgctgtggggaaatccacataaacacatatttggagtatgtcacaattctttctttgtgggcagaaattctgacttatgtactagcatccatccattcattcaacaatccacatccatgtttatcaaattactctgacatgggtacaaagataaataatgcatgatctctgtcatcaaggagttcccagtctattgaggggacagtttataatataataaggtgtcactctagggaggtaaacgaagtgcaggtttaaggtgctaagacaatcataaaggggctgaaggatgtgtaatgtttcagcagtggccaaagtggctgagtgtgagaggtgtgacaggaagtgaagctggacagttacaggacagagtagaactgtggactagagctcagttaaagaggcacaggctaattaggaagtaaattttctattccttctgggtcatttctatccctggtgtagtgtgtgattttggttaatggtctcagtcatcatcatataagcaaacaatggtaacaccaactgacttttgtttctacctttgtggtatgtataaacggtttttgtgcattgcctcctttgaagctcagagaggtgaaggggttgtgctcaagg

SEQ ID NO: 1885203 - DNA, 4001 bp, Homo sapiens
cttgtggacttgggatgctaaaccttcctgggtcagctgatacctagagatagcaaacatcttgcccatgagctcgcctttgatattcaaaccaaccaatcctgagtccacgccactacctgcttccttttatcaggctcctgcaatccagaacactatttacctgccctgaatcactccagggccaggtactgcataactaggaaccgtccctataccacagagcctgctgaaattatttaaattagctatcctaaagctgcttactctgtcttgcctgttctttccatggaaaccataataaaggcccttccccacattttccccgtatttcctctgcctcctactgaccctggtgcctccccaggtagcccagtgtggtctggcatgcctgctcttcttggaactgtgacaaactatcctctcaatgacagtcacctcctgatctgttggcctcgtcgtacttgaataaaaccaaaaccccaggtacattttcttaaaaagctgcctttgtaaacttctttcttagttgaactcttcctgccatctgctgccccccacttcaccttgcaaatttaaggtttatttggagaggtgtgagggtgtccagcagagccagattttctggcaggggacggctaacaagccaaaatccatgaggatactaagccacctcatcagccagaacttacttttaaataaagatgatcagggataaccacatagaacgttgtaaatctgcttaatatcatatgactatattgaatgccaataatactccttaagcacaagctttggacgcttccgaaattgctattacaaatgattaaggcctccgaggtaatggaaccatttgaattgaaacacacaaacttatttacagcattctaaaatgttaaaaacaaatgaaaacctgccgttccatcctttcatttttcactatggcctcttaatatggtatatatgctttagatagaaataactgctgccagggagcagctagtgtgttaccaagcagcttcccttcccacatttgcatttacctcttgtctcttcggttgtagaaagaatcttgatatatggaagtgagctaactgaagctgaggttaataaaagcaagtattaaaagaacataaaagggacttttctccctgtgactcaaacaaacaaaaaaaaaacaataagaagtatctattttagaagtatttcatgtttgttaggtaagactgtgagaatagaagatatgaacttttgccttatgaaagttactttactacaattttattaagaaattaaaatttgtttaacaccttttaattcaaaatattagaaaaggaaactttctattgattgttttatgatcatcagttttgtttccataagaaatacgcccatttattattaccttaaaaagaaactgcaggtagcaggattttgctccccataactagccctatcagattcaacattactgcccaaccagtgtctaaaatttgacttgtagcctgcataaatcacaatgtcccctgaaaccacttgtttctaggaggtattttgtttgatcgctccttgacccttttccaagaaacctaatttgcccaagggagtctcacactggaaaacagtgtttgcgtctgcttagggaaatgtgcgtgaaataatgacttatttagaactgagaacagaatggaatggaatggattgataagccagtttgaacaggcagagagcaacttgggcctctaaactcttataaaaggagctctgcagcaaagcactttgcctagactgtatctggcaaggcccatcttcattcaacaaacattgtctctgtgaactctgtgcaaaattcttactcttataaatgccttaaggcatgccatttcattttaagtttcacttacacttctaagatggtgcggatttctcgattcagccctgcagaccccagtgtagaaattgctctccaaggtatgttacccgttttaaactcagttgcgtccttttagatggctgcagaatgcttgttggtggcgatgccgctctgagttaaagtgctttcttggttgccaggagagttggcgagtgtgctgatgcatgaattacccaaagagagggcttgactcagcttctttctcacttactgaactgaaaatgaaccagcagtcaaaagtagggaggtgacatctcatctagatcaatgaagaatgagttgaggcaaaaaagggggagaaaaaaaagaactgtactactggattgctctttgtgctgctgcatttcctgtttcttttgctttttcttttttctcttcacttttctcccaataaaatatagtcaatttgtcttataactatagcctcaaggctagtaactctttgaaatggcaaagatgcaaacaaaaaatgctcttaaattttaaaaacctagagctaagttgatcttcatcttaatctttatttgccgtttgaagtttttttaaaaattaaaccattgacaatatttaaattggcaagcctaagcttaaacaaagtcctatttaggtacaatggtaatgagagttaaccttttttatttttattttaaatctgtctttgcacaattagcaaattattaaatgacctctcctgcaaagtttgcaagcaattgcctgttccaactaataagagaacatgttttacaaggttcatgttgattaattgacaaatgctgataaaatcaaagcagtgcaaaaatgcagtgcaccagctgcagcataaattacttctgttcaataatgtttccagtggctatacatttatggtttacctttcaataaatattactgtcttaattgaaacatccattgtggaaatttatctctgaagatgattgtcaggaaccacggctaggactaaacatttctatatctgtatatgcttttctgctcaattaaaggcattgattgctgtgaacattttaaagatggatgctttatgttttgtatgaaaggaacacaaacacattttaatatacttggaaaatcatatactcttgattgacctcagtgttctctacatttctgatagcttcaacaataaatacaaaatataacttcaaaactactagccttacaccaatccatcagctgttatggcagctatgaaggtctccattagaagggctatagctggctgttttatgctcatgtacatttcatgtatgcatcagagatgcttggccagacccagatttctgcttttgcatatgaatgagtgaaaaaggtgtcaaaaagatctcctgcattctggataaaacccaaaggtccagagaattccagtagacagggaatgtaagtcagggcacagactatcttgcagggttcctacccctctcctattgtggtccctgtccatctgatagacttccatactctagtgccttaagaacaccttggcatgtaaatttaggggcccaaccaagctgatcctttagtttagacatcctaagatgtcctgctcatccacactgctggaaaagtagatatcctccaccaagtgacatcgacatacttttctcaacaaagtcatttcagttcagcaaatatttatcaagcctactatatgtcaggcactgtgctgggcccttgggatatacacacgaatcagacagtttatccagaagaatcttacaatagacagtcatatcctcaacatttgcaatgtgttatttaaaagacatctttctataatttgccaattttttgagctcctattttgtaccaggcattactctaggtgttcaagaaatattctagatgttttctttctttggtattaatcagaggccactatgttctcatggccctctaaggcaaatttcatttgccagtattctgtttgagctaccccacttgctgattaccagttcgtattgtactcaagattatcgcagcttccagacctggattgagattagggtttgactggtaggacaggactgaccagagactatcattctaaact

SEQ ID NO: 1885204 - DNA, 4001 bp, Homo sapiens
atgctgtacctcatagagaactggggggaggggggaaatgggcatttccctccacagcccccaaagtgcctgaggaaagtgttgataaagaagccaaactctgtaaaatatttgaagagatttattctgagccaaatgtgaggaccacgacccatgacacagccttggaaggtcctgagaacatgtgtccaaggtagttgggtcacagcttgattttatgtattttagggggacagaagttacatacagacaccaatcaataagcataagttgtacactggttcgttccagaaaaggggaaggtgggggcttccaggtcataggtggcttcaaagatattctgattggcaatcagttgaaagagttattatctaaagacctggaataaatggaaaggagtatctgggttaagataagaggttgtggagaccaaggttcttgttatgtagatgaagactcataggtggccacccttagagggaatagatggcaactgtttcctcttcagacctttaaaaggtgctacacacatggccaggcgccttggctcatcctgtaatcccagcactttgggaggctgaggcaggtggatcacttaaggtcaggagttcaagaccagcctggccaacatggtgaaactccatctctactaaaaatacaaaaattagccgggtgtggtggtgcttgcctgtagtttcagctactcgggaggctgagacagtagaatctcctcctgaggcaggacaatggcttgaacctgggaggcagatgttgcagtgagctgagattgtgccattgcactccagcctggatgacagagcaaaacaccatcttaaagagaaaaaaaaaaaaaaaaaaaaaaaaaggtgctagactctcagctcagaaaaagacctggaatggtaagggggttctctacagaatgtggatttccctgagatagctttgcagggccatttcaaaatatgtcaaacaaatacaatttggagtaaaatcatttattttagggcctgctatatgtcatgtgatcctatactagagaagtcaggttggaaactggtatcttattgctacaaagactctgtttggtcagcctcaaggtctcttaacgtgaatgctggtcagctgtgcccgaattccaaaggaagaaataatgaggcgtgtgggacctgcttcccctcatggcctcaactagtctttcaggttcctatggaattcccttggcagagaggacgggtccactcagtgagttgggggcttagaattttatttttggtttacaagagagtgatccgccttttgtgatctggatatggcaagggacatggcagtcagggagcataggtgagggggagcctgggtgagggtgaccagagcttttaaccctgtcctccctgccttccagtgttcatccgcagggagcaggccaacaacatcctggcgagggtcacgagggccaattcctttcttgaagagatgaagaaaggacacctcgaaagagagtgcatggaagagacctgctcatacgaagaggcccgcgaggtctttgaggacagcgacaagacggtaagggctggggatagcctggctgttggtaaggagctcaggccacagcgccctcgctggccccgctgctccgtccatccaggggggcggcctggaggaaggggcagcgtgcgcgaaggctttcaggggcggggcccagcaaatcgaggcctcggcggagtcctgcccacagggacatcagtgccgcccccgcgctgactccttcccggcgaggactcagcggggagggatgcgcccaagtcccttgagggtcacagggcttctgccagagttaagttctatttaaaaataaaatgttaacctaaaaaccaatagtcatggtctcggccagcgcctcgccgagttgcagtgagctgagatcgtgccctcccacgcccgcagcccgcgtcctgccttggcctccgtagtcgctgagagccacagcctagagcgccagcgcgcaggcgcacaactgacgccaggccacgaacccagtactgctcctgcacagcagaagcactagcactgaggccgggcggcgaacccggcactgcgcctgcgcagcaaaaggacacgcactgaggccaggccgcgaacccagcacggtgcctgcgcagcaggaagaccggcatccacaccggacgacgaacccagcatcgcgcctgcgcagtaggaggagagcaatgccaccaggccgcgattgcgcagccgcagcagccccgcgcggaagacgctaccctcctctcccccgaagaggcggggcttcgaacgaacctggaaatggccgaggggtctcgacttcctcaccccaggcatcaggaaaggtgcctgcaggacagggctctgaagtggaagtgggcggtggtgatgccgaactgacaagaatgagctgaagagaagaaagtagccgagaagggggccaagccggagctcagtgagcaacagctaggccagccgcggctggtgccatcagccacaccactaactgtggacccaaatggaaactttgaggccccttacaggtcccccagcgcaggccaccgccgaaggttactggggaagacccctgcagcttccatgtggacattactcgcttgcttcatcccggagtgcagtcacctgcagcctgggaccacctgactgatgtcaccctggagatccatgccaaaagagctggggaaagttcaccttctaatgacccctgcggaccagggtgaagttacaagttatggccaggtcaaggaattataagtcaataaataaactgcctcagggagacgtactcagagtccaggaaaatctaggaaacaccaagaagggcgagcgcagcatcagcccctgcaaaattgcactgctgcctcctggctcacatgttgccccatccttactttagcctcaaaggcaaggagacccaatattatttgagtacttggatttgatcctgagtgactttctgagaaagcagtgtatcatctgccctaagatcaccacatatatgacaaggtttttggatgagttgagatttctagacattgaaaccctcatgatgaacgtcatcccgggtagcaggggctaagcctttcatcacctgctacaacaagctggacattaacttgtatttgagaattgctccaggactctaccttcagatgctggttagtagcattgactggatttatgaaattggatgccagttaaggaataagagaatgtatttgatttgccaccctatatggtctgtgcagactgtcatgatctcattgaaatccaagaaaagattatgtcagggatgaagcacatcacaggtggttacaaggtcacccaccatccagatggctcagaaagccaaacctatgggttgacttctcctcacccttctggagaatcagtgtggtagaagagcttgaaaaagtgctgggtgtgacgctgccagaaactaacctctttggaactgaagaaactcaaaaaattattggtgatatctatgtaacaaaagcttttgaaagtcttctacctcagaacatattcaggcgccttgataaacttgtcaaggagttcctgaaagtgacttacatcagtcccacatttatctgttatcacctgcagataatgagctctttgaccaaatgatctctctaagagggtctcactgagcactttgagctatttgtcatgaagatagctgaatgtttccatgcagcaacagcagcagctgttgacaaacaagacaaggccagcaaagatgatgaggccacattcatagatgaaagcttccatgcaaccctggaatatgggcttccgcccacagctggttggagcgtgacaatcaaatgtgttaccatgtttctcacagactcccacaacatcaaggaaatatttctgactcctggcatgaaacttgaagaaagagaatgtagcagccactaatacaatggaaagcgcaacattgacacgtc

SEQ ID NO: 1885205 - DNA, 4001 bp, Homo sapiens; identical to SEQ ID NO: 917219

SEQ ID NO: 1885206 - DNA, 4001 bp, Homo sapiens
ttacactgttacttctagctcttaaaacagatcttctacattcaaatctccctatcatgaagtaccaaatatatttactttcttgggtgccatgtttaaatgtattttttactcatgttcaatgatcatcatcccccttctcaatcctttccattacaaaggtgtcaaaaacaagatacttgacatacgaaagcaatggggaaacagattaaatcatgagtcaaaaacttctcaaccaattagttaaaatgttgaaagaaaggacaagctttctgaccacctgttacctaaggccatgataatgcttctcatgtaaaggtattattccataacatccttttactttttttctaataatagtattttaatttccagtattttgcatattatcttaattatattaaagtaccttaaagctgtttttttaatttttaataatgccattcactaatatataaatttgtaaaactatggaaactttgaggaagaaatttcaaacttaatatggttggccctccatatctacaggttctgtacccatggattcaactgaggatcgaaaatataaaaataataatgatagtaatcataataataaataacaatatgacaataagaattaaacaccaattttaaaaatacagcctaattactagttatatagcatttgctttgtattcggtattatgagtaatctagagatgatttaatgtacatgggagaacatgcataggttagatgcaaatactatgccatgttaaatatgggatgtgagcatctacagattttggtgtccatggggatcctggaacccaatccctctcaaataccaagggacaactgtggtcaattagaccacttaggacaactgtggtcaattagaccacttctgcattacatttgagccagagagcaagagactgaatttttaacgttttttataactgcacagctcttaccatcaatgtcaagagtatggggaaaaaatgaatgaatcatgcctttatttatcagccaagctgtgagagagtagtcatcagagtactggtccaacaaggttggcaattaatgatgcaataaagggtaaacaattaactagtgtaattaaaaagattctgaatctcatgtctaaatgttaccccagacagctggatcatttgcctggagaaaaatttactgtgatttttttacaagaaaaaatagactcaattttcattttcatattccctgtttagatgataaagaacgttctccagaaaatatacattaagatatttcaactctgctaaggtatggtatgcaatttaattttgaatattctgtcaaaacattgttcatctgtagcattgctttcctaactgtgggacgataatttcctgtgtaacaaattcctcagaaaggttcctaaggaaacgaggcaagaacaccaaactaattccaggtttaacatgacagcaaatggcacagaggagggaagggaaagctcactcacgggagacacgtcataaatgacagcctctaaagactgactgtggaataaggcagctgtcacatatacactagcattaatacttgcctttctcttctgtttcatccttttgagaaaatatgcaatcacgtattgtccatgatgttctaatatagggttagttatatttttcttttgatgtagcacgatatttatttacaagatggttgtaaggatatagtgtcttcagggttaaaaacagaggtaccaggagcctagaagagcatggattcacacataaactggaacaacagatttttcctttctttccttagataccagaagattaaaaagccttacaatgtgtgtactgtcctccatatctccccttccccaaatggtggaaggatcgatttgcctctctcttggctcctaactctcacagacaaggctcttacaagacagcatgacttaccttcactaataaaagagccatcagtctaccagccactcctctgaaagcaggaggaataaacctccttttagggactgcccctttcctcagctggtcctgtcctgagaatgaggaagtgagggcttttgtcacttgaggcttttttgtcacctattatgaggcaatagaaaatacaaaactacacagttaggtattcaagtgagcttaggggcaggcacaagacccacacacacaccggtgactcagggcttagttagttaataaccacatttctgaagtatattaataataatattcaagcaatagtgacaggaaatgtgtgaagtgacaatattaactcaaagagctagcatccctgaggcttactctgtgccaggctgggggtttcgcattcttattttactcatcacagaaaccctctggaacatgcactctgtggttaccatcttatagatgaggatcggggtgagagaagattaatacattccccacagtctagatcatcaggagaaccaacaaatcttgggcaaggacccaggaagcagaagcagaagcagcacagagccggtctgcttttttgtagttgttgtttttgtttttttctttttgagacagggtcttgctctgttgcccacattggagtgcaatgatgcgatcatacctcaatgcaacctctgcctcctgactcaagcgatcctcccacctcagcctcctgagtagctgagactacaggtgcacatcaccatgctcgactaatttttgtaatttttgtagagatggggtttcatcatgtttcccaggctgatctcaaactcctggactcaagcaatctgccccccttggcatcctaaagttctgagattacaggtatgagccaccatgcctggcctagtctgactttaaacataatacacaggtgattttatataagttttaggaagcactttgctttcaaagctgtcttaaataatttttgtgtttgatacaaaaggcacttaggagagaatagtaagccttgaaattaagatcgttaaacattaacattctgtaggtattattttgctaaatatttcaatatcattaaaaatgaggaatttctcactgaaaaaaatggattagcccttctgctcatgagatgggatttttttaattttataaaaaaataaaatttaattaggaaaatggaaatattttgtaacacaaggaagaaaagcagaatccaataatattctgagttaagtattattgtgtatatgaagggtacttaacagtatttttctagctatgaaagtcctcgcctgatttcaaaatatcctttaaaatattcactagccaagtgacctcaggtgagtctctctaatttgttgctgagataatttaagtgaaaatctttggaaatggcgaagctctttatgaatgtcactaacattaggtgatgttattcacagcccttataagcccatcaatctcaacttagcatttacgtgacgaacaatgggaggcagataggatgacactaacgggaagaattctccccagttcaagttctgatttactgaatggaaaatatatctgggcaaggacaactcttaatcacagtaaagggccttttcttgctttagaatgaaaagaacatagtccttttctgctacgatctctttaatccatgatagagcttggatgcatgttcatacgggcatgctttccaccagctaccggttacatgcaacaaaatttgaaatgtctcagaaatgtgtcccctagccccctttaaacaggaagagcaaactgatttacaaatgcaggatgctctatacagtgtaaccaattacaggaaaaagaaaatattgtagttgaaaaggaaaaataaaaacattcaatttcattttaatgtattgttaaggaaaaggaatgcatagcagtgcatctcagatgttattatgcttgggcatcccctccagagcctattgaaccatagattctgattcatgggatggcgttgggtctcagagtgaaaaagacaattccatttcttgacatcagtggtccttttcattc

SEQ ID NO: 1885207 - DNA, 4001 bp, Homo sapiens
aattttgaatgttctctttacacaaaaataatacctgtatgagggaatagagatcctaagtaccctgatttgatcattacccaatttatatgtataaaaatgtacccctaattatggccctttatgttgtaaaaaaattaacagaaataaatacatagtgctaaaaatcacagggaaccacaaaagcaatgaatatctaaaggaatcctgagaaatacaatcaaagtgagaacccacaatccttgatatcaaattaaattgccaagttgtagttatgcagtagatatatggtacttgcataaaaagaaatacctagaactatggacaaaaacagggaggacaaaaacaacacaaatatggacacagtcaactgactttgataaagaacaccacaatgtggaaggcagagtctgatcaatgaatagctttgagaaaaatgatatccggatgcaaaagcgagaaacaggacccttattttacacgatgtatgaaaatcaaccgccccccccatcaactgaaggccaaaacaaaataccataaaccacaaaatgttttttaaaaaattactgtgtttacttaagtaaaacacaggttgagcatatattttgggtcacttgaatctctgttaacctttgcaaagaggaaaagaaacaaacaccctggaagaaaaacctcactgacaattaaatgctttgttactgatgcatattttctaatatgggtgaccattatgacacgcataaaacgcaaaaaaaaaaaaaatatgggactacatcaacgtgaaaagtttctgcatggcaaagaaaactactttccaaataaaaaagcatcccatagattatgcaaaaatttcaggcaatcatgtaattcacgaggagttgtcaactaacgtgtacacaaaaaagagtacaaagtagaaaaagaatccaatctaatatttcgcaaataacctaaagagacaattctgcacagatataaaatcgaacaacagataagagataaggtcctcgaaattaactattcattagaatactgtaattcaaaaccacacgcagatagtctcacacttattgaatattcctagaaaaattttttaaaaataggagggtctgggagccgtggctcacgtctgtaatcccagcactttgggaagccaaggcgggtggatcacctgaggtcacgagtttcagaccagcctgacaaatatcgtgaaaccccgtctctactaaacataaaaatacaaaaattagccgggcgtggtggcgggcgcctgtagtcccagctacacaggaggctgagacaggagaattgcttgaaaccgggaggtggaggttgcagtgagccgagatggcgccactgccctccagccttggagacagagcgagactccgtctcgaaataacaaaaacaaaaaaaattggaatgggggtttggttttggagaaacgggaactcatacactgtaggtggaaatgaaaattagggtacacaccatggaaaacagttaaatagctggaaactcctcaaagaattgaaactacagatgtcccctgctctagcgaggtctctttctaaaggtcctgaggcataaaaaataaccctagaccccagctcagaggcccgtggggctcggagggacccagtccagcgcttcaccgccggctctgggccagggcgctcctataggctggacgtgggtcggaccggggcatagccttcccggcgggggtgtggacgctgcagaggccaggatcccacaaccgccccaacgctgacgactcgggcccagatgcccacttagaagtcagggcccgaaagcagggagcggccgggaaggagtagggagacccagagggttccaggtggggttcatccccctccacttaccgccgaggcctgccacctcctccaccaacaaacggaagccaccacatcttctccgagactcgctctgaccacgccgccgatgctgcccgggcctcgcacgaagcgcagtctcggcttccctcggggcctgcatgctggcagcgtccctggcgccaggctgaagcaccaccccctcttaaaggggccgcggctgggactgggcagaagcagcttcgggttgcacaggctgagcgtctgcccagccccaggggtggaagaaaggcccccagtctgtcatcctcccgggctctagggccctagaggtcgcagaagcccctcctgtgaccccagcccctaaatcggctccctttgcctgaggagcgcccgggacctgcccctgccctcctcgggacctcagcttcaccatcctcaaagaaagcggcctggctggagctctggggtccctcaagctcggcgcctcaggatccagggtgggctcccctgcccctctgcagagggggcccaatagccacggaaagctgggggctggagggacagtcccgagggcagcagggcgtccttggcctcaccgtctacattcgtcctgtgggagcccgggggcgtcgctagggcccagactcctgcggcctcaccagggctgcctgggtcaccgggctccccaggaggcagggagggaccctggggtccagcgctgcccccacctcaactccattctgcgtcagcatccgcgaggggatcctgtggactggacccagacccactccttcccggggagcgggacccgcatcggtctctgtgacacccacgggaggggccgtgctgacctctcccggggatctgggggcgaggtgggggaatctcggccacctcttgaagctcgctgagccccccaccccagagagcgctcaggagcaaaggaaaggacggagagcccacacattttctatctttcatttccgttttttcttttttcccccctccaaaatgaaagacgtgtgtagctttgtcccctgtacaccatccattccccatggccgctgtgcggatccagcccgctggttgcctctagggtcctgggcgcccggcggtccgcatgcagcccggggcctgcccaggtgaggtctgcggccgccacagcgctgaggtcccgcctggccggggcgcacgggccgctggggatgctggctgcgaggctccggggaggtggagcgggaggttgtcccaggccctggctgcagagctcttgatgtcacgcctgacaccctccatccaccgcctcggggcagcgcttcagagccccggcagaggcaagaagtcgatcactttgttcttcattcgttggaaaaatggaaaagcacattataatccctggaacaaccacttcagagaaagagcaaaaaattaaaataggattgtaaatgacacactgaaataagttgattttaaaaatggtagtcaatggaaaaacaggatcagaagacaggagagacagggaaaacaaataagttatctgactgaaacagaattagaaactaacaacagtaagaaatattggacatctgaaaatatgtgaaaatttaacaacccacctctaaatcattggatcaaaaaaaatcacaagataaattggaaaatattttgagctgcactccagtttgggtaacagactgagaccttgtttctaagaaaacaaaacaaacttcaaaaagctataaaattaaatgccaattttcccccttacccaaactctccgtggctctcctttgccctcagagtcaagcccatgcttctcactgtgggctccaggacctaggtggcctgaccagtgcacaccctatcacgatctcctcctctgcccacttgctcacgctgtccagtcacacacactatttttgcaaatgccaagctcctgatcaccgctgggcctttgccactgcagttccgcctgccaggaccagtctttccctagaccttcccattcctgcctcttcctggcttggctgcctctttctggtgcttcaggtctcagatcaaatgtcacctcttcagagaggacttcattgaaatctctgcctaacacagcccgtatcaaggtcaacacttttctttttagac

SEQ ID NO: 1885208 - DNA, 4001 bp, Homo sapiens
tgcagccagatcctgtgtcaccatgactcagcatcgaacagacattgattgcacagcataaggagcacacaggaggcaaagctggtctgtcacatggcaattagtttgagacaccacacctgtattcccacagcacatctcattcccccatatctttggctaccacagaggaaagcagaatggatctgggcaatttattgtcttacttttgttgaggagagggagagcagcagaatgcatgctgttccactttttctgtgctgcagtgggcatattggtcattgctgggagcccttcaatgaaggacagtgacagaacaccaaaaagtgtcaggagcttccatgtggctgaaaaaccacattcaaaggacatcagccagtgttctagtgttaggctgtgacttgggcatgtaaatgggccaatgattccagttttgcatggaaaagacacatgattagtttttcagtgaggaagtagacaagttttactaatctgttgactgagaggttataatatactcatgatgaaatctctctggagcaagtcctgtgaaacagtgtaatgacttggcacaggatggctggattcgctttaaaaaattattattattcatgtttatttaggtccaaaggatccattatacttcagctttatatgctattaaatttagagatgacacaagtcaggacacatcttacatagttcctttcatgggacaaaagacctgatagaataaggtggcatttatgggcctttaatatcaacattacaaaagaaggggaattgcattttctttatatgtaagaaaataatgactaatttagagtaattctgaaatgaaatcatggcattattgtcaggattggtaaatcttttaagctattatcatttctgtcatgcagctgcattcaatgtcttaagtaggcaatgtgatattttcacaggaattatcaaataaactcagtatgttagcttctcagggactctggagctttgaatatagaggaggagaaggtccgatgaggggaaaaagaccttctgaaccccccgtggtcataattccagggaaagaaggagaagaaacttaaatatttattaactccttactggctgttaagatttttaatgtatttcattccctttaattttgaaagcaattctgtgagttgaatattatttcgatttttttgctaatgagaaaacaagctcagacaaggtgaacagaaactgacatattaaaacccctatcatgtaggtactgtgtaggaagttaagatgtattttctcatttaattatcaaaataagtattattttatgtacgtgaattaaaataggctagattatactttgttaacaaatagaccccgaatctcagtggcctagtaatataaaggtttatttttcgctcacacaaagtttactctgatgccaggggacttcccaagccagttcctcctgtggttccttggcagtcgaggccaagggaagggaattagcaccacgatgcggtcacactccctggaatgaggactccttgcttgttgccgcagggaaaagtaacaggagaagagtgcatgggttcttaaggcctcagcccggaacttaggcacgtcctcttccctcttagtccatcgtccggggtctagtcacatgggctcaccgcaccgtgggcaggctgggaattgcgagagagaagatggatagcagtgaccccaactgggtctgccatggcactgtcacccccattttaaaaatgagaagactgaagttcagagaggttagatcatgtatccttgatcacttccttggtgatctgtagacttagttcttgaaactagatctctctcagtccaaagaatctgtttttttgccctctactccatcttacccgacacacactccgagtaatttggtggtttggagttaggtgtggatctgtggtcgccagccttcaagatggctcctgtcatccttgcctcttggggttcatgcccttgttgttccctctgtcagtgaatagagctgacctgtgtaaccagtgtggtattgcagaagggacaaagtgtgacttctgggactaggtcataaaagacagtggtgttttcatgtgtcagtgctctctgttggatcacttgctctggggaaagccagctgccatcaggtggggacactagaggagccccagggagctcccatatggcaaggaactgagacctgctgccaacacccaggaccaatttgccatccatgagagtgggccgtctcgaaagtgggtgagtcaacccaggtcagccttcagatggctgagcccaggccaacatcttaacagcaaactcatgagagaccctgggccagaaccactccactaagctgctcccaaataattcttgacccacagaaattgtgtgaaatgataaatgcttactgccattttaagaagctaagttttggggtaatttattatgtggtaatagataacagtacaaacctttttggattatttcctttctctgtgtttttccctcaactctgggacaattcctgcttttaacggtgagtttttaagttagctaaatgagaaagtaattgccacacaatgttattaaattttagttaaatacatcttattatttactttaatcttgtagttctaggcaagctctgtatgaaggtctatactaaaaaatgatatactctgctagttcagaagagagaagttttgaaatttactttccatcagatgtgtatttttctgttttaagatattacctgcttgagattattttatagtttaaattacattgtgaagttttgagaaagaacaagccaagtacatttttattaagagtttactgtcaggaggaagacagaatctagaagtaaccgcttttttttttttttttttttttttgcaaggagaatgtggtcagtgtttcagccagtgcttgctgctgaggcaggagagaataattgtgtaaagagggggctcccgcagtgcaggacaggaagccaccatgtgagcaccacatccacgtgcaggtcgcaggcttcatcatgtcctgaataccatgccttagcattttatgtgagtaatcttagatcattcatcaaagaacaggttatgtttacaaatataatggttttaaggaatattataattcagcatcttgaccactggtactggtacgacatgttataatatactgtgcttttaagtatttcagtcactcatgatttactctttaatgttgtacaatgtttctgagattgtctctaagctgggcaatcttgtgtttcccagggtaccaggaggggaagactgggtacgagtcagtagtctatgaactccagtgaaaggcagcaggatacaatttctatttgatttaacattctcttaatatcgctgttttaataaccttgtgttgggtgagataaaattttcttaatgaaaaccttttcactaaccattgatgcccatttgctccctacccccattaacaaacacttcctatatatgcactctaaactttctatcttagcttactttttgacagttgggcaaatgacagtggagagaacattgtttagatcaaacaacatattattgttggaaatatggctgtctcatagaaatatagccaagtcagggaaatagtgactatatattatattcacatatacaaattttgtaggtctacatatacaaaaaatacagacacatatacatttccacatataactatatataaactatatataactataattataactatacacacacacacacatatatacataaacaggttggaagtaggagatccccaaggaagtggagactgaaattcagacatgaggaccttagcaaggtgagtgagacagagaactgatgagagattccgtgaaggaacatctaacagattttagtggacaaagcaaaacaaggaatcaaagataacgcaaaagtttctaatgaaaagtcatactttaacaagcatgg

SEQ ID NO: 1885209 - DNA, 4001 bp, Homo sapiens
taaaatgttcgaacccagtcttccatgttttagcaacacaaacattggagacttttgtgaagtgtttttatacatatggtaacaaggacaacaaccaatgttttcactcctttgcacattttggcatcatacctcactcaaattgactcatacgccttctataaataccacgtagatgtctcaaaatggaagcatttattcaaaatagtgtcttttgccttaaggggaaacagttgggctgtttgaacagtctaacaggagctcttctcttcagtgttaaacaagtcattgcactgtgcctatttttaataaaacctttgagcccaactcagtattacctccaggagggactgtggaggtaatactatttacctcctgtaaatagggacagggaaacacctatttacacatctgcctgctcactgccatagtctgtgtggtgttccttaggacttgtgtaccaggtacaaggtttagttatgtgttgaacccgggtactgaagggcatggagttttctgagggagacttctcagctccccgtatacctctagagatgcaatagctcttttgtatcaagaccaactatgtcctgatgttttccctgtgtagttctctagctgccactattttttttactttggtcagaatgtaaaaggtaggatgatgaagagaagggaacaaaaggagggattcttagggacttcctaaacttgaaggcaaaaaggatgaatgtcgcagacatgttttatagggaacagtgaagttcttgtttgattagtctggtaacatcatgtaagaaagtcacccaacaactgctgggcaccactgcctttgtcactgtctcttgacaaaaactctgttcacgacacatggtaggttttcaatacactttaataaaatagtgaaaaataggtatctctaggatagtgaactatgggactacaaagggcaggacgatacattttacttggttaaattcgcttaatgcttactcctttctcaaagcgccaaccaagaatttggctactaaataaagaaaaaagctgttagtggctctttatccgccacgatagggtgctctgaaacccggtcctgcagacattcccttggcccacattttatagcttccttctcagtctcaaggcctgtagtctactgttcacactcgagcctctcgcaaaatacacaagctcaaaagctcatggcgttctccccatctggcattctcggccttagaatagcaaacgttagggcaccattaggttcatagttgccagacccttcattttcttttttaatctttaattttcttcttaacaaggaagacattccgcaaaaaataaactccctcttttgagctcctttctctgaagatggtaactggaactctcattagtaaagaacctcgagttccagttgctttggacggagtttctcgcttagtattttgctctttggcagtttgaaaagcagtaatcttccaacttcgcagctccctgcactcgcgcctaccaccctgatctatttggctttctcctttttggagccactttaaaaggtgcagggtgctgggccgctgtggcctcgggctgagaggcggggagttggtgtccgggaccagaaagtttggcagaagccacggctctgggcccaggccccgggcttccagagaagtgtgtcattatttgttttctgcaaagccgcgagcgggcccacgctgcagctctgcctccaggcgtggaacccctcggtaatccgggtgaagctgggttccgagtgtggactgcttcggctctgaggaggagggagcccaacgggccaggcacgggcttcctcctggctttacccattggcccagagtccccggtcccgccgccgctgccctctgctcacggggaccggccatcaccgcgctcccagcctcggctcgccgggggcttcgctacgcaatgcggcggaagcggcccgttggagccgccgtagcgcgggaagtttccgttgccacggagatgacctctgaccctagggcgtctctgggacccggcagcttgtgctgttgttgctatggaaaccatggcggccggaagccgccgcgcgggagagacttggggcgcgggtcggggctagggctcctgccctggcagagatcttcgctcttccgtggtggccggggaccgggcagtgagcggccggctctgccgcccgcggggcgcgggtttgcaaggtcactcctccggcgttgacgcgggggcaccccatgtgcactgctggacctgagggatgggaaagccacaggtggctgccttggccctcccggtctggcctcccgctagcgggcgccagctctggacccgagacccatctgaaggaaagggaagggagctggcgttgctggtgattctgcccaagctcaggactgggagagaacgagccaagttctggtctcagcttacacactagctactgggagaccctgggcgggtcctgaagttttctgggcttcagtcccctcggctactacaagaaggatattgattagagtaatcccagatcagccccagctctaatattctaggttcccataacgttcacacccagtcctgattgtaagtaaacttccctcaccccttccctgtatctctcccggactatgttaactatatatttaaattgtactctaaattcagagaccatcagagataagaggttgaccttagcgatcacaaacaacctgttccttttacaggtgtggcaactccttcccagtggaggaagcgactgttccaagagccagttttggaattgtaggcacaaacacaggtagaagctttgagccttgggtgaagaaacgcgtattttactggtgacactaggaagagctcctcatgcgcttcatagaattgtgtggttggtgctgaaatagatggcattccatttatccattatattccccagataccttttccttagacagttttaagattttcggggtaggggagggtatcttcactagtttatttttccttctctcatatccatgctattgggaaaaatctttcttaaatcttttttataaacctcatttgtaaattaagaagttgaaaaagattattttcagagtttattacaactctgaaatttatgaattatttcttttaggtccacgtgctttttatcactttttcagtaactacaatctcaaaaaaacaaaaaacaaaacttagtaaacacttaaaaagtgctgctgtgtttgaactgttgatgctggagatacaggggtgaagaagagttcttccttcaaggaattagcaggaaagacaaaagacaggatcaattatgatgtggtgaacaattctgtgtaggtggaccaaggtgctatagggccaaggaagaggggcatggaaaggtttctggagggaataaaactcagactgagtcatgaagaatgactaagagttagccacgtggtaaaggcactggttaggctgtcaaggaagagaaagaagcatactttaagctttgggggcgtcaaagattgtggtgcagaccgagaatatcaagtacaactgagaaatagagggtgtttctagggagtggcaggtagtgagtggggttgcaaggtagtgaggcacagatcgtgagctctcttctgtgtcatgatcatatctaccctttagacaaccattatgactacagcgtggaaaacagctctgggttgggcaaggttgaaggtggaaagaccagggaggaagagcagtgagcagtggtgagcggtccagaataaggcagtgacaggcactagagaggaagtgaagtccatccatcttagtggccagtttgaatttgggaaggaagttgaaggaggagtctggaattttctgattacaggtttttgatttggacagttctggtgagctagtcttctggccatttgccaacagaacacttccatcttcttgagacatggttggctgtcttctgactgtttatattgaggggc

SEQ ID NO: 1885210 - DNA, 4001 bp, Homo sapiens
tttaatctagaaagagaagcttgtctaagtctcctacttgctgttaaaagctacctcggcccctcaatataaacagtcagaagacagccaaccatgtctcaagaagatggaagtgttctgttggcaaatggccagaagactagctcaccagaactgtccaaatcaaaaacctgtaatcagaaaattccagactcctccttcaacttccttcccaaattcaaactggccactaagatggatggacttcacttcctctctagtgcctgtcactgccttattctggaccgctcaccactgctcactgctcttcctccctggtctttccaccttcaaccttgcccaacccagagctgttttccacgctgtagtcataatggttgtctaaagggtagatatgatcatgacacagaagagagctcacgatctgtgcctcactaccttgcaaccccactcactacctgccactccctagaaacaccctctatttctcagttgtacttgatattctcggtctgcaccacaatctttgacgcccccaaagcttaaagtatgcttctttctcttccttgacagcctaaccagtgcctttaccacgtggctaactcttagtcattcttcatgactcagtctgagttttattccctccagaaacctttccatgcccctcttccttggccctatagcaccttggtccacctacacagaattgttcaccacatcataattgatcctgtcttttgtctttcctgctaattccttgaaggaagaactcttcttcacccctgtatctccagcatcaacagttcaaacacagcagcactttttaagtgtttactaagttttgttttttgtttttttgagattgtagttactgaaaaagtgataaaaagcacgtggacctaaaagaaataattcataaatttcagagttgtaataaactctgaaaataatctttttcaacttcttaatttacaaatgaggtttataaaaaagatttaagaaagatttttcccaatagcatggatatgagagaaggaaaaataaactagtgaagataccctcccctaccccgaaaatcttaaaactgtctaaggaaaaggtatctggggaatataatggataaatggaatgccatctatttcagcaccaaccacacaattctatgaagcgcatgaggagctcttcctagtgtcaccagtaaaatacgcgtttcttcacccaaggctcaaagcttctacctgtgtttgtgcctacaattccaaaactggctcttggaacagtcgcttcctccactgggaaggagttgccacacctgtaaaaggaacaggttgtttgtgatcgctaaggtcaacctcttatctctgatggtctctgaatttagagtacaatttaaatatatagttaacatagtccgggagagatacagggaaggggtgagggaagtttacttacaatcaggactgggtgtgaacgttatgggaacctagaatattagagctggggctgatctgggattactctaatcaatatccttcttgtagtagccgaggggactgaagcccagaaaacttcaggacccgcccagggtctcccagtagctagtgtgtaagctgagaccagaacttggctcgttctctcccagtcctgagcttgggcagaatcaccagcaacgccagctcccttccctttccttcagatgggtctcgggtccagagctggcgcccgctagcgggaggccagaccgggagggccaaggcagccacctgtggctttcccatccctcaggtccagcagtgcacatggggtgcccccgcgtcaacgccggaggagtgaccttgcaaacccgcgccccgcgggcggcagagccggccgctcactgcccggtccccggccaccacggaagagcgaagatctctgccagggcaggagccctagccccgacccgcgccccaagtctctcccgcgcggcggcttccggccgccatggtttccatagcaacaacagcacaagctgccgggtcccagagacgccctagggtcagaggtcatctccgtggcaacggaaacttcccgcgctacggcggctccaacgggccgcttccgccgcattgcgtagcgaagcccccggcgagccgaggctgggagcgcggtgatggccggtccccgtgagcagagggcagcggcggcgggaccggggactctgggccaatgggtaaagccaggaggaagcccgtgcctggcccgttgggctccctcctcctcagagccgaagcagtccacactcggaacccagcttcacccggattaccgaggggttccacgcctggaggcagagctgcagcgtgggcccgctcgcggctttgcagaaaacaaataatgacacacttctctggaagcccggggcctgggcccagagccgtggcttctgccaaactttctggtcccggacaccaactccccgcctctcagcccgaggccacagcggcccagcaccctgcaccttttaaagtggctccaaaaaggagaaagccaaatagatcagggtggtaggcgcgagtgcagggagctgcgaagttggaagattactgcttttcaaactgccaaagagcaaaatactaagcgagaaactccgtccaaagcaactggaactcgaggttctttactaatgagagttccagttaccatcttcagagaaaggagctcaaaagagggagtttattttttgcggaatgtcttccttgttaagaagaaaattaaagattaaaaaagaaaatgaagggtctggcaactatgaacctaatggtgccctaacgtttgctattctaaggccgagaatgccagatggggagaacgccatgagcttttgagcttgtgtattttgcgagaggctcgagtgtgaacagtagactacaggccttgagactgagaaggaagctataaaatgtgggccaagggaatgtctgcaggaccgggtttcagagcaccctatcgtggcggataaagagccactaacagcttttttctttatttagtagccaaattcttggttggcgctttgagaaaggagtaagcattaagcgaatttaaccaagtaaaatgtatcgtcctgccctttgtagtcccatagttcactatcctagagatacctatttttcactattttattaaagtgtattgaaaacctaccatgtgtcgtgaacagagtttttgtcaagagacagtgacaaaggcagtggtgcccagcagttgttgggtgactttcttacatgatgttaccagactaatcaaacaagaacttcactgttccctataaaacatgtctgcgacattcatcctttttgccttcaagtttaggaagtccctaagaatccctccttttgttcccttctcttcatcatcctaccttttacattctgaccaaagtaaaaaaaatagtggcagctagagaactacacagggaaaacatcaggacatagttggtcttgatacaaaagagctattgcatctctagaggtatacggggagctgagaagtctccctcagaaaactccatgcccttcagtacccgggttcaacacataactaaaccttgtacctggtacacaagtcctaaggaacaccacacagactatggcagtgagcaggcagatgtgtaaataggtgtttccctgtccctatttacaggaggtaaatagtattacctccacagtccctcctggaggtaatactgagttgggctcaaaggttttattaaaaataggcacagtgcaatgacttgtttaacactgaagagaagagctcctgttagactgttcaaacagcccaactgtttccccttaaggcaaaagacactattttgaataaatgcttccattttgagacatctacgtggtatttatagaaggcgtatgagtcaatttgagtgaggtatgatgccaaaatgtgcaaaggagtgaaaacattggttgttgtccttgttaccatatgtataaaaacacttc

SEQ ID NO: 1885211 - DNA, 4001 bp, Homo sapiens
agtcagtcttggaaaaggatcacactttagattgatcctatctttctgttctgaattttgtcaaaaagatcagtatgatcaactacaaaagcactggaaacacagcagtagcttctgcaaggaggtacagattgagataaacagcgtagctgtaacttcactgaaaatagagttcttgcaagtaattttcatttaatttgcagatttttatcaactaagcactagtaacttattccacatctgatgctatatacttataaactcttgaaagaagaaagtcataaaagaactagctttaactgattagactgctttgttgacaaggaagcatagcaacttgaaaagaatcgttttcaaatcaaattgcaccaaaaagtgaaagagcatagccaaaaaggaaaagtgctgaggagggtgccacgtgccagcttgctgtctctgaggatgctcgggacacatgagaattcgctccctttggattcctggtggactcctttgcaacacacgtgcactgcccctaccccggacacaggggtggagacggaggtagagagtttccgacggtgctgcctccagacacaatttcttgactcttcctgactgcactacacatttctcccagaagagtgaccatcacatttcactgtaactgacgctttctactctaagctcagggagaggagggatcgtgctgccttggtcactgtgggactcaccagagcctggcactgcgtgtattctgcggaatagacggtaatgaaaatggtagcactggtgaggccaagaggcaacaggaagcttcctaaggaagctggcctgatgaaggggcagtgacagaaactggtctggtggagtggcacttgcacacataaagctctactaggcagatcttgctatctaaaccacagagggaaaatcaaccatgctgcaacatgcgtcaacctcagaaacgtgaagctcagcgaaagaagccagtcataaagatcagctacatatgcttccatttctataaaatgtccagaataagcaagtctacagagacagaaagtagattaagtggctgcctaggacagggcggatgggaatgactgctaatggggcgcagtttcttttggggtgatgaaaaatgttctcaaattacggtatttgtgcaattaaaaaatactaaaaaccaccgaactgtacacttcgagggggtgagttatatggtatgtgaattccatcagctgctaaaaaatacatcaaggaccagtaaatacttttaaaacactaaaaaaagttattgaattcaaaatacttgattaatgataggaactctcatgattgacagggcagatctgcctcctggtgcacatctcagatgataccaaatggctgttgctgggggaggataaagagagaaacaattttcacagccacagaatgttaccaagtgaggatgtgcagctaaactcactttaaccaaatgctgcgaaagtaactgaaagcacgtgtgagtatcgctgagccactctgggtgtcagtagcttctttccttgcaggcaaaacacagaggtgataatcaaccagttaacaccgggcagcccaatgagatgaggaggcagttaaaagaagagcaccaaggactcctgggctttgctgccaaatgtcccacttggcttgtaccaacaagcaggattcattcacactgggcttcaccttagttctgcttctaaaatagatggaaattttacagaaatgcctaatggaaagttttatccccaagtttgtgttgtggtatataacagaattctcatcatcagccaacagagagaggattggctcccacaaataacagatgaccagaactaagagagaattcacatttccaggtaaaaggttactttgaaagctgctggctatataaccttctacagcagggactggcaaatatttttctgtaaagggccaggtggtaaacattttaggtttggaagataaagaggcaagagatcaaagatactatgtagttacctatataaccatttaaaatgtaaaacctgttcctagcttcagattgtacaaaaacaggtagtttggcccacaggccatcacctgctgactgttgctctagaggttacaagcttttacgagtaataactatcaaggttggctcctaaattaggactctctcaaacttcctgagagccacaaaaacagatgcccaatactatgataataactaatatctgatagagcctctggtacctaaggtaattttgtataattttttttatccccaatgacaacagtattctacagattgtgtatagatgtccctgtcaacccaggattgagtccctaactgcccattcttgttcttttcattatattacgctgctttctattgtgagcatggctctgaagaaaaacaacactgttttcttcctttctacactcacacacgactcaacacaatattctgacaccagatgtgctggggggcttcataccccaagcagtgctccagtggacaccagcagggtgtcctataatttaactcaatccccacactgtctcccaggagataacatcagagcccacaggttaagggcccactcccacaagactgctcccctacttcagatggcaatcgccagacctaacctgcggttctaaccaacgtgctataaatgagggttcccgtggtccactccttgggttcagttaatttgctaggatggctcacagaactcagggaaacactgacatctacccatttattagaaaggatattgcaagggatacagatgaacagtcagatggaagagatgcacagggcaaggcatggggcatggcccctgcccctctctggcaccccctgcaccctgctccagcacacattcagcaatctggaagttctctaaaccctgtcctttgggggttttatggaagcttcattatgtagatataattgattatatcactggccattggtgatcaactcaacccctctccctaatcacagaggttgggggtggggctgaaagtctcaaccctctaatcacttattagttcccctggtaaccagcccccatctgaggctatccaggagagcctggacatcagtcatccatgtgaaaagacacttctcactgtgggcgaaggattacctaggtgccgaggtaagaaactgaaggcacaactgtttcagtataaaaaagaaaatagagtaagagtagtcataatacaaattagatatagagatgatcatggacattatcaatcattataaacatcatgaatcattagcttttaatattactctttgttgcattactaatataacctaggaataaccggcgggcatagggtcaggtgctgaagggacattgtgagaagtgacctagaaggcaagaggtgagccctctgtcacgccggcatgagggctccttggtcaagcggtaatgccagtgtctgcgaagacacccattacttagcagaccgcgaaagggagtctcctttcattggaggagtcagggaacactctgctccaccaccttcttgtgggaggctggatattatcccagtctgcccgcagtcatccgaagtcctaaacccctccctgtgatgctgtgcttcaacggtcacgctccttgtccactttcatgttcctcccgtactcctggttcctctttgaagttcgtagtagatagcagtagaagaaatagtaaaagtcttaaagtctttgatctttcttataagtgcatagaagaaaacgctgacgtatggtgccttctctctctcagcttcggctacctaagagggaagggcccccctgtcctgtgattacgtgacttgcttcaccttgtcaatcacttagaagattcaccctccttaccctgacccccggtcttgtatgcaataaatatcagcgcacccagccgttcagggccactactggtctccgcatcttgatggcagtggtccctcgggcccagctgttttctctttatctcttt

SEQ ID NO: 1885212 - DNA, 4001 bp, Homo sapiens; identical to SEQ ID NO: 917232

SEQ ID NO: 1885213 - DNA, 4001 bp, Homo sapiens
cagaggttgcagtgagccaagattgcaccactgcattccagcccaggcgacagagtgagattgtctcaaaaaaaaaaaaaaaaaaaaaatcaatgtagctaaaatttaatgaagtgttaactatgggcaagatactatgctgagcccctttcatacatagtgttatttattgtttccaacaactataggaagaaggtacaaccccattttacagatgaggaaacgaaggcttagcaaagttaatagcttactttggggctcaaagctagtaagggctggtgccaggagcgaacatggggccctgccttgagagcccatgccatcgttaatcgcagggcactgtgcagcctacctgttcattcactgccatctgagtcttggcaagcatcagatgggcgtaggtatgaaatttattttcagatataataattgtttcaaggtaaaacctttgggtcttattttacctagaatccatacattcaaagtacaagtgataaaatcagttcagcaactctagtatgcacatgaattaaaaagaagtcaatctggtgagagatttcatcagaataaagtgtataagtggagttggaaatctgagtgattgagtgcttgccatttgggtaagtgtaatgagtttgaaaaactaattgtattgatgaagtatcttagggcctttcagaacatagttctagaagttttatttagtgttgaattttaaaaattctttgtcctaacaataaaagtacattgtagtctttcccttccatttttaaaatgaactgttaatctaggaagtcctgtttgtgtgttgatttggggagttagcccaacatttgctatgttaaatacttattaacatggtttattacttttttctgttttttagacaacattaatcatgaatgtactgggacttgggaaggatcctgtggtttatgagatagttggccaaatcccacctcttccaacataacctgtcattattaaaatataatactcttatttaatcccctggtcaagctaaatgataatgtgaaacaaagctaaccaaaatcaggacacctgatatcaagaattcatgaaatcaagagccattgtagagcaaggaatctaatgcttttgcttcttatccttttcatacaaataaaataagcttcactgggcttagtgagtcttagaaatgagaggtttgagaataagatccattgtggagtgtgtgacattacaaaaacaagccaactaagcagtgtgtactgtccccttagagtgcacacgttcgggctccgatgccccttgaaaagactgcatttctgggagggaaaagtaaaaatgcagataccaccatgcgtgtggaaggcagggaagaaaaagcccagacaagcgtcctcttgttgagtctctttactgcaacgaggctgacggatggggtttttcaaaacgtcgctgcaaccagatgcaaggctgcagctttgcttaccgcagcgtgctgcagttgtgtttatttcagggacagacacaaggggaagcagcagccagagcacacccgggccgctcacgggaagccttgctgaagagagaggatccgcagaagctgggaaattcctcccgcagcctaggcggagactgagccgcggctcaggttgagacagtgggcaggggcagggggcggcgctcccggcccatcccttagccccgcggcggccgtgtgggccggaggctgcctgcaccgcgtcagggaggccggcctagaaaccctccctcccagaagaaagccgatcccagttcaggtggggtcttcctcggttgcgtacctggctggagccgagctggtgggcggccggcagccggcgtttctggtgatgacagccccgaaatgaaagcagcgcggccgccgcctccgagggctgcagggagatcagcgtccagcaaataagaagcaagtcctggacccggaggaggaggagcggccgagcatctctctctgctccgccgtgtcctttagatgagcactcccggccggagccggaggtggatccgcagagctgcctctgggcgcctgaccccgcgctgacatcacaacctgtgacaggcgcatcacgcccggtacctgctcccggccgctgcccgtcctcccagcctctttgtatgccgcagacatggccagccagcaggattcgggcttctttgagatcagtatcaaatatttactgaaatcctggagtaatagtgagtaatagaaaataacctttttgtttgtttgtttgctggatgttgcataaggctggagacagaaaatctcaactggacacatatgtttgtgagccgcggaagtttttctttttttcttttcttttcttttctctttctttctttctttctttctttttctttctttctttctttctttttttgctcccatctgctgtgaaaatcaaaatgtcagagactgaactagctttccttaagtgcaaaggctgcaatggaattacagtagattgtgtttgattaaattttcaagtgaggcagcccttcagactctgggggagctcaggatcaggcattcctggctgcatttcctgccttgatgtttatttgatttgttcaggctttctctaaatattttgtgaagtgtgatttaatcaaaggggtgtggcagggtttcagagtactttgtaattgtttttttagggtattgtctgaagaaagaaaagtatttaatagtccaaaacctaggacatcctttttgtatatagaggcatctgcagatttatttcatctctccctcttccatgtggatgatgttctgaatgccatttaatatttgaatttttaaaaatcctgatgtttgctatagtccaaatattgtgcttttttgaaacataaacaagtgaggttctgaccctaattatttattaggatagcagaatatgatggctcctgaagttccatttctgacctacataaggattttagcaatacgctatttcaaaaagacaacctctaagctgccgtggatctggaatcaaattaaaatgaggccttcaggtgatcaatgatgccttgtattttccgaactgtttaaaaagaaagtcttctctatttcactaacagcctttgtacttgctttggataaaagatcagcaggtattactgatgctttattgttttaaataaaaaaattttttccccgtgaaaattttaatattgtattatgtgcatactgattaacctacctgtgctcaaagagctagtgattaattgtctcctacacaaatgacctgtggccaagattgttcttatataaacaaaacctgggcaggagaacctgtgctgcaattgctttgaggaaaagagctaaagtaccttcagccttaaggtattcagggatgtgcatctctaaatgatatccatagaaaccattttttccaggtcattttgcaccactgtatacactatggggcttgtctgaagctgtttttctacaagtgggaagccatttgggagtaatactgttgcccaaacagcattctttacttgtcatagctataaatcatttaacttggactcattatttttataatactttacactcaaggatgaatcttcctttgtctatctgctctttgattaatgaaaagaatttgacatacagtgttctttatggagcagttttccaataactgaaaaaactcacttttgagttgacatcagtacgtggtttttaaacatatttgattattccaagaccagactgttttcttccatcaatttttgtcattgcatcattaaatagaaaattatgttgtgacaatactgaggccaatgggatttcttttaaaaatttctctccccttgtctattttcaaatcactctagataaagtatatattctctccacccttcctaaactcctctccccacatacatacttcaggaaatgattcaaaatgactgttcatttctactttgagaatatctgtgatacaattttgaattcttcc

SEQ ID NO: 1885214 - DNA, 4001 bp, Homo sapiens
tgcaagtgctggtgccctggggaggcaggagggatgtgccccttagagggaggagggatgtgcgccctggagggaggagggatgtgccccctggagggaggggtgatgtgccccgtggagggaggggggatgtgccccctggagggaggggggatgtgttccctggagggaggggggatgtgtcccgtggagggaggggggatgtgtcccgtggagggaggggggatgtgtcccctggagggaggggggatgtgtcccgtggggggaggggggatgtgtcccgtggggggaggagggatgtgtcccgtggagggaggggggatgtatcccgtggagggaggggggatgtgtcccctggagggaggggggacagccctgactctgggctggagaggaggaaggaggttgggcatgtgttttgcaggtggggtcctttgatgtggccgcgtcctgtgcacagcagatgcagcatcgccccctcctggacacccagcctcatgacaacacgaaatgtctccagaggttggccactgtcccctgggcccgggcacctctggggaaacactgctctaagcaagaaggaacgtttcgtcctacttcacgtaatacggcaaatatgaacatcagatttttaaatgccaacggaagcataaagcaaatgtacagccgggctaatcccagcacagcccatttgtaggagaagctccagccacagcccctgcctgcaaagcaagaagggtcacctgccccagggtcaaggactccacgaggggagagggggagggtccgctccatggtgcccttgtttcaagcacgttttctgcttactgaattccatcagttaaaaggtctaggaaacagaaaaggaagtggcgcgtgtcgccgtctgaggatctgctgacgggccccggcctcgtggaatcctcttctgcctctgtgggtctccagagtttcggaggcatctctgctcccaccgcggggtctggtggccacggggtccccaagtctgcaggaggagctgctctgtgtggcgagggtgatgaccatggctcttgttcactgagcagggccggtggccagcactgtccaagtcaccagtgcagccccataaggccatcttcacaacatccttggggcccgtttctcccactcccgtttccatggagatgtgattcacacagcaatagccacgcctcatgagtgcagagcatgggtcggtggtcagtccatccacggggccgtccacccatcactgccatctggctcccggacactcctcttcccacaagaactcgtgtccctgaccagtgactgcacctctccccatccagaacacgcttagaacacacttgcctccccgaaaagaactcgtatccctgaccagtgactgcacctctccccatccagaacacgctgcaaacacgcttgcctccccgaaaagaactcgtgtccctgaccagtaactgcacctctccccatccagaacacgctgcaaacacgcttgcctccccgaaaagaacccgtgtccctgagcagtgactgcatctctccccatacagaacacgctgcgaacacgcttgcctccccgaaaagaacccgtgtccctgagcagtgactgcacctcctttcccagtcggcttctgtctgtggacacgccttctctggacactgcatataaacagaacacagtcttcatgtctggtgtccttccctgagcactgtgtgttacagcctcagcacccgttagagcttccttcctctccgtggccgggtgacccgcgtgtggatgggccacgtcctctccctctctgtggctgggtgagacccgcgtgtggatggaccactgtagtattctgttttcacactgctaataaggacatacccgagactgggaaaaaaagaggtttaacgggacttacaattgcacatggttggggaggcctcagaatcacggtgggaggcaaaaggcacttcttacacggcaggagcaagagaaaatgaggaagaagcaaaagcggaaatcctgatcaaccagtcagatctcgtgagacttactcactatcacgagaatagcacgggaaagaccagccaccatgattcaattacctcccgctgggtccctcccacaacgcgcaggaattctgggaaatacaattcaagttgagatttgggtggggacacagcaaaaccatatcacccatgtcccttcctctctccgtggccggtgaccccatgtggacggaccgtcacccatgtcccttcctctctccgtggccggtgaccccacgtggacggaccgtcacccatgtcccttcctctctccgtggccggtgaccccacgtggacggaccgtcacccatgtcccttcctctctttgtggccgttggccccatgtggacggactgtgtccctcccccactcagtagttgcctctgcttgggagctcttgtgagcagtgctgctgtgtgaaatgtagaaactgaggcaggaggagactccctgtaacccaaggtcccaagctaataaggtggggccagtctcaacggacccctgcccagggcaatgctctgaccctgccctcctcagtcacaacctgcagctacactaggcccccacctctgagctgcaggagaagcctgtctcctgtgctgtcccagtgaggcagggagtgcaggtggggccacagcaccccaaaccccccagcaccccctgccccggggccacagcacccccaaaccccccagcaccccctgccccaccatcccctccaccccatctcccgcggcctccagggtctcactgacctcggctgtgcatgggaaccaagtgagggcgggattgggagcccatccctgcagaggaggctgggatcagaaggccccagcggagcccagagagggggttcatcagaccgtgactcaggctggcagagcttggtggccccagacaggatccgtccacatgagacaggtgcacctcgagagcagccgccgcccacactgcaggccaggcattggccggagccctgcgccaggtgggagctgccctgggacctgggggaccctccagccaccacgaaccttgagtcaaattgttcacattctttgtggctgggataaaggataaggacatttttgtggcaagaacaaaactgttgaccttggagttgaatatttttgaacagcttttgactctagacaagattaaaagtcgggaaagatcgatgttgtgtttgggggaagctggtgagtgcagcctcggggaagcactctgatgcccccacaccgcaccctgcgaccgagggctgacatgaggggaaggagggttattcctgtgactttgctggccagagctccagggggcatagactccctgcccagacctgcagttcagcttctctgctgttcgcacccctaggacaccaagaggtgctggtgcctgcaccaggcagcttcgggggcacagcccgagctccagggtgcccaggaaccgcccacacaagaccacggcaccatcggcgcccatagagccttccctgaggtaaagtgagagccctggggactcgggaaatccgtggcacacttttcttcccccacaggcgctcgtgagtgcatctcccggcgctccagaaacctcttggtctctgctgcttgttcagcttcttactcggagccaggcacccacagccctggaggaactgggcggtgatttccagacaggacgccgcacctccggctcgtgcccgacctcccggactggttcaaggccagtcagccctgagaggccaagaccacattctcctggacagcaagcttgtgaggctggattttataagataaaaatgacaagcagtggcgggttcacagaccagagctggctgcaggcctttcagaggcccgttagggcccctgggcccagccagccaccgttcatgtgtggatgtgcgctgtgggccttctgcccaggagcgctggacacaggatgagaccctccgtcgggca

SEQ ID NO: 1885215 - DNA, 4001 bp, Homo sapiens
gttatctggggtaatggagacatcctccattgcaccgcatatttgctttctgtattccccagttatagaaatcaaaacgagcagttgtatgtgaatgcattgtatcaaaccaagtctctagatgataggaggcattgtcattactaggatagtaactcagtagaaagagtgaattgagaatatgaggaatgagagtggggtccagactaaaaggaggccaggggtcctgaactgccccatccaactgagttcattctgatacctactgatctgaagcagcaggtccacgcccaggtgcagattgtcccagatgaacaggcagaggctagagatgctcattcctaaagggatcaaataattctgagaatggcaagaactccattaactctcttctccaaaactacaaaaatgtgcagaaaatacgaacaatttttaggagcttacactctttgaagtttatccatgggctgctggaacccttaggaaataatagctagaagtgcctcagacactgcctggcacacagcaggtgctcaatgaattacactgcctggcacatagtaggtgctcaatgaattgtctgatgaagtgattaaggagccttgtaaatactgattaaaacatgtatcaccccatccaatttttcaaaccagtgcttctcaagaacaagcaggaaaattaatgtaatattgttttgaagtagccgtggtggtttcggggcagaagcccaggggtactccttactccgcctgctccagtaactagctgacatggaagtgcctcgtcattctggttcagacacaggtgcagatagatgacttctctatcccactttaattctccttgaagatcattcccagggacattcatttgcttaaattaacatgctcggccaggcgcggtggctcacacctgtaatcccagcactttgggaggcccaggcgggcggatcacgaggtcaggagattgagatcatcctggctaacacggtgaaaccccgtctctactaaaaataaaaaaaatcagccgggcgtggtggcgggcgcctgtggtcccagctactcgggaggctgaggcaggagaatggcgtgaacccgggaggcggagcttgcagtgagcagagatcacgccactgcaccccagcctgggcaacatagcgagactccgtctgaaaacaaacaaacaacaacaacaaaaattcatgctcataatcccactttcaaaccagtgacctcaaagatttctagcagcaatcctattccattcttccaattacagaaagcaaagagaaactggatctggggatctaagcgttgagcctgctgagcagaacggccattcatttggggtgaggtgctgactcactgcccctctacattgcattttggggtgtggggatttccagagcaggattctccagagaggagtatccaagctccctcctcccgcagcagggggatgctgggctaactgcctggttcggtcccccgtgagtggtctgctgtgttttggttctgtttgtttgtgtgtgttttgcctatgactttgcgaaatattccaagacaagagccagaaagtcttggtctctgaagacaagcacaatgttgctttcagcttaaatatctactgggaaacctcaagatttttaatgtcatcattatgaaaaacagagattataaaaggaaaccgtcgcatttcactcgctggcccccagtgggattggatctgacctcagtgtatcttttctttggtaggttttaagtcttgacaaaatgtgcctaagaatgaagactccaaaaaggatgcagtagattcggggggagtgggggttggaaagaggcttaaatcttcacatgacacctggaatatggtcaaaatgtacctgctcaagttgaaccaggtattgcgtcctccttttaccccatcgctagtgaagacaaccaccgcctggggagacgctccttttccgaaacactcgagtcccgccgcgtcccggacgctccgctttccccgcgcccggatcctcccgggaacccgcgccccgcccgcgcgctggtcccgcccccgccgcctccccgcgcgcagccgcccgaacacgcccagaccgagcgcttgaggtgccgcagccgccgccgccgccgccgccgcgatgtgaccttcagggccgccaggacgggatgaccggagcctccgccccgcggcgcccgcggctcgcctcggcctcccgggcgctctgaccgcgcgtccccggcccgccatggccccttcgctctcgcccgggcccgccgccctgcgccgcgcgccgcagctgctgctgctgctgctggccgcggagtgcgcgcttggtgagtcccgcgggcccgagaccccgtccccgggcggcgggaggaggctccgggcgcggcttgacgcgtccccctctctccctccgggcagccgcgctgttgccggcgcgcgaggccacgcagttcctgcggcccaggcagcgccgcgcctttcaggtcttcgaggaggccaagcagggccacctggagagggagtgcgtggaggagctgtgcagccgcgaggaggcgcgggaggtgttcgagaacgaccccgagacggtgagcagccggcgggcgggatgcgggggaacccctggcgcccgcgcgcctccaaccgctcccgagaggcagcgctgctgccgccccccagctccgcgcggcgaggcctggcctcagggtcccaggagccccggcccgccccgcgtcccccacgcccatcccccggcgaccccgggatccccgcgcaggccggtgagacgctgcggggctgtccgggaaacgctcgctgtcagacgcctccccgcggggaagccgggagtccgtttccaaagtgcgagagaaacacaatggttaaaacccaaaccgcttccccgcggccctccctctgctgggctggaggtgaggaacccccgggccgcgcctcgtcctcctgagaggggtggagagcagtcccctcccgaaagaggaattgaaagggccgagggcgggaactgcttgcggcagcaggtccaaaaataagattccaggaatcgagcggggccgcatgcgggaggggagggcggctccgcggccccgttctgccaggtgctctcctggaggcagcgggtgctttcaggagcccgacggtgctggccccggcacctcggttaggaatgtccttggagaaggcggggcgcccggggccgcctcccgcaggagccgccgtgtgaggacggcctggccactctatcctgcgggctcgggagcgggtgactttggaaagtccgagaaggtgtggattcccgttgacgtccctcccgccctgaagtcagggtgatttcatagcgaagttttccgttctgctggaatgttccttttaaagaattctcctggggtggaataaatgtcacccgggatgaaagagtggttctggatgaaccatggaggcctgtttccgcttacatttctagtggttgacttgacccctcttagatctgcctttctgaaagctctgaggctgtcagatggccactgtgcacttgtggacatagctcatccctgcagagatgacgcacctggggctgttgcccgggggctgcccacagccccacaggcccgtgccctccttcagctcagcctagcttggtcgctctccccggcctctctgttttcctgtttctttaatgatgaatcctggcctgtgctgctggctgaggcaggtgggcctgtgtgccctggtcgctcggagtcgccgcccagctgtggggttggtcgtgtggctggtgcagtgtcctccaacagcgtcctcacccggaacattctgcgtgcacagggactgtggcatggggcgtgctggtgatgggagttgagggcagcagggtcacccccaccccacagtacccgctccgcgcagccctgcaaggcctggccgcagcccctcctcgctgtcctccaggacctgcagggcccatgtcaatc

SEQ ID NO: 1885216 - DNA, 4001 bp, Homo sapiens
agacataccaatggcagagaaatgcaaattaaaactacaatgagatatcatctcaccccagttaaaatggcttttattgaaagggcaaacaataaaaaatgctgataaggatgtggagaaaagggaacgcttgtacattgctagtgggaatgtaaattagcacagctactatggaaaacagtatggaagtttctcataaaactaaaaatagaactatcatatgatccagcaatcccactgctaggtatatacccaaaagaaaggaaatcagcatatcaaatgtagatctgtactaccatgtttagtgcagcactattcacaatagccatgatttggaagcaacagaagtgttcatcggcaaactaatggataaagaaaatgcggtacacaatgaagtataataccattcagccacaaaaagaatgagatcctgtcatttgaaacattatggatggaactggaggatattatgtgaagtgaaataggccaggcatagaaaaacaaacttcacgttttcacccatttgtgagagcaaaaaaattaaacaatcgaactcatggagatagggaatagaatgatggttatcaggggctgggaagggtagtggggcaaaggggtggagtcaggattatgaataggtacaaaaatatagctagaatgaataaaatctcctatttgctatcacaacaacagggtgactacagtcaacggggttaaagaccagcctggccaacatggtgaaaccccatctctactaaaatacaaaacttagccgggcatgattgcaggtgcctgtaatcccagatactccggaggctgaggtgggagaattgcttgagccttgagcaattgcctctgccttgaggcagaggttgcagtgaacccagattgcaccactgcactccagcttgggcaacagagtgagactccgtccccccacaaaaaaaaaaaaaaaaattgttaaaaaatgaaagaataagaatgtttgtaacacaaaggaaggataaatgcttgaggtgataccccccatttaacctgatgtgattattatgcattataagactatcaaaatatcacatgtaccccataaatatatgtacctactaggtactcataaaaattaaatattaaaaaagataataaaagactaataaaaaatgttgtctctaatgactataaaatgtatttgaaatacatagatgattcctatagcccccccccacataatgattttgtaccaagagggtaaagtataagcttatctgattcccaggttatttctcaatatcttacatctagcttttacaaatgacacataagaaaatgaggagttttgttctaataggaaaaaaaatactatttaaccatgtaataagacccctgacttttaagctaaaagaaatcaaaaattttttaaagtaatatttcccattatgggcgttttatatttttctcattgtgatttcatcactaggcattgaataattgcttgtaacattctattccttcagcatttatttcatcctgctgcctcacttcccattaaaggatctaaacataaattgttatacatcatagcttttcaaaactatcagaaacctattttaaacattttactgacctaaaaatagatttattttccagaggttctaacaattccaaaatcctaacaagtatatagagagtaagatattataatcccaaatttgcccaagtcactcatctttttcattgtgataaagaagcagttttggggtagcaatgaaagcccaatttgccataaatcaacgtcacatattgtcttcaagcttcagaaaaattaaagccttagtaagttacacaccttctgttcaaacacttatagtttgctatagatactagcactagtacagggatttataaataaagctatagattagtgatcaaagcagaaataatgggaaaatgaataccttccctttccctcttcttgttgttaagtttctcttcttcacagaccacaggaagacactgaaactgctgttacccataccaaagagtgcttgttattctgttcttgaagctgccccagcaaccagtgacctgtttaagaacctgtgttgacaagctccacaggtgtcctggcttaatgttgctctggagtgcttttaatagataagcatactctatctactctggcaaagaaaaatagggtgggcaatgaaacaaccatttctctaacctgagctgaatacttaacataagtcaagggtaaagaaaacattctgcttttacagtgtcctgagatgccattgaagggctgccctttagtttatatatttatgtatcatccatataggcagaaaccagttcattcaatgaaactagactgagataataaaggtttaaaaaggttttgaaaacataagcagaggcatttggaaatattataaaagtaattcaataatagttcttactttaagagttaaaccttccaaatatttgatttttcatgggcccatgtttaattattcatagatacaatttttggttaattttggttagttatactaaaataatttcataaattaaagtaatgattttataatctcgggattttgtttctgtgtaattgtcagaaataaaaatataagagtataataaggaaaaaattgatgttacataacgtacataaatgcaaatatattctgaaattaaatccactgctacttttcttataaagatttacttattcttatgacaaatgtggtcatggtcatagaaaaaaagactacatagggaaaattttgaaatgtgaaagataaacttcgctgttctacttacagaagatggcaaacttgtgcaaagggtgtgtattttcctttactaaaagttgtttttgcaataaaatcaagaatcatctacccaggggaccattcaaacttgttaattcaaaacgtaggaaaagatgtgggcctgggtttgcatacctatccacagaatgggcctgatttgtggcaatttcctttctggatatctgaagtgttttctctctctgtatatctatagcacactctatctccagagtactgtggagatggaggactctgataaaggtatagtaagaatccagcaaaggtcactggatagatatcagaacaattccatccattatacagagaactggatacacagggaactgaatgaaatgtcaaaaatccttcctggtgcacagggaagatgaccacaagctagtcttacagtatctatatgatgtcccagaaactgtacacccggcagctgctagaccacaagataagggttccaaatgctaccaataaacaagcagaatttggactccagaatataatgtaagacaatgaggaaaaaggtaatgtctatttctaggattaagggatgagcgtatcctaatgaaataggtaaaataaaacaaaattaaaaaccctccaatttctaaaaactggtatccaaaatccatttattctctaagaaaagcatgatcattattgcaggctaaatgaaacaaggaagagaactgccagtttcaaaacaccaatgccaatgacctgaaaactcaccaggatcccttgctgtcagacagtcactgttcacggcaacctttgttgaagtgctcagaaaagaagttttttgcaaaccactttgaactgctaggcttagaaaggaactaacttttgtgtaagtgatagactagagtctttaggaacaaaaggggtgtgtataatttggaattagaatcatctggggaaaatactttccagtgtgatggattaagcaaatgtcttattcacacatgccattaagtcactgtgttattgaagataacagaggggggttcataaaagtcacctcttccaggtttaatgaggcaaggaaaaaacctgtatgtcctatttaggggtcatttccattataaaactgtcattaagttccagttcaaagttaaatttgggaaatagctatttagataacacagatgggca

SEQ ID NO: 1885217 - DNA, 4001 bp, Homo sapiens
aaatgcaaattaaaactacaatgagatatcatctcaccccagttaaaatggcttttattgaaagggcaaacaataaaaaatgctgataaggatgtggagaaaagggaacgcttgtacattgctagtgggaatgtaaattagcacagctactatggaaaacagtatggaagtttctcataaaactaaaaatagaactatcatatgatccagcaatcccactgctaggtatatacccaaaagaaaggaaatcagcatatcaaatgtagatctgtactaccatgtttagtgcagcactattcacaatagccatgatttggaagcaacagaagtgttcatcggcaaactaatggataaagaaaatgcggtacacaatgaagtataataccattcagccacaaaaagaatgagatcctgtcatttgaaacattatggatggaactggaggatattatgtgaagtgaaataggccaggcatagaaaaacaaacttcacgttttcacccatttgtgagagcaaaaaaattaaacaatcgaactcatggagatagggaatagaatgatggttatcaggggctgggaagggtagtggggcaaaggggtggagtcaggattatgaataggtacaaaaatatagctagaatgaataaaatctcctatttgctatcacaacaacagggtgactacagtcaacggggttaaagaccagcctggccaacatggtgaaaccccatctctactaaaatacaaaacttagccgggcatgattgcaggtgcctgtaatcccagatactccggaggctgaggtgggagaattgcttgagccttgagcaattgcctctgccttgaggcagaggttgcagtgaacccagattgcaccactgcactccagcttgggcaacagagtgagactccgtccccccacaaaaaaaaaaaaaaaaattgttaaaaaatgaaagaataagaatgtttgtaacacaaaggaaggataaatgcttgaggtgataccccccatttaacctgatgtgattattatgcattataagactatcaaaatatcacatgtaccccataaatatatgtacctactaggtactcataaaaattaaatattaaaaaagataataaaagactaataaaaaatgttgtctctaatgactataaaatgtatttgaaatacatagatgattcctatagcccccccccacataatgattttgtaccaagagggtaaagtataagcttatctgattcccaggttatttctcaatatcttacatctagcttttacaaatgacacataagaaaatgaggagttttgttctaataggaaaaaaaatactatttaaccatgtaataagacccctgacttttaagctaaaagaaatcaaaaattttttaaagtaatatttcccattatgggcgttttatatttttctcattgtgatttcatcactaggcattgaataattgcttgtaacattctattccttcagcatttatttcatcctgctgcctcacttcccattaaaggatctaaacataaattgttatacatcatagcttttcaaaactatcagaaacctattttaaacattttactgacctaaaaatagatttattttccagaggttctaacaattccaaaatcctaacaagtatatagagagtaagatattataatcccaaatttgcccaagtcactcatctttttcattgtgataaagaagcagttttggggtagcaatgaaagcccaatttgccataaatcaacgtcacatattgtcttcaagcttcagaaaaattaaagccttagtaagttacacaccttctgttcaaacacttatagtttgctatagatactagcactagtacagggatttataaataaagctatagattagtgatcaaagcagaaataatgggaaaatgaataccttccctttccctcttcttgttgttaagtttctcttcttcacagaccacaggaagacactgaaactgctgttacccataccaaagagtgcttgttattctgttcttgaagctgccccagcaaccagtgacctgtttaagaacctgtgttgacaagctccacaggtgtcctggcttaatgttgctctggagtgcttttaatagataagcatactctatctactctggcaaagaaaaatagggtgggcaatgaaacaaccatttctctaacctgagctgaatacttaacataagtcaagggtaaagaaaacattctgcttttacagtgtcctgagatgccattgaagggctgccctttagtttatatatttatgtatcatccatataggcagaaaccagttcattcaatgaaactagactgagataataaaggtttaaaaaggttttgaaaacataagcagaggcatttggaaatattataaaagtaattcaataatagttcttactttaagagttaaaccttccaaatatttgatttttcatgggcccatgtttaattattcatagatacaatttttggttaattttggttagttatactaaaataatttcataaattaaagtaatgattttataatctcgggattttgtttctgtgtaattgtcagaaataaaaatataagagtataataaggaaaaaattgatgttacataacgtacataaatgcaaatatattctgaaattaaatccactgctacttttcttataaagatttacttattcttatgacaaatgtggtcatggtcatagaaaaaaagactacatagggaaaattttgaaatgtgaaagataaacttcgctgttctacttacagaagatggcaaacttgtgcaaagggtgtgtattttcctttactaaaagttgtttttgcaataaaatcaagaatcatctacccaggggaccattcaaacttgttaattcaaaacgtaggaaaagatgtgggcctgggtttgcatacctatccacagaatgggcctgatttgtggcaatttcctttctggatatctgaagtgttttctctctctgtatatctatagcacactctatctccagagtactgtggagatggaggactctgataaaggtatagtaagaatccagcaaaggtcactggatagatatcagaacaattccatccattatacagagaactggatacacagggaactgaatgaaatgtcaaaaatccttcctggtgcacagggaagatgaccacaagctagtcttacagtatctatatgatgtcccagaaactgtacacccggcagctgctagaccacaagataagggttccaaatgctaccaataaacaagcagaatttggactccagaatataatgtaagacaatgaggaaaaaggtaatgtctatttctaggattaagggatgagcgtatcctaatgaaataggtaaaataaaacaaaattaaaaaccctccaatttctaaaaactggtatccaaaatccatttattctctaagaaaagcatgatcattattgcaggctaaatgaaacaaggaagagaactgccagtttcaaaacaccaatgccaatgacctgaaaactcaccaggatcccttgctgtcagacagtcactgttcacggcaacctttgttgaagtgctcagaaaagaagttttttgcaaaccactttgaactgctaggcttagaaaggaactaacttttgtgtaagtgatagactagagtctttaggaacaaaaggggtgtgtataatttggaattagaatcatctggggaaaatactttccagtgtgatggattaagcaaatgtcttattcacacatgccattaagtcactgtgttattgaagataacagaggggggttcataaaagtcacctcttccaggtttaatgaggcaaggaaaaaacctgtatgtcctatttaggggtcatttccattataaaactgtcattaagttccagttcaaagttaaatttgggaaatagctatttagataacacagatgggcacctagctgaatctttgatt

SEQ ID NO: 1885218 - DNA, 4001 bp, Homo sapiens
caaaatcctaacaagtatatagagagtaagatattataatcccaaatttgcccaagtcactcatctttttcattgtgataaagaagcagttttggggtagcaatgaaagcccaatttgccataaatcaacgtcacatattgtcttcaagcttcagaaaaattaaagccttagtaagttacacaccttctgttcaaacacttatagtttgctatagatactagcactagtacagggatttataaataaagctatagattagtgatcaaagcagaaataatgggaaaatgaataccttccctttccctcttcttgttgttaagtttctcttcttcacagaccacaggaagacactgaaactgctgttacccataccaaagagtgcttgttattctgttcttgaagctgccccagcaaccagtgacctgtttaagaacctgtgttgacaagctccacaggtgtcctggcttaatgttgctctggagtgcttttaatagataagcatactctatctactctggcaaagaaaaatagggtgggcaatgaaacaaccatttctctaacctgagctgaatacttaacataagtcaagggtaaagaaaacattctgcttttacagtgtcctgagatgccattgaagggctgccctttagtttatatatttatgtatcatccatataggcagaaaccagttcattcaatgaaactagactgagataataaaggtttaaaaaggttttgaaaacataagcagaggcatttggaaatattataaaagtaattcaataatagttcttactttaagagttaaaccttccaaatatttgatttttcatgggcccatgtttaattattcatagatacaatttttggttaattttggttagttatactaaaataatttcataaattaaagtaatgattttataatctcgggattttgtttctgtgtaattgtcagaaataaaaatataagagtataataaggaaaaaattgatgttacataacgtacataaatgcaaatatattctgaaattaaatccactgctacttttcttataaagatttacttattcttatgacaaatgtggtcatggtcatagaaaaaaagactacatagggaaaattttgaaatgtgaaagataaacttcgctgttctacttacagaagatggcaaacttgtgcaaagggtgtgtattttcctttactaaaagttgtttttgcaataaaatcaagaatcatctacccaggggaccattcaaacttgttaattcaaaacgtaggaaaagatgtgggcctgggtttgcatacctatccacagaatgggcctgatttgtggcaatttcctttctggatatctgaagtgttttctctctctgtatatctatagcacactctatctccagagtactgtggagatggaggactctgataaaggtatagtaagaatccagcaaaggtcactggatagatatcagaacaattccatccattatacagagaactggatacacagggaactgaatgaaatgtcaaaaatccttcctggtgcacagggaagatgaccacaagctagtcttacagtatctatatgatgtcccagaaactgtacacccggcagctgctagaccacaagataagggttccaaatgctaccaataaacaagcagaatttggactccagaatataatgtaagacaatgaggaaaaaggtaatgtctatttctaggattaagggatgagcgtatcctaatgaaataggtaaaataaaacaaaattaaaaaccctccaatttctaaaaactggtatccaaaatccatttattctctaagaaaagcatgatcattattgcaggctaaatgaaacaaggaagagaactgccagtttcaaaacaccaatgccaatgacctgaaaactcaccaggatcccttgctgtcagacagtcactgttcacggcaacctttgttgaagtgctcagaaaagaagttttttgcaaaccactttgaactgctaggcttagaaaggaactaacttttgtgtaagtgatagactagagtctttaggaacaaaaggggtgtgtataatttggaattagaatcatctggggaaaatactttccagtgtgatggattaagcaaatgtcttattcacacatgccattaagtcactgtgttattgaagataacagaggggggttcataaaagtcacctcttccaggtttaatgaggcaaggaaaaaacctgtatgtcctatttaggggtcatttccattataaaactgtcattaagttccagttcaaagttaaatttgggaaatagctatttagataacacagatgggcacctagctgaatctttgattagaaacccttaaacaaactggcaccctattgtcttttcttttcattttattcatatcaagggaacttttgcctatatatctcagtataaaatagactttacctcaacctttcttccagttcaaaataacaatgcattcttccaggaaattttcaaaagtcttgttcccaataacttggggttatttcaggatgtaagctcatttcaaacaacttgtcctaaaaggaaaaacaaatatgattataaagtgcatgtagtttgtgtatggttttaaagggaaaatactttgccttcatcggataaggtgcaactagccttcatagtattttctgtcccatttacttatatagacactatcaagagaaaatcaagcttttgctaggacattaaggagtttctaacctttcttttcagtcatgagccccttggtaatccaataaaatatatggaacctattggcagaaaaagggacttagccacttaaccacagaataaagcataaatttccagagaactttatgaaatccaagggccccacttaagagttctcaaacatgagaggaagacattccatcagtctttcttctggactggaaacccttaaacagactgccacctattatcttttttaaaaattttattctttgcaagacaagttttggattttgaaagaaagggtaaaaagcttaatgggatataggcaggtccttattataacaacattattgatgtgttttgaaagaaaaaaggaatagaactccagagtgtgattgggtaattgtgcaaagaaaagtcaggttgtttaggaaagtctaaactcaagaatgtcttttgtatttttatatacaaaaaaatgataaaatcataaactaaattttagattacttgccattttgaagttgtcctttagcaaaaactgtgaaagttaccactcaatgattcatatttcaccattgtgaattttaaactttgagtttatacaaacagattaagccaaaaaattatgtacttagatgatatatgaaatactagaaatgatgtggattttgaaatagacagaaccgggtttaaatcccactcattaacatttgttaataatatagccttgaggatatctgaggcttaatttcctcttctttgaaaaatgagataatacctaccttgagagatgacaggagaattcgatatagctatatgaaacatccaatcctggtactcagaactgaaattaaattttcataattcaaaaaattatggtgagattcatattaagtgttattatttgcaggaatgaaatacacctacacttattcactggaccaaatagagatttcttaaccctccgaataacactttcttctttgtattcgttaaaaaaacccagagtcagagctggtaaggagtcgaatgcacttcattaatttttgccactgaaaatcatgatttgtacttagagttcaccattattacagccatattggtaaaatggccatgtttgactttaaccagatcaagcttgtttagctttataaattcactgaaataccactacaccccttctcatccacctcatccctccccttaataagttctatgggaaaggggctttggagaaaacttgtacttaatttcacaatatat

SEQ ID NO: 1885219 - DNA, 4001 bp, Homo sapiens
aaatttagtatagaaagagtgtacctgaacacatttaaggccatatatgagaagtccacagctaacactgtactcaatggtaaaaaattggaaagctttcctttaagatctggaacaagatgaggatgtccactttcaccactcctattcaacatagtattgaaagtccttactagaacaattagtcaatagagaaataaatgaattatgctaagtaaaacaaggtaggcacagaaaggcaaatacatgttctcccttacgtgtagaatctaaaacagttgaactcatagaagcagagagcacaaagatagttacagagattggaggctgggaagaatagcgagattatggtcaaatggcccaaaatctcagacagaaggaagttcttgtttgctcagatctattgcacagcatggtgaatatagttgaaaataatgtactgtaatttgaaaattgctaagagtcaatttcgaaagttctcaccacacaattgatgtgtttgagagcataagtatattaattagcttaattttattacacgttgtatatataaatcatcacatgactttttactccataaatatatgttataaattgtcaatttacaataaaatagtttttaaaagaccaagacaattcaaaaagtttagagagacaataagtcacttataaaggaataaaaatatagatatcaaatttctcaacacaaacactggaaacaaggcaatggtgtaataacttgaaagttttgatgaaagtaacagaagttaaaattgtatacaaaaaagactatttcagtataaagtcatatagccactcttctctagcctacaagtcttcagaagctttgctgcacaaatatccacaatgaaaaaattttgtacttggttaatatttttaaatcagtttttattttctatttcaataatatattacttattttaaaatattttaaaaaccctaacaaaatatacgtttttctattcagatcatcaggaaaagacaaaaaataaataacaaacgtacaaatgaaaagatactaactacatacaaagtagagattttagtgatagtatgggaatagtatatataatttttaaaaattaggtaaaattgatacacttttgaaataacacaatttatcagaatcgatttctacttaatgcatatttattaaaaatatggaataaaattacatttaatattaaaatattggaagcaatatttttaaagacagaaacaaagttatgaagtccacaatgaacatttctgttcaacattgtttcaaggccctacctcaggcaataccaagatgaagataagaatataaggattgtaattgagaaaaaaaagttatttttccatatgatgttatttacatacaaaacaaaaaagaatccacctacaaattatttgatataatacaagtgtttaacaaggttgtagataaaaattgatgcatagagacaattagtacagaaatttcagttgcatttctatacaaaggcagcaaactagaaagtttaattaaagataatatataacttaaaattgtatgagagaatatcaagtatctaagaataaatatatgatgtaaaaaatacagagaaaatgatacgaattagaggaaccaattaagacgtatcacgttcatgggcaagatgacaatagtgtgaaataatgattctttctaaattgatcagtgttgttccaatcaaaattccgaagtaattatttataaaactcaagaatgtgattttaaggtttttgtggaagagtaaagaacaaagaatatataagatgctcagaagaaaagaagtgatgagatacctgttaaaccagatgacttaactcttgagctttggttattcagtgtggcataggtgcagaaacagtcagaatgctgagaaacagaaccatgcttgtgtggaacctcattatatgacaaaattggcatgccatatcaatgccacagagaaggggctattccacaaatgaacctgaaaaacatatgaaaaaaattgaataactcatatattgacacaaaaaattaatcatttatgtaaaaatgtcaaaaaacgtggctaaaaatataaatgaacatctattagactcaagtaatacgtgttattcataaaaggttggttataacaggaaatgttgtgtttaattatattaagagaattaattcttaaaatgttatcataaactaagcaagaagctaggttacaaacttggataattgtacacaactagaaaagtattggtgttaagaacacataaagaactcttaaaaatgaataaggaaatgctaataattcaatggaaaactgccaaaagacataagtagatattttgcagaaataaaaacacatgtggtcaataaacatatgataggcaataacattactgatcatgaagattccaatcaagatagccctctgatgccattttccacctattgtatcaccaagaatattaagtctggaataacaatgttggagaagatgtgtatctatggtgtcttgatatatcactggtggaagtatacattagtaaaccagttttgaaaatagttttattttctaaacaatcaaaattaaaatatttatgcacttgaaaacccagccatatttggtatatatccaagagcaacacctgcccatgtacacctgtttgcaaaataagagtgaaggataatggaaaaaataatattgatggtggtgctgttcacaatagcaaaagtctagaaacaattgaaatgtgtatcaggccgggcgcggtggctcacgcctgtaatcccagcactttgggaggccgaggcgggtggatcatgaggtcaggagatcgagaccatcctggctaacaaggtgaaaccccgtctctactaaaaatacaaaaaattagccaggcgcggtggcgggcgcctgtagtcccagctactggggaggctgaggcagaagaatggcgtgaacccgggaagcggagcttgcagtgagccgagattgcgccactgcagtccgcagtctggcctgggcgacagagcgagactccgtctcaaaaaaaaaaaaaaaaaagaaatgtgtatcagtgggagacttgatgaagtaactgccagatagtcatacgatgatacgagttttgaaagaaatataatggtacacaacaacatggatttatcttgaaaaatatagaaaaagtatgttcctaaagattgcatgcatcatgaaatctttcatataaagtaatacctgactataaagaaagtaaggaaaggacaagcatgggaatggaaagattctcaatttgtctcagattataaaatggagaggtaagattgaaaggaagcttttggtttgttttaacttttctttttgagtggtagatttatggagcaaaagttattattaaaaattactaagtaaataaatataaagcagactatatataaacaaataaccagaatatatcatgcacaaaagtttaagattatttcaatgattggtttttgaggttcaaaaataaatgattacagccttagcaattttaggggatggctaaatgttgactttattatcttaccactaaacatctggtaataaatgattctctattctattccaaaacctattaaggcattttgaaattacttaaaatttatttctatagaacatgaattaattaataaaaatgttcaaaatttacaccatgcacaactaagagaagttagctgttttgaattgaaatacgtgtcttttttgtaacagtagttttttagaagttgttatatgcctaatgttcacaggaataaagttaataaatctgtctttgccactttttccatgcattctattaataagtcttgttaccaacattttaacacatattttatgtttgaccttgtcaaaacgcaagtcatcatgtggtgattacaaagtcatatgtgccctgaacttgtaggctgtaaagcttttgctctataacttgacaagtaattctga

SEQ ID NO: 1885220 - DNA, 4001 bp, Homo sapiens
ggagcttacagtgagccgagatcgcaccactgcactccagcctaggtgacagagcgagactccgtctccaaaaaaaaaaaaaaaaaaaaggttttcttactgagaaattattttaagatatatgttcacatagacctttccagaagaaaactgaaaagaggtaaagggtagtctaactcacaaatataaatagagaaacacaatgcatatttactcagcaatcttttaatatgaggtcatattattggaataggagtttaccagttggatttcggcatgatttttcttgcacaaaacacaaagcagtaactataatttctgcctttagcttttgaaaaactaaaagaacttaaagatgcttgcaagccaacaagagcagagtcccattttcctccttctttaaatttcgtatcattgtcttacctttaccaagatttttcaaccattctacttcacccagtctttccaaagtacttaattttttttctaaattgatatttaatgggttgctcaattttacaaataacataagaaggtttagggtcaccgcaacagattctttgaaaccataaaattcaacccttggctacgatgttggtgggggattaaagagtagcctaccagcctcaagtggtcaaaatgacatggacattctcacaggcactttaaagaaaaaaatgacgagttggctatatttatgcatgcagaattatttttatagagttctatcttgattaaaacataatttagtagattaaatatgctatcttctttgagcaagctttggaagaccaagctactagtagaattataccagagttaggatactgccctctgcatacactcaaatagcaggccagaatcccaatagaaaatgagcatgcttagctatgtttctgtagtatggaacttacgaaggttcgattcttgatttctcatatgaatcagagctctctctctcctttccagtgtgacccagttgtattttgcataggcagatggtttgaaggaaaattccagattattagcatttgcactggagcttgacaatcacctttatgaacctgctcttggaatagcagccttggaagatcctggagtcaatctccttttatttcagatgaaaactgatgacagggaaagagcccaggaagaaagtttttattcttggtgccttgggcaacgtgtgtatcctccctcaaaagaaggcttggagcaaaatgaacacttacaggaaactgaggctcgtatgttttatgcagtgaatcaccggcataattggaattctaacctcgaaattttatttccaaatttgactggctccactccttatacatcaaattgatcaaagcagaaattacagattcaaatttatggtaaagctaagaaaaagaaagcagaacgatgagtcagaaggtaagaggccacgtaacccaatatttttttagcataaagcattcacgaattttactggcacctcaactaaaatgatgttcttttaaaatcgtgtcacttgattataaacatcttgttttaaaaatggaacatataatccaacatcccccaaatttctagactaattcaaacataagagttgatcttaatatggatttaggtattcaacaaatacttatagagtgtccactatcgggcaaacattgttctaggtgctggagttacaacagtgaacaaataggcaaaacctttaccctcatgaggcttagagtccagtggaaaggaaaagaccaaaaataagataagaaaactttatggaaatatataaacatacataggtatgtctatataatacactgtgatatacctagtaagatatatatagttttgagagaaaaacatggctaacttgtttgtgccttaccttgtcatacagaattagaatattatccatactgaattcctgggcccagccctggccagtgtctctgccattttatggggtacattatctctgctgagctaagtaattgctaaatccacactggaggctgtgtgagtagagaagtgacacaccagttaacagggtgagaaattaatgcaaattaattctccaccctcccagcagacactgctcccactttcttgcccttctccatccccctgccagttcacagagaaaagtatgaatattacaaatgatactcacttcatgtctcagtgacctagaaaggagtgtgtgcactaaggtgcagcagtgctttaatgacgctgagcccaaaagcaaggcagtgacacaaagaggggagtggtgtcactgagaggaaggcccaagcactttccccttctgcacctcttcccaggagacaggggtgagttaaggcagcacaaggtcactgggattgcctgaagcttgaccacaggcacgagtgactttcctcttggctggtaccatctgtataggggaatagaagatttttatcataacaaaggatatctcaatagagtcaattagcccagcatgcctcagagagttctgtgatgtgagtggtcacttctttgaactaaagttgaataaagaaaaaaagaaagtgaaatcatttcagttacaaagaacctagcactgcattctataaggttttatcattcagatttggaaggagacgggagccatggtggatgccgtgaggtgtcaccagatccctttgtgggactatatccatcccccaccctccagctgttctgaggattggctgctcacctctgtccccttctttagggacctctgtatctggagaggcacttgcaccacaccccatcccatagctggtgaccgatttgttatcagagctccttcatactaaagaaagagagactgagactcaagctgctgaagagctttcctcaaagtctcacaatctggtcagtcgtcaaaggagtctgtctgactccaaatccatcctctctcccctcaatcgtatagttgctttattctcttctagtgctgtggagaagcagccccagtttgccactgaataataagcgtccccaccatttcctttccccattgttgttatagggattcctaatatgtgttgctaaggcttcaccttatatcacccagaagctctaacctgtggcttcctcaagagacattatccctgaaaaacgggtagaaattcaggaaactgcttactcaatttctcaggtggtggcggatgttttcttccttattctttgttttctgcttggtaagtctgtgtgtaggtggtttaattgtgctgaacagattctttctctcctctgtacaaaatgggctttgggggtggacaggaggaggaagagaaagatgtgagtttcacataagagcagagggatccttagcctgtcagctgagaaacgaggactgtgtattcctgagtagtgcctcctgcctttcaagcctggaaagagaacaggagagggaggcatgctccccaccctgggatgttccctttactgctaccacttattgctttactggacatcataaagattgcaagatggacggaatttatttggataaaaagcagtggatgttgggtataagtaaattagcaacaggtgatagattctgaacataggacacctctagattgttatgtcaatccacacattccttgcaatgtcaaggaaggagtaaattttccagataaattaaacaattaaaagagtatcaaaacttaaaaaattcattccattttgtggagatctttccatgatccaacatctcttctcattaaaatgtatgcagagccaggcgcggtggcttacgcctgtaatccccacactttgggagaccgacgcgggcagatcacaaggtcaggagatcaagaccatcctggctaacatggtgaaacgccgtctctactaaaaatacaaaaaattggccaggcgtggtggcgggcgcctgtagtcccagctactcaggaggctgaggcaggagaatcgcttgaaactgggaggcggagcttgcagtgatccgagatcacgccactgcaccccag

SEQ ID NO: 1885221 - DNA, 4001 bp, Homo sapiens
gacaaaggaacataggcaaatgagaaatttgtagggagctgtgtgtagcaaaaatatttgcacagtttactccaaagagtaagtaagaaactatgtctcaatgatgcagtgggtagttagttggtgcacaggcttgggaagaacctagatatcctgatgcctgaactaattttgcaaagatacagatattttcaaggtggacatgtgtagaacatcattctatgcagatggaactgtggtggacatgtttgaggtggctatagcttcaattaaaagaaataagcactttggagaaacaaaccaggaatggattgtgagtcttgactttgataatggatcctcttgctacatcattagctgacctccagacctggttcattgtgcctccatttaagagaacgtggttaaataggcaaagccaaatttcttgtggatttaataaaataagaagtcaaagaaaaatagcagtaactaccttttctcattgccactgtctggtgcctatttcttgttgtagattcttattcaacatttcctatattaaaatggcaatacaatacaatatttacagccacatatcacttatttagtaccaaagggatgcaatgcattttgtcactaacatcacctgaagacatttttcccattggtcactattagaagggggtataaaattcatccttattggaaaaaggaaaatagatcacaataaattgcaaacacatcagggagtttactcctaagcagcaggagagaatcaaagaaagttttcatgtagaaggaaggcagcagaatgaaagaatcactctgtgggagatgacaaaccataaaaatatcagaggtgttgcataagatttggaaatggtcagctatgtcaacccattgtgaattctatagatagctcaagttttgtgcagatgttatccagaataatttgatcaggtcctgtcttgtttagagaataataaaatggtgcctttgtcagcatgtgcaagtgatataacaacagtttatttttattccttgagaattggaaattgtctttatctctgaataaaaagaagcccagagattcagcccactttcaggtctttggaatatatacaaagtaaggtagaaaaaaagaagctttaaattgaaatctatttaaaatattgggaatatcatatgttatttataggactgttggtaactgttactttgctttctgaacacattgttttcagcaaatgcgttaaagcaaagggctactactactaagggctagagaaagtggaatgggagaactggcctttaagttgctaataatttttccaaatagagaaaatgtatatatacaccccgaataaagaacaacacagaaatataagtgccaaactatgtaatacagactataaataatatatagggtcaaagagaggaatgatctttgtgggccatagataatggggaagaggaaagaactgaattgaaccattagtatttattttcttttttcactttgagagtggataaattgctgctaacatacattaattacatattacaattcaaattctaccctataacaaaaaatctacaactaccctttaaaacaatttattttaaataatattaattataatgtaaatgcattggttgtctaccacttaacagtttgactgattagttgctattgatatttttcagtgctgaaagtgcttcttattcacaaatctttattcgtacaattaaatcttttttgaggtggtcaaattaatcccaattactatctgttgttttgttaataacataatatttctacactgtcattatattattaattgagcttgtataaataaataatggccaatggattatggttatatgtggggtctattagttatgaaattttagtttgccattttaggtcccatacataatttggcatcaacactttattaatgcaaacaagtagaaaatttgaaacttatctccaatggaagatggaagactggatgagatcaccaaggaaatgagtgcatgtagggaagagtagagatccaagaactccagcttcagaaatctcaaagaaatggacaaatcagcaaagacgattgaggaaaagaaccaatgagacagaaagaacaccatgaaaacatgatgttctagaattcaagtttaaaaacctgtagcacggaggagggaaggaggagaagcaagtaacagtttgcaaaagagtatgagaatgagaatggcctgtcaaattagccatgcagagctcattggtggtatcgactagcagttttattggagtagtgggggtgaaagtctaagtggttttagggaagaataggaggagagtcactgtgggcagcaaatgtaaacaagacttttgaggaattttgttataaaaagggaagggagacattgaagctaacttcaaagtagaataaagggaaagaggattattatctaatactattaatagtaatgattattattatgttaagatgaaagaaatgagaatttgtattgtgctaatgggagtcaacgcagagaaaaatttctaatgaacacttcattaacttaggtcatctctttaacatctctgtggggtctatactattatatcttcaatttaatagaagcagtaacattacccagctagcatgtgggcaatctggtattttattcttggcattattgtccagtcttaggtcttaagcactttctcttaaacagtatctatcttttaaaaatgcacaaacatgtacttataccagctaaattataatgtatccacgtaccattttctttagggaatttcttagtgatgtgtctaattgttctttcattttcatgtattttactgaaaaataaactattcagtgttatattggttaatataagttctcatcaatttctgaaatgaatataactgctttattaccaagaaatgattttataatctgtaaatattcatttgacaggtttttaccttcaattggcttaaagtaaaagaaaggaatatttgggtttaaactgagaaaaaagttgggtgatttttgtcctaatttacagataaagatttctcttgtagtagttctatcttgtagtagttaccattgtctatcattttgaccaagagaaagatagcacgtataattacgcatcagtagttttccctttgtacatatcttttttggggagagcggggagcacaattcaagtcttaacaaccatgtaagcattttatgtgcattttgatttctgtgagctacattgggaactgtagaaggcatctatagagttcagtagcctcatgactgactgactcatgccctcccactcagtctcttgaccaccctggaaatatatgaacttgaagaaaatgctacaacagctaatgaatcagtgggttcccactcatcttagaataaacaaaagtccccttaacatggccacaaggatctcaacggtcccatctcagccacaatactgggaccttctgtgccagcacatctggctgtattttatttctttacattctcggccttcctacttcctctcaccttatggtgttagcttgtgtcatttgtcctccttcttccttcccatcaactcttagcagacatttactcattctttagacactagtaccagcattgtcttctcatggagtcatcttgggccaccctaaatcaaattctttcttcagaggttcttaagcaaaaattcacctctttgtcttaattatatcacattgcagttttgtgcttggtgtgtgtggctatttggttgacatatacttctcatagacccttaaaatagggaccatgtatgtccaaggccttattagcgccaggctcacagtagacattaaatactttcatgcatttttttaaacaaggaggtacattaaattgttggattctttatttccactctcttgaatgtgagaaataaaaggctcattttcatcttttctttgaaatagggtagttttttctggatataat

SEQ ID NO: 1885222 - DNA, 4001 bp, Homo sapiens
acccagcccctggcaatcccgctgtgcgcttgtctctgtgccatccccattgtcaagcaccgacccccgtgtccttgcccagcccctggcagtcccactgtacgcttgtctccgtgctttggcaactccagggtcacataagaggagtcccgtgggctgcgtcctctgcagctggggtcctttccctcgcctcagtcctcagggatcctctgtactgcatcttgtgtgacaatttcctccttctttaagggtgaataatattccacgcatgggcagactacattttgttcatttatccatctatcagtggacccctgggctctcctgccgcacggctgttatgggtggcatggccgtgagcctgggtatgtggattctgctgggtccctgctttcagctgtgggttcctacccagagtgtggattctgctgggtccctgctttcagctgtgggttcctacccagagtgtggggctgggcccctgctttcagctgtgggttcctacccagagtgtggggctgggtccctgctttcagctgtgggttcctacccagagtgtggggctgggtccctgctttcagctgtgggttcctacccagagtgtggggctgggtccctgctttcagctgtgggttcctacccagagtgtggggctgggtccctgctttcagctgtgggctcctacctagagtggactctgctgggtccctgctttcagctgtgggctcctacccagagtgtggattctactgggtccctgctttcagctgtgggctcctacctagagtgtggggctgctggatccatgacagttctgtgcttagtaattggagccacctggtcagttatctttcaggagccatgcagtggatggtccagtcccacagagccaatgccaggccacgcagtgcagacagaaagctcccatgctcttctgtctccacaatggagatggagccatctcctttcccacaggatgttatcaaaacatatcaagaaacttagtgtggtggctcacgcctgtaatcccagcacttcgggaagctgaggcaggcggattagttgagctcaggagttcaagaccagcctggccaccatggcaaaactctgtctttacaaaacaatacgtaaattagcccaggcatggtggtgtgtgcctgtagtctcagctactcaggaagctgaggtgggaggatcgcttgagccctggaggtcgaggatgcagtgagccgtgattgcacctctgcactccagcctgggtgacagagtgagaccctgtgttaaatatatatataaatatatatatatatataaaatatatataaatatatatataaaatatatataaaaatatatataaaatatatataaaatatatataaatatatataaatatatataaaaatataaaaatatataaatatatataaatatatatataaatatagaaaactcaataaaaatattacatataaatgaacacagctggtcactctagtctgaaatagcaaaaatactaacttccccttgactgattccattttttggaatgtttagaattccagaaaaaaaaaaaggctcttttgtaagaaaacacacaatgagaaataatgtgctctgaggcattgaactaatgttggcccaaatctagttttttgtaagcaaagataaggcctggggccagaggtcggaaacagacttacagtattttgcagccgttgtggagagaccacaggcggttgggttcctccagagctgggtgtacacccatctcagcgtcatggctggcggggactgctgtgagtccatcttggaacttgtgcagaaagcggctgtctgctggtgaccgcatggggtgcctggcgaacacctctaacagaggtagggccagtgggagcagaaaccagtggagttgtcaagccggcattatccttcctgctcggcttgtgtccagggttaacgcggaggtcagcttcagtgaggcctggcacttggtcagcgtgaggcttggttagtctcagggacccacgtggtatccgggtcccccagcactaaacagcttggccaaggccacactgtcctgccaagagatgcctgggcgggacagtgggaggggttggtgctgaggaaggaagaggccggcagggatgcctcctgcacacacaagctgacaactcgaggtttattcagttctcagctctcagctctcagccgtgtcctttatctctgaggagtctcaatttattctgtctccttctgttttggatctttgaaattaggaaaacacctcaaagttttgtgtgcatttctctccacctgtcaccctgggtcctcgaggcagagttgcctccgctacgcgcgaggtccgaggtgcaggaggcctgtgctgggggccgggaggagacgggcattgaggagggagtgccatggcctggccaccagctctggggtcgctctgctgtccctgactctgcgggaaggacggttagggcccctctccgccccgagttcaggatcaccccctccttcctggcccagtgagcctgtcgctctggctgtgttgagtctgctgtgcggccagggtgaaaaccagtccgtaagtcccaagtggaacccaggtggccaccctcggggcagctggaggggtgggaggcttgtggaacagaaacccgtgggtgattccttctgaatttcccacagacctgaaccggaccttccccgacaacgtgaagttccggaagaccacggacccctgcttacagaggaccctgtacaatgtgctgctggcatatgggcaccataaccagggagtgggctactgccaggtgagcctcgggaccctctgacgccatgaggtggctgtgaggacaggtctgtccacagctgcaggctcggcagtgacggcctcacgtctctgtcaaccctgttcatgaattccacgtcctgatgccccattgaggctcggacgccatttcccagcagggaggacagggagcagcagccgacgacctcattccggcctcaggtggcgggaggagaatcagcacgggacacagagggcgagtgctgtggggtgcgtgcgctgtggggtgtgtgtgctgtgggatatgtgtgctgtggggtgtgtgtgctgtggggtgtgtgtgctgtggggtgtgtatgctggaaggcatgtgcaccatggggtgtgtgtatgggatatgtgtgctgtgggtgcgtgcgctgtggggtgcgtgcgctgtgggatgtgtgtgctatggggtgcatgtgctgtgaggtgtgtgtcgtcctctgaggccactcccagagtgtctgctgtctacactgtcatcccctggctggctccgtggtgtgaaccagcagctgcagttgggagagtccttgcgcctcccggaggccacctagctgggcgcatattaagggcattgctgttagtaactagtggagtgaacaggccggaatgcagggcaaccaggagccgtgcagtctcccagcctgtgtgtcctgcctgggcctgtcgctggtggtgctgttccagtctgtctgagctcgccgagggcagggcaggcatctgggcagggctggcctccacgagggtttccaggtgtgcgcacagcccgtgactgcctgtgagtccccgtggctgagagcctggagcccacggctgccaccgggattggagagtgcgttcctggcattttaggccatgtgcttcacgggctcctaggggttgtggctggcttaaacgtttctaggaggacagggaaggacatcgtcgcgatgggtggttcgaacctagcagtcccagtgatgcccccagaaacttcctgtaggagccgggagccaggcgtgcaccaaccagaaaatgcagtttgagtgaacgtttggaggagtgtggagcccctgcctggacagccctgggcctggcacctggcagagtgaatgctcccgaggagaaagggtggacgttgcgtgaggagcgccctgtgaaaggccagcag

SEQ ID NO: 1885223 - DNA, 4001 bp, Homo sapiens
catcattccctgtcaggctcactgctggatgcctctgtgtcctcaacaccacagagatggtgtgttaactatcacatgcacacgctcgggttttgtatctgtcaacacacacatatatatatacacacaggcatgtatgtatgggtgtgcatgtatttgtatatacttatatatattatgtatgtttatatgtggccatgtacacatataaatgcatatgtgtgtatgtatatatatatttttttcctgtcctttgttaaattgcaagctcctcagggtcaggaagtaagtgtcatttatctatattttgactaaagtgccaagacactgtctgctacacaggaggtatttaacaaacacttatcgagcaaggaagtactgaaatgaagcctcaagtctcatgaaaatctttaaataacccgttattcaacatcaatccaatgtaaacaaagatagcaattgttcaacttagcaatctttgcaaaagtatgcccaatcaaataaaacatcatgcccactgcccgagcactagagacaaacttctagtgtgtaacaagggaaactgaggcagtggggaatttgaagtctgctgctagttgataaccacatcacctacttctaggtcatgaccaccccgatagtgtgcctctgtttgatgaatttagggccattgagtcatgtggtccagcatttgtctttggtgttcagcagttccccaagctggtaccagagttaatcatttagagaccttgagcttatagatcagagagtggccccctcaccctctactgattataaacatgtccctttcctgtccactgaaatcaggtgactttctctgcccctggagagagcaaaagaggcaatgtatcccacacgatgtgtcgagcatatgcggggaccttggtgtttgctgcccacacccaggtggagggggatacttggtaggacacactccctacacatttgagggcctcactgaaataagtaagaatggcaagccagcaccaaagttctctaaccatctggaactagtgctgctcaaccagtgagatcagcaagcaggcagggactctcatttgctggtgacacccaaatctttcagaggctacttgggccatggctgcagcacccccaaaaacatctgcgttccaaagaagcaattaaaatgtctgaaaatgttaaggtttagccaaatctttctcctgtaaagatgttttcacattccatatccagtcctactcaccgtgcctgccaggcattggctggggaatgtggcttcaaaataaaatgcagtctcagtaagcccagagagggagtacagcttaggagaaagggtttgggctctggagccagaagggtttctgtttctgtgacttgtagctgtgcagctttgggtaaattgcctaacctctctgagcccagtctgctcatgagctaaagtggacataataccgtttgctgtgttggaggatggttgttggggttatagagtaacggttctgaagttagaccatgagggctcattgctgaccccaagtcttatttgctgtttgactcaagccagatcttactcaccctcagttgtctcatttggaaaatgggggtgagaatggtcccttcctcatagggttttagtaagcattaaatgaggtaatacgtgtgaggtacttggcacatagtaagcgctcaggaaactgtagcctcttagataacaggcattttgaacaataggtgctcaacaaacagaagcggaaggaaagtcagggccaagggtgctgagagctgctcaccatgttcctgccgcagctgctcctggggccacagggattgagatgcagcaccaagcgcccgcccttcctgccagcccctagtcactcaggagagaatccacagcgtctccagaagcctgtcttgtagaaatctgggcagtccacagtgaaattaggagctcatcactagcctccaagcaaggagcacactgttgggtcctcagtcacctgcggggtaaagcataaggccgccccctctggtgagcaagtgggacctgctgcctggcaccccaagtcgtgcacaccccagatgctaagctctcaggagttcagcctgaaacctgaagcttctccccgaggtgccaacggcacagaacgcctttctgcaagcacagaaaagcatacacccctaagctcctgtaggaagactgccttgtagatgaggctgtctattgagtgatctttttagtgtatctttaattaaaccacgttggatgccatccaagaacggcctgccttgaccaacacttggccctacagtgtcataatgggaagtcccctggtgccttgagccttatcctccatccccatcactgttccgtttcaggctctggtgggctgtttgccagaggtctatttcctgagtattacttgtggtcagaggtgagaaatccagccactaaccaggtccaacaaatgtcgcctgtagctgttccaacacacatgctagctttggtgtaaaaacagagaacaaataaatacatttagtaaaatcaaaggctggggtaagccctccaggcagtgtggaggtgtggggcactagagggatgtgactcatggttaagacagtctgtcgaggaccacaacgccacagactggggccgtccactgaaacgaacgtccaggcatcgcacgccctcctggaagacttcagcatctttcccttggcatccgaagtttgctgaaagattcttcccttctcagtaggcactccttcactctccgctgttggcctccctctcctatcctgcctgcccttctttctgtcactctccttagaaagacttcctggtcctccttccactcagcctttctggctcctttgcttttactctccctgcttaactcacgccagctcctccatagaaggacttgacacctggagagactggtttcagccccctcttctttctgaaatggggactttacttattctcaaaagctggactctatgtgctgctcctctgtggaaggaacatgtggtcaggaggagaaaaaaaaaaggctcaggaatagatgatttccataattacgcttcgcaaacccttgcctccattcagctgacactctttctttctgccctgccaagcgggcttgctctggcgctctctcacaaaccccctccccacccccaacccgctttttcaaacacatacaccagcaccctcacatttcacaataagtaaatggtttaaaaaaaaaaaatctccattttctttttcatgcggcagatggcagttctcaggaacttggtggaaattaggctttctgattttctgataaatttcaacatctcacacaaaaagcacaagctcattttgattctgatgttaagtaccatatggcatatcacccgtggaacgtggcagcttcataaccagggtaacaaggaagggagggtctttcctgtaacaacgaggctgagtgggaatgaaccaattggattcctgggtgaataccatttgataataatattgtatatgacagtggagtaattatccctcttttatggtatgtgttaattttcactgccagtttccctaattacaactgccacccaacggactactttttgtaaatactctgtaaacatttgaaaagacatagacagtgcttgtaccaaaaaaaaaaaaaaaaagtccctagattttgaaactgtctggaaaattggctgacgttttatatgtttttcaattgcatagacagccagggaggaaatttcactatatggaaattccccttctctcctccatgacataatggacctccctgccgatactgtgactgttgttttgagggatatttttcgctgttacctttttctatattaagtgcgcagtttcatgatctttgacaaatgtacactattgtgtagctcacaccctaataaagatatggaacatctctgtggtcatggaaatttccccggtaccccttctcaatcagtcc

SEQ ID NO: 1885224 - DNA, 4001 bp, Homo sapiens
acactaagtccactgtgctggtccccctgctatttgataatattccaaagcaaaatacccatgctaccgatgactgggaccccccagctcagtcacttgggctagtttttcctgtagtctttcaggattggaagtagagtggagttgtcaggtcctgttacaaaagtagactaactggaactgtagacttttttctttaaacctaacagaaggaaaagattggtgaatcaaaaactagcataaaaactgcaaaaaacctctgggaaaatagacggtcatgaagtccatatatgggaaagaaatgtagcccagaaatttctaggcatatgaaaagcacaactgtaaaactaagatgttttagatggaggagagctgagagtgacagctgagagtcgtagatgctgccttggaagagtgtccacgctaccctggacaggggcctgcctgcccacccagtgaccatggcagggcagagaaaaagcaatgtcagcccagtatcttctccagccagtggggtggcttcaggagagggctgggactggggatctcaaccttagcagcacattagaatcatctggggaggtttaaaacagcctgatacacttggcctcacctggaatgcacaaaatcagaatctctatggattcaattcactatcagtatttaaggctgccaggtgattccagtgtgctgccaacaaccactgagagcacacagcaagggaagagagcaacctgctggcttctgagctctttctcctcccagcccaagggttaggggattgggagtcagagaagtggcccaggcagatgagtatggaggtgtccagcaagatgtggacagatggaggatctgggagcccacatttcaatgctagaggccatctgccctaaggtccaccttccccttcttcctaatcaagatcaccaggaggcgcacaggctgtaaccccttctcctggtgtacgatattaatcacggcatcttatatcccctgaaggggatataaagtcacaagaaaaaatttctaggcatatgagaagcacaaactctataagatactgacaacaagcagaccaacttttacctaacaattcagaataatgcactatattaaggagaaaaagaaaaatcagataagaattaccaggaactttataggaaaaaaaaaagccctagaactattataggacagacaagacctaagtagataaaaatataacatgttcaaattattgagataacttacctttgttaactgtagaactaaggtgttcattttccaccagattatctacagtttcaacagttttaatccaaaagttaaaattttttgaggagcatgactaagtgattttaaaatgtttatgggaaaacaaaagttcattacacccatagcttgtatgtggacaggccaaggaaagaaatcagggcttctgtctcccagtctggtgctaatttcaccccacctgtctacagccgtgaactgcattttaacagcacataaagaaatatactgcatgcaatgccgctcctcatatcatagaacaattatcttaatcataggaaagcttagaagttaacacatcagtctgaatggcatcatagctcatcgtttgtccctttgacaaagaacttttgtagcgaatgccactccaaacacacaggggctaaggcaaggctgttaccgcagtgggaagagggtagcactctgtgtaagcagacgtggccagcccagccgagagagcccccctttgctgactacctccaagaacgtggacacctacagtgccgcccaagcgccagagcgagtcccggcaatgtgtgccagctccttagtgctgctgtagcaatgactacaaactgaaatgacacctctgctgttggcttaaaacaacacaaatttattacttacagttttggaagtgaaaagtccaaagttggtctcaccaggccaaaaccaaggtgtcagtagggctgcgttctttctggaggcactagggaaaaaatatgtcactggcccctccagcttctagaaaccacctacactccttggcccacggtccttttcctgttatcttccaaggtagccagtacagattgaatcctgctcttattgaatcactttgacccaacacaccttcctccctcttccacttttaaggaaatctgtgattacattgggcccacctggataatccagggcactctaattatttccagctcagctgattgacatctttaattcccatctgcaactttagtttatccttgccatataacacaacatattcacagcatccaggagttaggcgtaggcatctttggggaccattattctgctgattacaaaatgcatcagattcaaacatttagcaggctagagctaacaccttccttattactatcacaaaatgtagaaaagcggtgaatatatcatcgggaagtttgcagcttatttggctggatccacaactgcctttcatgcccagaatgttgctaaaaggagagtctctctcccagttactctacatccatcctgcccttgtaaagccacctggaaaactgaagcaatttttcagaaatccctgtttccattatataaatattccgtgcgaaagtgttcttttggtctgacttattctaataaatgctcccatttaacatgcatatgtgtaatccagcaaattaacttctccacaggatattaaagttagtgtgttttgtgctgtatgtatctgtgcatgtactatgtttgaaccagaatatacaatgtatcaaggagctcattctttatctttttcctgcattttcttataaactatttggctgattagatttttactgtgacttttgtttcttatgtcttttaaaattagaaattactgccatattctctagaaaagtactatccagaagaaatagaactatgaagatatgaaactggttttactaggaaacacacatatacacagacacatacacacaagacatagtgtttgtacacccaggctcagtgattcagaatcttttttgtgttgcagagtattgggataattacctctttcctgaaaaatgtacgtagtcacatgaacatgaacttttgcactccttttcaaagggtttctgccccatcctcacccccaccccagaaatcatctataggttaatttggaggaaaaacattcaacatcagcacaggtacgggacaccaattagctgggaaccatggaaagaaaataagcattgtaagaaatagcagagaaaattgtaatttcaaaaaatgttgatcttggcattgtgcattaaagacttgcagtaaaacataactggtccttagcattaagttcttaaaagatggtttctatagccagtcttcccatagatagcatgtaaatggctctaaatgagaaacgtatagcccctgcaacacaagcacagataaaaggaggcctgtccccacagaaagatttcataggtaggacactgcatgaattccaggctccggatctaagagccagccttgagcagcaatgaagcagcaactcttcaagcagcaacttttctgaagtgaggaagtttgatccccaagcctgcatacctgatggcgaaagtgtgctgaggctacagagcatagaaaaatacagactacagagccaggctgtggctcaaaattctagtttcagcacttactgtgtgacatttggcaacttgcctaacttctctgtgcttccactttctcatcagcaaacagtgataataatagcacaaactcatagggtgactgtgaggagtaagtgagctcatctgtataaagcacttaggatagtgcctggagcacagtaagcaccatgtaagtatttgattgtgttattttttatcattattatttactaccaccaccatgacatagtcctccctgatgcactgttagcatgtaaagatggatgattattattaactaggatattagagaaagggctctgtctagggaaagtcctc

SEQ ID NO: 1885225 - DNA, 4001 bp, Homo sapiens
catagattggaataaaggccctctactgtctagatctcacctgtgtttctagatcttgtactattctacatgcacctgttgctccaacctagctgaacttcactgttcctcaggaagccctcagcaatgctgtcttaacttcctttcttcacattttcaatgtcgggaagatcttttcactagcagcttccccttcctttacccatatccaaatcctaccagtcctttaagacagtgtttcttaaaactgaataatgaacagactcctaaaataaattcttatgatcctagagaatgttttcagtaggctggggtccacagaccagtttgaaaagcacaaatataaagaactaaagagcaattgtataaaattatgcaaatgatcaagttgaaagacaaatttcatctttataactggtaaaataactcgtattttgccatagaactctgattcttatcttcagatctatgatccgtttaagaaacactaaggcaaagctgaaaccttggaaaatgttcctgcatcaccccaaggtaatacatttttattttttctgatttggtgtctaacaactttctgccttggagtagctagtaatatgtagcattttcctagaaaacataagctctttgaagacagggaccacattttatttattttttatatgcaccacacctaatacacagtacatcctcagcaagtactggctgtaaagcctatattccatgctcttattttgtagtccaaatcactttaaaaatcacacttcttctattgttcatactcatagaagagcatattactcaaatagctctgctataaattaacagtaagtttcagaagttataccaagtcacgagactcagatttttaaaaagtgccacaaagtgtctcttctgtgtcaatgttaatagaaccctttctttaaatgatcagtaggcaaattaagaatttccggataaagaacaaactctggaaaaacaaagctagtgggagaggccctgtaaatacctacctagtcttacaagggctgtctctaactcagcttgtattttaggcagcgtcttcagtttttcaactaatgtgtttgagaaaactgttttcctcggacatgcaggcgtggactccttacttcaggtaaggtgacagcagcttgacagagagtgccttccctcccacggcatttgggacgaggctgaaggaaagacacaggcggggttacgggaaacccattctctgcgccatctgggcaagctgaagtcagtttttccgctttctcacgaggtaatggattatcatgggctcaggtccccttcagctctgaaacaggtattctatggctctaagtaaacacggcaagagacaggttatttctttggtaagatcagttgtatttcccagagaataaaacgggcaacaaaccatttatcgatatgtgagtcttccccctaggccctagctatttggggttggataaagaaaaagagggtttgcttcctttttggcgggtcctccaatgacagggctcctggcccgctgcgggtccaactcccacctctcgtggctcccccgaggccgagcgaggctccgtgcgaggacagcccctcaaccgcactccccagagggagcgctgggactcgcggaggagattagtccccggtcataaacaacctctcacttcccctcccccgcccgcgcccgctcgcgccggggcggcgcgccggggcggccctccgaggcccaggaacctcctccggcgcccgcgaggccccgagtcctcctccggagggcggctgcgggcctgccctcttctcctaaccaggtgtttgtccactttactcaacccttcttactcgtccacgctacggccacctcacaggggcggctgacgccagcccctttttccctcccctcgacccctatcacctccaacagccaaggagaggccggcggccctgacgcgcaggctcaccgccgcggccgccccgcgcgcgcggacgcggcccccgcccccacctcgcggtccttccgcagtccggccccgccccttcccgaagcccgcctccgggtcggcccgcccgcccgctcgcgcgcacccgacgccccgcctctgcgcgtgctcaataactgtccccggagccggcctacaagcttcccccgcccctgagctgtttaaatatgctaatgaaaggatagggcctgaccagtagaacggcgaggcggtgtatcacgtggctcggggacgtgtcaggggcggagcctccgcagcccctgcccgagttaaaaccggagtgtgagagagaaaagcgcttcagtagcgagaggggctgagaaagtggtgacaccgccggggtgcggagggagtccctgaaacttctcccaacagccccagggccaatcttccctcagcccactcccctcttcgccagctcccaggtccccactcctgtaccgggggtggggtggggagccaggcccgtctcccgctgggacacacacaggggccgggagcggggacgggacccccgaggcgggggggacgaaccgacagacagacggctgggcgcccgccccagcgggcaggcaggcaggaggaggcggaggcgggggtacgacggggagcactgggtctggggagtttcctctcaactatcgggggagaaactccccgcagccggaggaaagacccagacagtgttttcctcccgggggccgtgctcccccgccccgcgtagcggcggtcgccgccaccggcgcctccacctctaccatctcctctttctccaccacctcgggccccggtgtccccggccagcactatgcccatcttactgttcctgatagacacgtctgcctctatgaaccagcgcagccatctgggcaccacctacctggacacggccaaaggcgcggtagagaccttcatgaaggtaccgactgaccgagcccgggcggcgaccccggcccggcggcccgcgggcggcagggtgggggagggcggccggggcgggggtgtcggggacctgactgcgggagctgccgggctcggggaccccctcccccaccgcgcgggcgggcgggcgctgcgagccgggttcggccggggcccgggctccggccccgggcggtgtgtggggagcgatctgtgtgtgggggacggcgtggaggggtggccgctgcgtgtgcggtactgtgggggcggcggggccgctgggcgccccttctccgcctcgtaacctcgcctctgtgcttccctgtcgcccgccctgttcctcctcccgtcccgcagctccgtgcccgggaccctgccagcagaggagacaggtatatgctggtcactttcgaagagccgccctatgctatcaaggtaacagccctcgccctccccctttcctcccttcccttccctgttccttcctcgctcgccctccccgcccccccattcacccttcattatgctcccctcccccacccgctgcgctcccagccgctgaggtctcttccctgcgggctcccaccccctcccccgctcggcagcgtcctagcgcggcgcggagtcgcggggccaccgccgtcccctcccggcccggcccggcagcggcggcggcggcggcggcggcggcgctgctatcaacatggccgacatttcccctccgcggcgtgagcggcagcaatgaactgtgggggatatttattcaagttagccggagtgacagccgggcccggccgcgcacagccccggtttgcattaaaggggaatcggcccggccggcccggaagccagatgcggggctgccaggattggtcttgtcagattcgtcctaagagggccggtgggacagctgcaggttaacttcctaagtccggctcccatctgcttccactagtaccttcacatacccaaattttgggtattagattaggtagtaaatttgtcagtgaagttataaagtattaaggcagttaactaccaaaacctagagaggaagctgggttattc

SEQ ID NO: 1885226 - DNA, 4001 bp, Homo sapiens
tttgccaattctttctaggcttatttcccagttgtatgttcccccttgtgatttggtttttatgacccaagatatggatttatttcaattcagaggaagcccacaaagaaagctgcaatttgagaaaatagcagtgaatctgctttttgattcacagaattcactgtgtgaatttgcagattcaaatacactacaaaagacctattcactattatggtggggacttgaacaactcacaaaaaactgcacgttccttggagccctttgaagcggcagctcttccaaaagagggtccctcaacagcaagagatgcccaatagagcaaatacatactaatgatggattcatgtcaatgcaatccattaaatgattgactaaaatctgtaatgacacagattttagtcaatttctataccttctatatcttctactaagaaaacgtacattttttcttatttgatagaaagttttcttatttgttagaaatctgaaacaggaagagattggggtaacaggccgggcagtgccttctctccagtgtgaacaaacagtgacttacaagtctatccttgggcatgctgtgataggactgtgtgtctcacacctgcctctgcacctagaagggcagtgataatagcccctgctgcttcctctcctagcagctgagtgataataaagggcacgatgggaattaatcaataataattgccaaatgatatgctcaatgcattttcaattttcagtccaattgatatatctcagtggttctcaaccagaggtgatctgatccccaaggcacatttggcaatatgtggagacatttttaatagtcatggctggagcagggctgtcgataaagagaccagagatactgaaaaacatcctccaaggagcagggcagtccccaacaacacttatctgctccaaaatgtcaataggactaggtctgagaaactttctatgtctgtctaacattcccagttttagagttcaaatttgtaaaattctacttttgttaacctctgagttgtgtcatgaatcaacagtaaacatatatatatgtatatatatgtgtgtatgtgtagacacacacacatatatatatatgattgtgtttttactgattggcttggtaaattaaactatttattcctaaatcagctgtgaggaccaactcactcttggttttgaataacattgaatattagacattaaccatccccatacctgttccttcaaagcagatgttaactagtattgttgaatattttcaacaaacatttcgggtgctcaggacacagtcctttcttatctgtagctctctgtgtaacctgtgctgttttctctcctaaccatgcccgaatgcatgaattcagtggaggttatcgcatacctactgtgtctcagagtcattccacaacctccctaggatgccttcattgtttggctcctaggaaatgaaaaatgcacttcctttgagctctaccacccctttaaaatgaccaagtcaaagccacttgctcacagccccaataggtaagacatggaggtgatgcctgtggtccccactcgctgtcctgcagccggtaggttgtttctaagagtcccacacaacttgccttcgccctgcagttaattattcctttacgattgttctcttctccagaaaacccatctcccttagactcagtgaagattgttttcgttccctccacacaattaagaaaagcacttccacaatgtagtcattttctttccaggaagcataatcagcacattggcatcttcctaagaatgatttcaagaaaccctctgctaggactgtctctccaacttcacaggctgcccagggttgccggactcacctgagctaagcagagtgggatccagaatcgggcagcactcagcacctctgtggtcccgaagtccagggctgcctctgtggggctcctcttgacttggggctcccactccctgtcgcacgctttctttctccctttctctcctgcagcacaacagcaactcgtggcttttcctctaaggggcgggttctctccatttcccactcccacgtgtggggagagcagccccaccgccggctcatacccctgcagtgttccccaggcccgcaggggggcagcagagcgaccctgggagctgtggaaacatggccgaccccttggagttaggaattcccgcgggaaacatttcatttcagtcccttaggcactaaacctagggacttagttctggtgcgagccccttctcaccccttgccctccctgcatgttggtggcacacgagaaagggtggaccgaacagcggctgcttaggaaagagtgtgaaggtactcaaagtgggctgaggtaatgagaggtgccctatggacttcaggactgccacgtagaaaagggattaaattgattccgagtcattgcagacggccagatctgagatagaatgaagttacaagaaggctgaattgtgccccatgtcataaactttgtaacagtggccttcttagacctgaagcaggctgctttgtgaggctgttgtgtgtctgtattgtaagcaagcacctagcagtagaagttctcagctgctgatttataagaagtgccagagattctttattgaaatgcagattcctgtaccacctcccaaagattctcaatctgtaggtctgggcctgggcccaggaatctgcagtttagactctgctaagtctcctgtaggtgctccatggaccacacttagagaaactggcgtcacatgacttaaaggcattctccaaccctgacattccaggttttttgttgtcatttcggtggaaaaggccagtctactggggagggactgggggagggactggtgtgaggcaagagaagagcctattatgtaaaatgcaaggagctgctccctctgaagctacccctgcattgcacacccctgggaggagggcacctctccgggctcactctagggctggccctgccactctcccagtcctgaatccaaggtgaccacttcacaccacaggacagggtgaagcagaggagcaaggggaggagagcctgctagaggaaaggacatacagtcacagtcatgagccacataacaatgtttcagtcaatgatggaccacacagatggtggttccttaagattataatggaactaaaaaattcctatcacctagtgatgtcatagcagtcataatgttgtagtgcaacacattactgatgtgtttgtggtgatgttggtgtaaacaaacctactgcactgccaatcacataaaagtaaagtacatacaattatgtacagcacatgatactttacagtaataaaaaacaacgaagtcactgctttatgtatttatactatactttttatcattattttagagtgtactcctttacttatatatattaaaaaaaggttaactgtaaaaatgcctcaggcaggtctttcaggaggtatccagaagaaggcattgttatcataggagatgacagctcctgcctgttattgcccctgaagaacttccagtgggacaagatgtggagatggaagatagtgatattgatgatcctgaccctgtgtaggcctaggctaatgtaatgtatgtataatgtatgggctaatgtatgagtcaaaattaaaaaaaattataaagtaaaaaagttacagtaagctaaggttactttattattaaagaaaaatatttttaataaatgtagtgtagcctaagtgtacagtgtttatgaaggctatagtagtgtgtagtaatgtcttaggctttcacattcactaatcactcactcactgactcatccagagcaacttccagtcctgcaagctccattcatggtaaatgccctatacaggtgcaccattttttaatccttcatatcctatttttactgtacacaatgtttagatacacaaatactatgtgtagtattttctacgtttagatacacaaatacttaccacagtgtt

SEQ ID NO: 1885227 - DNA, 4001 bp, Homo sapiens
atgtaattcctacaacagtatagcttcttagaaattatagttaatatgaatgggaaaactaagctctcagaggttacaggtgacacggtggtttctctgcaactgggatttgagcccacacatctctctgctcccaaacttacattaattatttcttgatgaactgagtgggtatttgttattcctagggtttgagagttgccatcacttaacaggtatggatattcaagaccaatcttatggaggctgattatttgttaaataatttatgaaagtgcactaactctgaaattataatgtaccccactgtgtatacacaggtatcagctacaagtacagaggtctgcagacaggctttccttcattaggagaaactggaggaagcaggaacacagttgattatgctctttaaaataaaaaaaatcaaaaagcaatttcattttcatattaaatttttcagatatataaggtacaacacaatatggaatgaaagttgaagaaatgtgcctaactagaatgtgatcattcacatttcaaccattaccagccagtgctactgcaagaagaccaagtctgctttctttcccctccttgagcacttttgagttatcccctgtgctttttgattacagacaagtcccagatctttatcctgtttatggcacctccaggagccctgcatgaaatttcctccactgcttcctctcctgtccctctttccagaaggcttctgaaggtttcattttgttgcccgttcagtctcaagtagtccccatcactgactcaagttttctatcatttcatcactgagctctgatagtgagtaatgaggcataagacaagatactacaaccaacacaacagtttagctcaggaaagaagttgcatcttgtcaaagttttgagggaaggagaatagagtcctgtaaactaaaatcccagtgatggcctaatagtgtttctacctttgtgagatgtcacacagccagtatccttgacagctcatcctcttctgaaggagagctgtttacccatctcttgggaaggttcaaacttttttttttttttcctattctgcaatctctccttttcaaggtcagacacagagggagaagaatgagacctggtcaaaaacatctctttcctcctgacttctcacccttgatcattttcttccagttaagaaagttacctttctagctcactgaacacattcaatggcttccccccttcctccttgaacaacaattacagcaagcatagaaccagttcacttcatgccaattttgtgactcaaaaagggcactcttcttatttttgttacttcgaaaatatttgagtctgtgggaaatgtcttggaggacttgcttttattatttccttgcacatggcattctcagtgcctagcctcctctcacatttaggtgaccattagggtccatgcacagtctgtaacaacaacacttcatagctgccttttctctttcctgacttccattaagcagagttatttaaattgtttagttttgtttctaaccataagaaaatacagtcatgaaggcaaaagtgctcatgattcttggctgtgctcccctccagtcagtggcagagaacatccatagtcccccaactcccactcaggctcccagctgaggtgagcaaacatacctgatcatggtggaaaatccaaaaacagggacaaaaaagcattcctgacccaggagcagagtcttcatggtgttactgatcactcacatcacccctccagcctgtgccctgctgggctctgggtctgaatcttcacaactttatgtcttggctctcaacactgtgtctcagggcttggtctggtcaatctttgcctatagttcaagtcataaactggttaccacataaccttccttttaccccaaatgttgcataagatgaagatgaaactatgcatgtggtcataacctggcacccacaagtgaggttcatgtcagtgaaacttttgaagaatgagaaagtggttgcgtagggcagtgggtagcaggtaaggcagtagcaccaatgacttccgtaaacaaatagcaaattccatccttccaggcttggcaaatagcaatctcattcttttttccttaggtaaacatttaaaagtaaaatatctggaaccagacactggacaaagagacatttgttttctttttctttttaaaaataatcaaataagaaaaattattaacagaaaagagattgagcataaatgcccaatatcataaaaaagatttgtacttaatacacatctaaaataaagttaaagtgtcctaaaaacatttagcatttcaaactaagatatttgcaggaagtgtaagaaactaacaaacagtttttttttttaatcctctaatgcaaaattccttttgttgtttgctcgtaagatcaaattgcccctttttggcacagatgggatgatattttaaactgaactgaatcaaataaaagatgctggtggtttcttcctctttagggtgtagaccagccaaggccctgccaggccttgggtcttcccagtgtcacctagcgtcatttcctgaccacggagcaggcactatgaagggacacagtattactttgatatctttgtttcagagcttccagggcacaagctttcatttgagtttctggttggcaagttcccagaaatatgatcttttagccaatataaccaacctcaatgttgtcccaaaggattctaaaatagatgttagccaatcaggtttgtaactagtacaagtttcccaccaacccttcttcttgaaccgtagctctttctggaaagcaagcaattactactgagaaattatttgtttcaaacccatgagcagagtgcagaaacagtattttgaataggatgccagtcttctgatgtttgttcaatcattaacatactacgttttctggattgaatagctgaagtttacctagaaagacggggaagaggattttgaaccagaaacacagattagagaatttgactgattgtttaatttttcagatgacattcagaaagtttaggattattaaatctggcctgagctaaagtttttctttcagtatctgggaggaaacgttttgctaagcaaattaagagtataataaaattatatagtccattttaacctattaaaaagaataaggtaaaactatcttctttttatgttttatttctatagatcattgctttgttttatagtgaaaacaattttatttcacatagtgattcgtgtaacttttttatatgatagcaagagaatgaaagagtatgtttagagatactcgaaattgagtggcagaagattttgtttcaacatctcacttcttgatctagctccatattttaaaattaatttttgttatattcagtcagtattgatataattatattatgattgtaggtaatttgatgaaaaatagcatcaaatctaataggactaggaatgactacattacagcatattatgtctttgaatcagcagtactatatcaaactactttttctttacattaattactgtcttcttttcacagtccagctgaaataatttcctttttgggaagccaaaaggcgaagcagaattgtttctcaatttaagcagcaggacatttcatattcaaggtgtaagatgtgaggagagaaccaggtgagatgggccagaaatgtggcagcaggtaagagccaagcagctcagcaacaagacagcaagaacctcctgtgtctggaagaggtcactccagctggtacccactactgagacaagggtaaggtttttcttgagtctgactcagccaagaagacccaacaaacaaatattggtgaagcacaggatactcatatgatttattgcccaaatgcgcacacctttggttctgaaagaagatgccattagtattgatgctaagacacaaggtatacaccaagcctacttcaggcaatgtcggacttccagtcacccaggt

SEQ ID NO: 1885228 - DNA, 4001 bp, Homo sapiens
cagtcgagcagcccccaaatgctactctgcctatggggtagccacccttttattcctttactttttaagaaacttgctttcactttactctgttggctcactcttgaattctttcctatgtgaagccaaacacccacgtggcctccgaggctgagccccagtttgggggtttaccctgtgacaatagtatagaacatcattactcacagcggagtctgcggtcccatagtatcagtgtcacctgggagggagctcattaaaaaacgcagaaccctgggccatgtctcagacctgtggggtcagaacccacatttgaacaacatccccgggtgattcatggcaatgtacacattcaggtttgagaagcgccagcctcgtgggaaaggtgggctgggacctccattcaaattctgcctttgccagtttctagctgtggcagagacacagaagagggaaggctgtgaggtcaggctgcccacttcacacactactggtgtcccacacatgcgaacctatggtcaagatgtgtgcacgctctcagcttcctcacctgtaccctgcagacaataatacgccaacaacactgggttgttatgagaataataaatccaaataaagcacttatctggaaagtagcaagtgctcaataaatgctagatgccaatgattttttctttaaatggtatgatgttggacaagactctcaacctctctggacctcaggttctgtagtgagaacataagaacaatgataactagtccctggcctgtgggaagggttaacagatgtgtgctgtatggtctgtaaacctctacagagatgatgatgctgttatcagcagcctgtcagaggaagaaggataggtgtgaaggtgattcgtgcagccagacctggcaagaaggcaaaactcctgatggtgggaggaagctctgacacgtgcttgggccactgaggtttttctgcagctcagggaaaatcagaccacccacaaatacgtgacgaggtgaaaggtcagtgggctcatgtcaccctgtcctttgtcttattctctccacctccacctagggactggactagaccgcccaagaagggacatttgcttagtggctgctgggtaaacaacaactttacaggattctggccagtgtgaaacaagaagcaacacaggttttctaccccgcagcttgcctcagagccccccaagacttctcttttgcttttctgtctcactcctctcttcttctgacatatccagtccctttgtaatcttgactttcctctgagggtgccaccaactgtatctgggatacatttccttatttgcgggaccatgagacactcactcactgtggcttgtttagtgcctgaggggcagaaaaactgaccctagatttacggctgctgctgctgctgaggagactttgaaggtttctgcagcaaacatcaccttctttgtctatcacagctctgctggacagaagcactgtgagtcccaaccccaagtgccctgtcagggccaacatgttaatgcagccactactggaggtcccgagaggcccgtcaaaaatctgcctaagaatatgcctccatttggaaggaaagtgatccatgtggatacttaccccgctaactgatttcttcctggtgttctgccaccacttgcctttgagaactgagtccacagcatctctttttttgtcttcctgctcctccaaaacagcctccaaaacaggatgtgtgtcctgcatcctctaaaattacagttgcaaaatttaaggctcaggtcaatgcttgagaagtgtaagctctgccaagcaaggctttgcttttccttttaataatctgtttccacatctagaaccatccataaaacctttgacagcaaaatgcccacctcatagagatacatgtaaaatttgaattttagccagagcagagatgccagccctgaccctgatccccggtcagagtcatctgtctcctgaaggaggccctaaacccttgccctgccctgcctgagctgttctatcatttttcgagctgggtgaaggactctttctgcctcaggaacaatattagttactgttcaggataatgtacatttgtggtgctccaagatattacgtaataatgccctgatgctctctgggaagacagagttctgaaactgactcaactatttactacttcatgtggagaggactagattgcttggtgtatagaagtagcactcctctggtctcaacgaccaggtgccagtagcttcctccctgctgggcagctgcagatcctcttccttttcagaaagcaagaatggcacagcatgttgggagagttgtttctgtagcaggccatccatttgtgtgtgtaggttggtctctctagcatcttctaaggggattccatgtcaggaggtgagttatcagaaggaaggagggccctcatgactttgtgcccaagttgatgacctggagcagttgactggcccccatttgccagggtggggttggctttgggatccttcccatgctgctggtgaccctggccctggtcagtccggtgggcagccctgctgtcctgatcagcggggaggggaggctcaggttccatccccgtggagcagctcaggctgctctgagacagttttgtccctcaaaacaaaagtgttccttgatttaaaagaaaatgctggtcccaactccttagtttactctttgtgggtaacaagcctcccattcactgtccagagggtctctttctctggggcctcagagaaggcctcattgttagaaaactagaaaatggcaatgtgggacagtgaggccccgcgctgcaagcgctcatggcacttgaatagttggaaacaagcccctccctctcccccaatagagacttgctcagatttgagactccaaagcttttttttcttttgtgatgtagactcttgactgtagactgtgtcagtgttttctgagaccaggtgaaaaatggctgcaataaaaacaaggcttggctttccttatttatgatactcccctgcacccagacacaaacaactaagtcttcacaaccctaaggcagagttacataaagaatagggaatcaagccaggtgcagtagctcatgcctgcatctcagcagtttgggaggccgaggtgggaggatcacttgagcccaggagtttgagaccagcctgggcaacatagtaagacaccgtctctacaaaaaaataaaaaacagctggacatggtggcacatgtctgtagtcccagctacttgggaggctgaggcaggaggactgcttgaacctgggagattgaggctgcagtgagctatgattatgccattgcactccagcctgggtaacagagtaagatcctgtctcaaaacaaaacaaaacaaaacaaaaaagaaaaacaacaacaacaacgacaacaaaaaaaaaaacagaataggggaatcatttgaagacaggtgaccggttcctcaagacagcaaataatgtgttacttggataagaatgaaatttccgttggtttatttttgctgcaggtgcagggtaagaaggctgtgggctaaactatccttaaatcatgatagcagacaacatgcaaataaaccaattttcaagggaaatgaaaacacaaactttgaactacaccctcccagtcctgtcctttcaacttccatttctttgtgggtgactctagtgcctatgtctctggatgcttctctccaagctccagctctaccatcctaacgtgtgctgggtttgtccagctgtgcatcctgctttccaaattgatcgtgtcccaggctggactcagtcctccacttcagaatggcacctcctcctgacttccctatttctactgatggcatcattgctaaatgtttccagttttgtctcttcagtaattccagaatcttctctttccttgtgtgtctactacacaaggtgagaccttattactgtttcccttgacaattccaataggct

SEQ ID NO: 1885229 - DNA, 4001 bp, Homo sapiens
ttttaaaagcaaatgaaacaaactttggaaggttaagtggcaaagccgcttgactcccatcactttggcatttcaatcaataatagagtctaaagaccaaacaataaaacaatggttaacatagaaaaaaagaaatacgagttcattaactaaccaggagatcttatttccaaagagtaaatctgattacattgttcctgtttaaaacccttcaatggcttccttatgcctaaaaggaaaaaaaaaatccaaattcctttgtgtggcataagaggttctttgtgtaacacaagatctggcccctcatcacctctccagtcgtatttctcaaaagacctctcttgcttcctatactcagtcatgcaaaatgttctgcaattctctgaatgccctggcttttcttttcctttttgtgcccatgtctgtgcccaagttatttgctttttctgaaagatctatctttcaaaaccttcttttccctccctccctccaaccctgttgaccaacttatcttttaaagtctgattcagtttcagggccatctcctccgagaccttccttcctgactgcttctcgagttcccctataaaacagtgactgcccaaagagcagcaacagtttgtaaatcattccattcatgctgcctagaacaaagctgcagttgtgtttagtaaaggtttatcaaatggatgaagactggtcactattagtcttgaccccttctatttgaaatatgtgaaatacacaaagtaaaatataatttctgataggggctgatatcaggaactgtaggagatctgtccattgaacccaaggtcttacctattaaatctctactgttgccagtctgcgctcctggattttcaaggggctccgtggaattgggaggctgatgaagctggtgaccaccctccgtaagcatgctgtgttggtgattccagtgcttactcctttcctcaaatgtggtcataagaagtcaggaaagtcaatatgctttcactaggaaaaaaggaggaaagcctgctttagttggttgttacatttttgatgaggcgaaaattcaaacaaaactgtaaccacaaggaccattaattgttctttcctgctaataaccatagttagccaattggattgtgagtgtgtggcatgcttgtattgtgtatgtgagtagggaatgcacgtgcgttaaagttcacatgtgcttaagagcttagacacacccgcaatttgcaagacagcttcatgtcctgatgtggccaaagctgtgtaagaagcctgagctgtaattactccgcacaaatttacatcctggggtactcacatcatcctgtggtctgtatgctctgtggctacacacctggctgagaacagaattaatgatgagaaacgtgcctgcttctctgcataaaagatgatgtctgagtagaaggtcgccaagggaggattaagagcaagaatgcgagaatgtgctcaggaatccgtgcgtgagatgatgagcttgtgagctgatgttgattctgtgcagttcccagtgtcttattcacaggcaagattttcttgctcatcgttcagccttcaatgttttaagcaaagatttttaaaaagatctaacaggaaacgaggagctgcagtgaagcttgggcagtcagttcgaatctgaataaatatttgtcagattggagaagcgctgaaagcattaagatacttggagatttctctttttctttggcaagaagcatgactgagacaggtaagggctaggaattcttccggatcactccctccaacaatggtctttcctttgaatttgcactttggagtctgacacagattagtgcttcctagtcctctaactgtaacacatgcctcagtttcccttctccgataagattgcaatatctttgggtgcaggaaaaaaaatagttgatccttttctttgtagcccagcaagttccaggcacattagaaactgattagaaactggtacacaagtgttacttgcttaatttattataaatgctttaaaaatgaggcaatgactatcattgaaaaataaaaccaaactgtgaagaacttctctcttcctgttagtggagactttccacagaatttttttttttttttgggaggcagtggacatgttgagttttcaattgaatattttgctgcaaacaacttaggaggagaggaaaaaagaaaacgcaaagccaaacaaagctggtatttttcaagtgctcattaatttcaaaaccacggtgtctttcattgattttttaccattaaaaaggacagcaatgcccatctgctcaaaattccatccagaaatgaaattatgaattaaagctgtgttacacatgcacaattgagacatcctctgtttgggcctgccagatgacacactgaaacagcctggggtctgcacttggggtgctgccaaggaagcagatacacggctgatgaaaatcatccatcatttcaaatcagaggtgccatattcctgcagactcctgttatgaacaatctcatttgatcttacattggaacaagctgtcttcaacactcaggcctggccccaggcacaacgaggcagatggaataggaatctctcattccatgcctgcatttgccggaattctaggattttgtcagaagttttcttgtgtgaacctagcctgacaggattaacttcactgagttgtgcttcaatatcagttcttacctccttcaatttgtgccaaaactctcatggaggacagtgttcatcattttttcacttaaaaccatatatatgagtcattatatagagcgattctttttagattcagtttccgggaaaaaaattaaaaagtcacatgatctttctgtctgctaatgatattatgcacgttgctcttgtctctatttttgccttggcctccaggaagctcacagccacgttttacactcaaatacagaaataatattaccatatgctagtattaccgtatttgtgatactcttttctgttgatccttagtttccatttccattcttcttttattaagcctaacacgttttttgttgtaagctatatcaaaatcattttggagaaaggccaggcttatataaatgataaagcataaccatcttttatttcccagccaagtggtttgtgttttagagtatatacttttagaagaaacagattgtttctttaaacagatgaaaatcaaatatcttccttcttcatgaagttaaccacggttagatcatccacattgatacagatgcctgataaaagatcaggattgcgtttgacaaccaggtttctcttacacattctcagcagctttcagtctctgaagtttttagtcttctttatttactacattaatcttgagagtaaacaaggttcttatcaaaaattaatattttaatattaaaagaatttattagaaaataatttatttaatcttttaatatttaaaagatattaaataagtttacaaagacaacagcaactaagaatgaccatgactgaatagagcaaaactgtactaaaatacaacaaataaaataaaggaatatatccgtgaaatgttaagaaaggcactggcccaaataatcagtactgagactccatcttgggtttgctttaaagcctctagcatgaagctgatggctgcccagtcatctcaaggggcagcactgtcccttaggagcttacagttgaagccgactaggcaacccctagccttgggcagagctgaaactcagcacttacacacaggactgatgttataactcggaacacagactcctcagtttcctttgatgctttttttctgagggccactcacatccgtcttctgtcttctttcatgatcctatcttaacaatcatgtaaactcaatcctttatcagacactcaacagaagcagactttgtcaattactggtggagagagtgtcctaaagaagctatccatgaaaacaagggtgacccggcaggcttcacgaagc

SEQ ID NO: 1885230 - DNA, 4001 bp, Homo sapiens
ttctgctcaggcagtctggatttccactcttctacttggggaggggagaatgatcaacaagaacagaacgatgggcctatagaactttactgcaagtgaacatatgagctgtctttgtaaatattcattttttttggtggcaaaatacatatcaaacttaccatcttaactattttcatgagcacagtttggtagcatttagtacacacccattgttgtgcaaccaatctccagaactcttcattttgcaaagctgaaactctgcatgcattaaacagtatctccccagctccctctgtccccagatcctggcgaccaccattcttctttctgtctctatgagtctgactactccaagtacctcagataggtggaatcacatggtatttatccttcggtgaccgggttatttcacttagtgcaatgtcctcaaggttcatccatgttgtagcatgtgtcagaatttccttccttttttaaggctgaataatatgacaagctgtctttttaagttgcaggtcaattacggatcctttgaatatgagagggagcaggattggcccttcagggtttgaggttttcaggaagcccacagagattgactccttttatgggattccataacccatatttcaatgacccccttcacacgctgccagtcaatcagtggatttttttcactgactatgttgacagtcctgggccatgcctgccctttgtaccaagttttggggaagtccaggccttgcatccaggggagagagaggcccaatctcaacacagctctgacatttattagtggtgacatcctgagtaagtcacttcaccattgtgaatacagtgcctctgaagtaaaatggaggtgacattatgaactctatctaggttgggtggagattaaatgaaagaatatatattagagcaccaggcatggtacctggtaagttctcaacaaatggatgttaaatcttagtacaaagcaaattaaagatgagatttttcttttgactaagcatagcacccagacagactagtggcgctccaacattttttgagtcaggggctcctctgaggatcacttacatgcctacacaacgtgacactaaatttctgggaattcttgaatctcatgatgtccatccatgacttcaggcacaagatcaaggacctgggatcgagatagcagaggataaaacattcccagaaaatgtagatcaggccgggtatagtatctcaccactctaatcccagcactttgggaggaaagagcaggaggattgcttgagctcaggagtttgagaccagcctgggcaatacagtgagaccctatctctacaaaaagcaaaaaaaaaaaaaaaaaaaaaaaaattcaccagatgtggtgacacacgcctgtaggtcccatctactcaggaggctgaggtgggaggatcacttgagcccggaggttgaggccacagtcagccaagatcacaccactgccctccagcctgggtgaaaagaaaaagaagaagaaaatgcagatcatgttttatatagagtgaaaaaagtaaggaacagagtcctgcaagtgctaaagggacactaatagggaacgctaacgcagtcaggtggatccagtgaggaatacttcctcatggatattcagaaatttctcaaggactcagtgtttacttttcattctactgtgagtggttcaccagtcttaagatttctccctcatttccaccctgggaaagcacatgctctcgtgcgagctacacaatgtaagcacttacttgtgtttgtcttgtgctttggctgattcgactgccggtggaccttcatgcattcttcctcttgtcgtgtgctctggagaccctgtctgctgctgagtctctcccagggccccacagatgcagccgttccaatgagattgtgaggtaaagttgctcggggaattgttctgaactttcagaaatgccactgtcctacaaggtggagtctgttctcaactgtttgttgttgttttgttttgttttgttttgttttgatacaagttctagctctgtcacccaggctagagtgcagtggcgtgacctcggctcactgcaacctccgcctcccgggctcaagccatcctcccacctcagcctcctgagtagctgggactacagacgcacaccagcacacccggctagtttttgtatttttagtagagatgggggtctcaccacggtggccaggctggtctcgaactcctgacctcaggtgatccgcccgccttggcctcccaaagtgctggcattataggtgtgagccaccacacccaacctgttctccactgatttaaagacactccatatatgtctgtagggaagcttagcacagtgtggacaaacatagccccgtatttcaagggaaattttgttttaagggctcagatgtcttaccctataattcaactgccatcttccccatcgtagttatctctttcaaatgcaggaccacagtaaacgatgcggggaagcatccaggcctccttctccctgccacaccctggcacattctccagctagtctgggacatgggcatcacaaaagcagttctgcaagtgctagttgtcatctcaagctgtctttccctggcaccatgccaactgctgttacagacaccatttccacaccctcccctctgtggcctggtgtgagcattttactaaatttcagtattccttgtcactactgctgcaagtgtagcatgaaagacttatatggtaacaaaaagcctcttgtctaagcagacaggggaaaaaacatataggaagcctgatcttctaattgcccaggaactggcaagtgaccttgctcaccaattacagagcctttgatttaagtcaaatagcaaatctattaaatctgatacctttgaatgatttgagtagccatgctgttataaactactttaaaatggcagtaatctgaagaatctagaggatgataagaaacacgtctactcacacggccagaacaaataacagaaatggccaaaaaatgctaagccttccaaacccagaaccaaacccagatagcattgactgaaaggatttctactcttttttcctccaataatcttaattccagcaaagccaagtctcctcagtgacaagaaaaataagtcagggtgtattttcttgttggcttttgcttttaaaatagcacttttctcctaattacaaaatccatttatgcttcatggggaaagcttggaaaacaaaaacacaacagattcaaggtcactttaagatcttgccaggactacttcaggcattctaatgtatgtctcttttatatttaaatagatttttttttacaaaaattacatgtttatacataaagtcttttggtcactgatctatttattttacttagcaacatattataaatattttccataccaattgatattttctttaatatgttgtctagcagctacatacagttctgtcatttggatgtattgtaatcctttatttattaagtcataagtaaggctttgatggacatctttgaatgaaaatctttaacttcatctctgattactcttaggataacctcctagaagtttaccttctgttattaatacatgcccatgtttttaatcagcagtcttcaagttcatcctttgattctacttacttaggagtcatttcaccaccaaacaataacatgaatatagatgccaaaacaaaaggaatgaaaatgcctccagtagacccagaaacatgttaaagattgaagctgttcgttaaggaaagctttaaggccagaccagagatgagctatttcctgaaacatcaaatagagaaaatgagctgatgtcaacagagagattcaagagaagttactataacacaatttcaaattaaatttccaacacttccagaaataagtgtcactgaggaaagttagaaaagacacgggcacactgtgcaaaaacaatgtattgcttgcagtgataat

SEQ ID NO: 1885231 - DNA, 4001 bp, Homo sapiens
acattagtttttttaaactttttaaaaattgtactttaagttctgggatacatgtgcagaacgtgcaggtttgttacataggtatacacgtgccgtggtggtttgctgtacccataaacctgtcatctacattaggtatttctcctaatgctatcccttcccttgtcccccacccccgacaggtcccggtgtgtgatgttccccttcctgtgtccatgtgttctcattgttcaactcccacttatgagtgagaacatgcagtatttggctttctgttcctgtgttagttgctgagaatgatggcttgcagctttatccatgtccttgtaaaggacatgaactcatccttttttttttttaattattatactttaagttccagggtacatgtgcacaacgtgcagttttgttacataggtatatatgtgccatgttggtttgttgcacccattaactcgtcatttacattaggtgtttttcctgatgctctccctcctccagccccccaccccacaaccggcccaggtgtgtgatgttccccttcctgtgtccatgagttctcattgttcaactcccacctatgagtgagaacatgcggtgtttggttttctgtccttgtgatagtttgcttagaatggaacccatccttttttatggctgtgtagcattccatgttgtatatgtgccacattttctttatccagtctatcactgatgggcatttgggttggttccaagtcattgctattgtgaacagtgcagcaataaacatacatgtgcatgtgtctttatagtagaatgatttataatcctttgggtatatccccagtaatggaattgctgggtcaaatggtcaaatggtatttctggttctagatccttgaggaatattatgggcaccatgatgtgtaatagatctttaaaatttattcctcctaactgaatctttgtattctttgaactacatcttcccatccccttccatcccacagcctctggtaaccacagttctattttctacttctaagaggttgacttttttagatcctacatataagtaagatcatgcagtatttctatttgtatgcctgacttatttgtcttagcataatatcctttgagttcatccataaaacaacagaaacttatcgtctcacagttctgcaggctagaagtctgagattaaagtatcagggggtttgcttccttctgtgaaggaaggatctgtcccaggcctctctccttggtgtgaagacaactgtctcctcccgtgacttttcctaacgccttccctctatgtgtgcgccaatattttcccatttttctaaggactagccatttgagattagggtctcccacttccaatggcctaattttaacttggttacttctctgaagaccctatatccaaataagtttacattctaagttactgggagttagaatttcaaaatatgtggggaggagggatgcaattcaatccataacaggaaccttgccctggtatctctgaggttcatttctatgactgatggtcagaggctgtgtttggattccagagattttcttgaatgtgtgtgcatgtgtgtgtgtgactgcatgtctgtgcacatgtgtgcatgtgtgtgtgtgcacgtggacatgcactagctgacctcttccttagggtggggttcctggtcagtctgtattcttccacagctttcacccatctgaaagcaaatcagtttcctttttcaaaatggaaaaatatctctttctccgtgtccttttaaacccccctccccacgctccttttccttcttactgtgtgccttaggccattcaggctactataacaaaatactataaactgtgtaactcatacacaacagaaatgtatttcttacagttctggaggctagaaaggccaagatcaggaagccagcagattccaagtctggtgagggcctccttcctagcttatagatgctgccttcttgctgtgtccacacatggtagaaggggctacctccctggggtcccttttataagggcactaatcccatttgtgacctaatcacttcctcaaagcccccctcgcaataccattactttggggattatgacttcaacataggaatttggggggacacaaatgttcagaccacagcatcatctcttttctctgacttccctcacttgcttttatttatttatttatttatttatttatttatttatttattgatacagtctcgctctatctcccaggctggagtacagtggcacgatcttagcttactgctacctccacctcccgggttcaagcaattctcatgcttcagggtactgagtagcagggactacaggcgtgtgccaccacgcccggctaatttttgcaatattagtagaggcggggtttcaccatgttggccaggctggtctcaaactcctgacctctgatgatctgcccgtctcagcctcccaaagtgctgggattgcaggcgtaagccaccacacccagcccccttacttattttctaatatatccacattgtgctgtttgtgttttgattctttcactgtccctcatattccttctttcatcatcataattaatttttaaatgttttgtttcttcatttactaacattacattcctattggctcagatagttttcttctgatttcactctcctttaagtattttttttatttttatttttttactccatgggtctcagaaagactgaagaaagacctgaaaaatgtttattcatttatattactggattgtgaaatttttattctttctactggaatgttgtctgtcctagattttaactatccagagagtaacctcccaccatgtgtagactacccattaacaaacgcattttgttgtcaatggtttgaagccttgaagattttgaaaagaagcttaaaacaagtttagaaagaggatgtttcgtcctgaaacttcacttgagttcacccatcactagagttgaaaacatagataccacagacttgcttggcttccagaggaaggctaccttcaagtcatgatattattagaaaaaagcagaactaattgttggatttttctcatccattatttttcctcctgtctctcctttttagctcccaaagctagtgttccatgatacattgctggtaaatatttaattgccattctcagaaatgtgttttgcattttcatgttaccctcctcatggtgatgaaagacaagatgggtaatatatgtgtgcctgtgtcagtgagtgtgtactctaggtattgtctttatcataaaagataatatatacattagatttcctgtaatagagaacttcctcgcctgcttcttaatgagaggtgctgatgcgaaatgaccctagctttcctaaacacacagcaatctaatttgaacctgtatgccaattacaggcctctgtggagcactttatggtgcaacaatcacgtcacaataggattagaacactatgccccaggaccgcaagggaagccagcccgggcataactgcaggtttattcctctaaattgtctgtaaacagcattgatagccaccttggtgccaccttggtattgtttctataaatcctccatagaaacaatctaaaatgaatagacaacgagtcagtaatggcctgttagttcccagcacagggttgcaccactgaactgcctcatgaataccactcatagggactgatcttgggtaaacattcacaaacggcagagcagacaggctctatgacaacaatcaggttagatagtctgagaaatcattgtgaatggtgccttccccctgatctttccatgcaaaaattagcttcagaactgaaccattttagttctcttaataagtttatacagtcatatactttgcacagtctcttcaatttcaataagaatttttttgcagttacctgacaatgctaactgcttttgactaatgtaaagaaagctaaaattgttatgtcttgatcatgag

SEQ ID NO: 1885232 - DNA, 4001 bp, Homo sapiens
agctaaaaattcagatttctgtgcctctactttatatcttctaaatcaaatccctgggggatggaacctggaaatagacatttttaacgtgttcccttagtgattctgatctactcttaagccttggaacccctgacgtgggcaaagtctcaagtcaatgcaattgtaatatcagtctgggagcttgagaagggacaatgcacattgatgcagtttttgtggttcaagaattctcagtgacactcaaacccctagagtaaactgcatcccatgcaggccatcatgggagagcaactagacttcagcatgaaacctcgcttctgcttccttcagttctgtgatttttgaaacatttaaagaacaaggaatgggaacaagatcttctgaatgttacattatctgacttggatattggaacaagggccatagacatgagcagtcagaacagcttgacaggcaactgaaggtcattagaaatggccccaccgtggagggagtggggaagacccgcgtgcctcgatttgcaaacagaaataaatagaccactctgtagggccccaagtaacaggttttccagtgtttttgccactttctggttccaaagagcaaacaataaattaacagacaggagctctcagcctcctaaccggagggccgccatcagactgtggccttccctcaggttacagatgacggagaaatttgaggttgtggtggctctggtgttacttaggtgtagtttccattgaaaacaggagacagagggggctaaggacatctggctgggcttttctggtctatctcttactgtacgagaggggggacctgttcctagccttgcttccagcctactgtttcctccccgagataaactgtggttcagttagtgtagagaggaaaggctctgggccacatggtaactgagacgaaagggagctaggtggttgtgccccatcaggatgctttgctaatgggtgattctggtagcatgacatcaccatctggggataacacagatatggaggtaaaaccctattcaagataatgctgtaactgcaaggagacaagaaacatcaacaaataatagaagcaagaggttggaaatgtcccttatctgtgaaaataaatgcagaaagaaaaactgaatatatgctgccagatggctaaagagaagattaagggatgtgtctctgatgaataagcagctgtgatctatttcttcattttatatatttttattttttgaaattgataatgagttagaaaaaccttggagattaatttgacctagaagcaaaggcgaacattattgtgtttttttctggtcattctccctaacactgaaggtcaaggagacaaattatttttcttttcttcttttcattcatatattttcccctctttgctttaaattttgtccttgaaaataaaatggctttagctaatacaggattctaatcacattgtaagactatcatgataaaattgtaacctttgacaatgcaaatctgcaagatgtggcaagatgcagtgattaatatttactgtgcaggtactttaaaactcatttgccctgaaataaccaagagaaagttctgtatgatagaactttatctaaactctcacttaccttgtaacatctttaaattcttactagtaaaatctagaataaaagaagtctagaataaaaaaagtcaagtaaagaccctcataaaaaatataaatcctggcttatgtaaactcaatgtatctatccaattataataataacagaacaaaccccaaaatataaaatgaggggtgattgtttctatttccatagattttttcagatttgctgcaggattgttttaaccgaatattcatcataatttacttctccttttttttttctgcacacaaattttagggatagatttagcaaataaaacaaatatatataattacccattcgttgaatcagcatgtctcttgtaactctgttctttgactagttaggtgtcactttttcagctgttgctttaaaaaacactgataccaggcaggtcttcgtgaccctaccagattgacaaccaaggactattgtggtgtttacatttcttgggtaagtacagcttatctgcctcacatgctgtgggtgtaggattctggaacataatctaatatatgactcagcattgttaagcactgaaggacttcatgtgtccatggctagttagacgcatgcttgccacacatggcctcaccacatgtagtagcttcccaccttggctaaactctctctcttctgcttttctcagaaatatgtttccagacttctcagtgagaatggcatttgggtacctgttatatttctagttggccatccctgagtcaccagggtatgccaaagcatcacagggccttttattgtgatgttagactgaatgtgatcgacgtgatagactgaatcatatctcccaaaattggtatgttgaagtcttaagccccagtgtgactatatctggagatggggccttcaggagataataaagcttaaatgaggtcataagaatgggcctctaatccaataagactatggtcttacaggaagaggcagagagagctctctttctctctttctgccatgtgaagacacaatgagaaggtatagtcttcaagtcaggagggagtctgcactagaatccaaccatgctggcaccctgatcttggaccgccagtctccagacctgtgaacaaatgaatttctgttgtttaagccagccagtctatagtatgttgttatagaatcctgaaaagactattacacatataaaacctggtaaaaagaaattgctgagagggcaatttcttctaactgaaaataccttgcctctttctattctgtctttggaaatattattccctgtttcttctatggtgttatgactactcatggaaatactaacaattcttatactaatatataacatttactgagctctcactatggcccaagcactgcttgtaccataagtgattacacagtctttggtatataagccagacactggtctaaattattttaaaatgttaatttttataacaactcaggttgttaatattatcacccccattttacatggggtaaccgatgttaaaaaaaaaaggttgttttgccaaggttattaataagcaagctgcagagctcagatttggaccaggaaagtctggtttcagagttcatactgttaacccttctgttatcttgcctatgaaaagtttgttatagctcttaaaccacaccacagtcctacaaggcagatgttattcatttccttattttgctgatggagaaactgaggcacagaatggccatgtaattttcccagcatcagacagtccaacctgagccagataattctagaggcttccagccttttctcctctgtgggtcacctcaagatgacaaggctggaggctgactgtcttctgcaggtggtatttaagaagaacttccatgcaaagggtcgaggtggttaacagctactgaagaagggggtgtgtgtttgagagaagcagacagagatttgtgatattttccaggctgcaggtaccagatctatgccctactgagttccatatgctttacccaggaactaccatctcagaggcagtgagagaattaaaatctctgggctctgactgtcagattccatgtgttcaggagtcaaagcttcatctggagctggaacaacttctctggttcaaagtctgcagtgcacctgcagatttcccattaaattgcctgctgaatcaggaataatgattctcagggggaagagatattatttgcatttgaattaatgttgactttggagtcacagattcctcatcaagaaggatttagagcaattgctgatatcctggggatctgtgaccagctcattattttcatctcacagggtagtactagaatttttaattttttttcaagtcttctttcgaaagtttggctctct

SEQ ID NO: 1885233 - DNA, 4001 bp, Homo sapiens
ccatctgctgcaatttttttaccattttgaagaaaatcttatcacaccagaatatgtaattctaaagaagacatacaaatggccaagaggccattttcatgtgaaaagaagcttaatatcactaatcattacagaaacataaaaccacaatgaaatatcatctcacacctgttatgatggctattatttttttttcaaaagtagaagacacatgttggtgaggatgtggagaaactgcaactcttgtatactgttgggaatgcaaaatggtgcacccactaaacatgatggagtttcctcagaaaactacaaatagatctcccatatgatccagtaacatcacttccaggtatttattccaaaggactgaaattaaggtcttagaaagatattagtactttcatattaattgcaaccctattcacaatagtcaagatgtgaaaataacccaaatattcacatataaaagaatgcattttttaaaatctggtatatacatacaaggcaatattattcagccataataaaataaaaaatcctgcaatacataacaatatggatgaagcttaaggacatcattttaagagaaataagcccatcacagaaggaaaaacacttcatgattccacttctatgaggtatctaaaatagtcaaactcaaagaagcgaagaatcaagtttgtgggcaccttgcttagacttcccagcctccagaacagtgagaaataaatgtctgttgtttaaagtgtccaggctatggttgtttcttattgcagcctgagctgactaagacactcttacacccccaatttcctcctctaggtttaatttcaatctgttctcttaaatcccatcattatctaaaaatattatagattccaactatttttattgactataaaaatatttatttatttttgttaccacttcagtctgtttagttgttcaatagattaagtaagtaacactgaaatatagtgacatttgccacaaatctgagatgcaggggatgatgaattttagacaaaaaaaaagtcgaatttacaccctcgtctacaaaatgttgtagtaaaatagacattttctttggcttttataattatttacctcttccaatgtgtaaaaggaaaagttgattctgtagccattgtggatattagatatgattcacattgatgtcactcttcagttgattttttttttttttagatttagttacttaaagttagttacctgtggagtaaatgaatggatcaggtggcacaaaaaaggaattgaagccagacattctggcagtattaagaaatagtttgtgactgtcaaaatctgccaggaagaaaaggagaccacacttggtcgtaaattacatcctacgcattaatttgcacttattataggggcatataggtccaagactctactgatctgaataagtgaaacaatgatatctcaccacttaatattgtttgatgataattgttggattccaatgagaatagaagtaaagtctttgtgattttcctaggtaaggcaaggcaaacagaatcaacaacatctgcgatttactgcatttatgtacggcttgttagggagagaaggaataatgctggcagcactctgcaattttcatctctgctgcaaaagggcacaatgatttttcactttacaaaaatagttactattagtcctgtcatacaaaaccatttaacacagttgatttggtattgtatcactaaaatttcaaatgaaataactgtattctcatgccagaatcagactgcattgtaaatatttttttctagcttgtattctcttgtattcatgaaagaaggatgaggaggaattatgtacacacacacacacacacacacacacacacacaccaaacacttctaaataattcagctagctaaaaatcttttgtttgccagcaaacaagcaatgctaatacttacatactctattttctctgctttgcttcatcagataaaaccaaactggacactaggagatatattttatgtgaactgcacagggaattagctctgcagtttccagggacaacagtaaaatttgtgtgctggattgcatttgtgttatttaaagtaagtcagatatttcaaagcaagctgatttaaggaaactgaaaatatttcttaagtgattaaaacagggtaggatattgtttgtgccatttcaaaataatatattgttaggatttttatttcacagatttttaaaatttgtattataaaatttaaaataactagcaaatactatagtgatatgggcaatgggacaaataatttttcatttatggcatcaatgaaattagaaggaactaagtgctagcaacatgaaaacttttttaataatttgaggtttagaagacattttaatgtgcctgtaaaaaacattacaatattttaaaaatttatatctaaaactgaatgcctattttgaaggaaataaaaggagctaagatacattaattgcctattaggcaccaggatatttttcaacagtgaggtgttgtatgatatggaagtatttccttcattttcagttgataaattaagctcatttacacttaagtggtaaatgcttagcatattgtgagccaggacaggcttgggcctgctctgacctcaaagtacttgttcaatgaaagccctatcctgtcttttctctctttggaatctaatgaataatttaatgaatgctctcttttcaccaaaatactcttaactaaagaatggaagtgcaatgcaggcaattattataaattacatgaaaatagtcactgtaaataaataaagagtttaacacagtgagcaagatttaaagacttggcaatgaagattaagaattataaagaaacaatgaattgtggaatgctacatattatacttcaaaaactacaattcagcttttggaggtagggaaggagagaggaaagaagggattgagtgagggaaagaacaagacagagagtgagagcgaaagtgagcaagagtgagcgacagagagagagagagattgtcactatcctgtaagccaagttgaaatatcgcaactgtgatccatatgtcaatcaataattatctccttggatccaataacacacttgagttgcaataattctggtctgtctttatagccaaacattcaatctagttatgaagcattgtcttttaaatccccatatctcccatatataatatctttgaccctaacaaaaccatacaaatgtgttattcaactgctgcaaaaacaaataataataataaggtcaaggcatagtacaaaatactatgatattccatagtatgttcctggtgggatattagatggcattaacaaccacacaggtcatgagctgaaagttactatagtctgcactgaagttataatagacattgttttcttccaaacacacgtgcgcacgtgcacacacacacacacacacacaccatatatataatagagaatggttcagatctaaatttctggattacaggtaaaacttccttagcaatatgaaatctattttcttgttgtaaaaagaccactggaaaacatttgcttgttttgttcaatttacagaaattatgcattgtgtaactgaccatgtagccatacagctttagataatctttaggccttttctacttgacaacatgtatttttctgtagcaattgctacattacctgttacaacgttgcatctcttttcattttgttttagttttaaaaagcattttttgctcccgccctccactcttcaataagtccttctggaaatgaggcacattaaaatacattaattttagaaataatttttccaaaagtattcaagtttatagaaaaaattatggtaatctgaatactacatactgaatgccacatagaatatcacattaatgatcacaaataattatgcgacgctaggctgaatattgtgccattgccaatccaaccctagtttgaatacaccaaaa

SEQ ID NO: 1885234 - DNA, 4001 bp, Homo sapiens
aaatgctgcaacatgtgtgccagtggagaatctgtaattctgtccgcataaatgtaacttaaagtttaccaagagactatctggtttaatgtaataaccaaataatcttttacagacattcatactctcactcattcttctgcactcatcaaatatttaattagatacatgctctctgaaacatgtatgtatatcatgttttaaaaatcagatgcaaattttgtctttttgctctcataggaaaggatgttacacaaattgtgtacaaacaactaaatcattttaaatccttaaaataggtaacacagagcttgatacataggatatactcaattacagtagcacatcgtaaacaagagtgataaaaggataaatccagtatcatggggcatttagagaaggaagatgtgtgtgtgtgtgtgtgtgtgtgtgcgcgcagaaggggtatgtttgagggcaagtgtgagtatctagaaagcttcctgaactggatgactttgagaactgattcagcgctgtcctgcatcacagggctacaggtaatatgaagatgaagctgggtaaatagatcggaagaagaaaaataggtttaggtctgaattttatatttttcctttttttaaaaaaattgatttccccctcctcttcattgtaatcttcattaacagaacagaaaatacattgaaaataaataattaaaatgccagttttatgacatacatcaaaaatggaggtttggaaattaattatatatgagaagacagctacctgctgttaaaaaataagaaaaaaatatacagacatcacacaaaaagtttcccacaccaggttttttcatagcttgcacagcttcttcctttcatcactggactcattttcccaccttcccgaccccagtttaggatgcagttcattccgtgcaatttctagccataaactctagagtatagaaaaacattcacattactctgggtgtttggttcaggagtttaccttgagtatcaggttggatgttttactcgcaaatgtttataaacctgctactgcatgcaacgcactgctctaggtactagagaagacatgccaaatagtgaaaatacttcaccatcaatggagactgcaatagacaaatacggatgatggagataacatacctacaatgtcgaagaggaaaaatgtactgagtaaagaacaggcttacctcaaggttttgcttgcaccttgtggcagttctaattccttttgcatctcctggaggtgtttactagcttctatatgcatatattaccacaccatgaagtagtgtctatatacttgagagatgatacttcaagcttctatttctttagaactcttttttaaaggtttaatgtttgaaaatgttagtaggtgttatacgactgcatatgttaagtgtatctcccttgcgtagttgaatggtgtgggagtgcactgttaaaccatctggttggtccagttgaaaaatcccttttacttgatgagatggggatgtaggctgaagagccggcctggttgaagagccgtgggaacaccctcctccttccttccttatttcttctgaggtggaagtgtgatgctccaaaacagttcctctctcttcagttccttctgtccttttcttaagcttaatagttctgtgttctggaaaccatttcattggtttttgattttatagtgctctctttactcaaatgtacacagccaagggtactgaggagtaaacaaagtagaacagtgttacacccctttcaaattcattcacacttccaccagagtgatatttcacaggttttaatattatcaggtgactttcctatgtaaaagcacctagtcactctccatgacaaagccctgctccttggcatagcttgtccatatccatacctccctacctttccaggtttctttcccatagcctctttgtagaattcactgcagcctaactgccttcctaacagcctaactgccttccttctgcctgcccagaagtgtaccaggctcactcgtgcctttgctcactcggatgcctccctagatcacgttttcacctcccttgttcatctggctctccccaccctcctactttcagacttatccttctaggtcagcaaatctggagagcctctcctcttgatctagggtgagccaagtgcctctttgttccctttgcccagtgaacacactcctaaagcaatgcatgatgtatgttaccccattaaatcacaggttatatcttggcatctgtgcctggcacataacaggcactcaataagtatttattgggctgaagtgaaataaatagtgttttagataatcaagtacaaagcagagttttaagaggctaaataggtcagtgtgatcatctttgtcatagattgtagtaaaaataatctgtgaaaagtgactgattattgacaggtagccttgggtatgcagctcaagtaggcattataaaataaaaaacatcacattccatgtattttcaaaaaaagcttctggcttactcaaaaggtaagtgttctttaaacaacttcaatggaaaaggagtttcttccaaatgcttggagaactccttctcaagtccggaataaagcaaggtctacagagacaaagtataaataaaaccatggtgctgagctggtaccactattgggctgctaagcagtgctaagcattgccttcagatgagttatctagcctttgtaaagctcagattccacagctataaactgagatgaataataatacacaaaacactaagctgttgagtagattaaatgaaattatttatgtagagcaaatagaacagtactgtaccttataaaatttaaaaccaaaatgtaaattctgatttttacccaagggtcaactccgcacaattttgcaatggacccttccccggccctccagaagctgaatatcgttgtgtatcatatccaaattcagtatcaccagggcatagagtaagtgccaactgtgaggccatagctatgcgtccactcccctgaaacacattgtgtaccttcattcttggagttgagtctttgcatttcatcctccagagtgagaatagactgcgtgttggagaggtcagggaaattatgtctttctatgtctagccctttataggtcgattatttgaatgcttgacagcatctgtccacttatctatccctgcaataataaaatacgggactaaagtagctcgtatctctagtgggagagtgcatatattttatacgtcaattctttaaaaggggaaattctttcagagcttcagaaaatatcacggaagagttaaaagaatgtttgagaagaacatgtctgagtattacctactagcattacaattttactgctttaaagtaattataattttcattgcaggatctatgaaaaaggcttttacctgacggtaattcttcttgtacttacaggtcattattacaatgaagggaagaaaggaagacatgaaggggaaatgggactatttaccaagtgtatctgcatagactaaaggagacaagaggaagtactgagcaccttgattcctgcagataattatttaagaaccataagaattctttcctagcttctcataagcctgctccttcaaagggtgagtagttgacatgattttacatcccatttatatttctttattagataattttatttcaaatctagtcttattttttctgaaccttctgggatatataacattttatattatcatttatgtcatcaagaatgtagatttatattcttttctattcacatgtttatgtaaataattgaacacctctaaatgacagatactatcattttatatattgttaataagtatcttcatggctgggcgtggtggctcacgcccgtaatcccagcactttgggaggccgaggcgggaggatcacctgaggtcaggagtttgagatcagcctggcgaacgtggtgaaatcccatctctactaaaaaca

SEQ ID NO: 1885235 - DNA, 4001 bp, Homo sapiens
catcatctcagtctgacagagactgtcctagtgttagcattaaaagtcccatgtccataaaaacccctcagtaggctgggcacggtggctcatgcctgtaatcccagcactttgggagctgaggcaagtggatcacttgaggtcaggagttcgagaccagcctggccaacatggtgaaaccccatctctactaaatattgaaaaattagccagcatggtggtgggttcctgtaatccctgccactcagggaggctgagacaggagaattgcttgaacctggaaagtggaggttgtagtgagctaaaatcacgccattgcactctagcctgggtaacagagagagacgctctgtctcaaaacaaagaaacaaaaacaaacaaaccttcagtcccaagcaaattgggacagttggtgaccctggtggagcacatgctgtaagattatttcctaaactatgagtggataagaattgttctgagtctgtccctgttcagagtcctcattctttttccttttcctgtcaaagctagtttgattcctagcaggattctaggttaaacaacggtttcttctcagacctctggaataggtcccattggcaggccacccacattgtcctgaaagtgttcctgactgtccacacgcattagtccacaggacggagccacacagccaggacggagccgcacatctgttctcctccacctttggtcaattctatgcccacctggttcttggaaatgaaccaggatatgtaacaaaatccatttttttctccttaggatgaaatgatgttgaaggaaagaatgttatttgaggacctgctgtctgtccttttgtttaaagttgccatttccaagaacctaatgacgaccttaagtgaggaattagtgtgctcataaaaaagttttagacgttttacgcttacaggaaaatggtgaggataatgcagagagttctcatgcaacagaaatttctactattattcatgtcttacatgagatgggcacaccctgtccccgtgtccgaggactggacaagcccactctagcggtgcacagctggggcgtgcccctcggcagtggggtgacctggccctctcgcccagtgatgtcctcatgctttgtgtcacgtgaaccacaaaatctgagtgaaaacgaaagtccatgaatgtccagggcagctaccagacgtgcgcaagtaagtctcatgaaacaaaagcttccctggatggggacaaaacacacttccttccgcttgtcaccatccctggctccttcaactcggtccgtctccatgacgtgttcctctgcttctcttcctccgaataaaaaggaaacatgcctcgtaaggacagcagtgccgggctggagccgcctctccccatcagcactaatggcgtggtacctctctgcccgcccttctctctcctcacctgtgttttcctttcttcccgaacctcctcttggctgaggcctcatgggaaaaataggggcactcgccccatgggccccagggaaatgccagtaccccgggccggagagtagccgagccccagactgagtcgttgctccatgggccacaaaagctggttcccgcacagcagccgccctgggccccggcagacacgacagaatgggtttccttacacaaaccgcgcttggcagatgttgcctgaaagacaggaactccgaaattccaacagaacggccagcgggtggctctctgctctggcaggctgcaggctctcagggacgccatgtctccggaaggtcagcgtcaaatgctggtgagaactcactcactcctcacctccgtgacaggcacgtgtgttggctccaccagggtgcagaagccacacgagctgctttaacagaagacattcatgtaaagcacagctctcgggccgtggggctgttaaccaggagggtgcacagtgcatgcaccgcccaggttccggtcagttttgctcccacagtcatcaccctggagggcgtttcatgttgttgctgtgagaatttgccgttgcttgagtgagtcatgctgacgtggcccctactccagggtttccagtctttctgctcctagactgactcagcgctggtcattaggtgctgtccatcaaggggaacttgccctgggcatggaaaatgctgaccagctccctgttttggaaaatgacctcatccccaggctgcccacaggaggcggagcatgccaatgccgttccttactggtgtgtatattactgtttttgtccttttcatgcagcctgcggagtgtacctctatagctgtcatttcactcctgtgttttctcggccttgggcgaggatcccatgctgctggtaatgaaagctgcctgttccctcggttgttttcacagtccctcctttctcttccagagagaggttttgttttgttttgttttgtttgagacaggatctcactctgtcacctaggctggagtgcagtggcatgatcttggctccctgcaaccctgcctcccaggctcccatcctccctgcaacccatcgtcccacctgtgaagggaaaataaatcttgggcccccaaactcaagccaaagggaaaagtcaagctgggaactgggtcatgcaaacctgcctccccttttggtccctaaataagatgctgcaagatgaaaaactgcacacctcccctatattttgtccacaaggaaattcctagtgagctccgcaatctttactgtaaggtgtttctgttaagatttcaccacagcaatgcaaatcgatagctcatctttacaggtgcagtcaacccctgcccgccagacacaaatgcaaacctgattgttcccctgccccctttgtctaagtcatcttgtgtaaaaataatgcagattcaatgagccaaacgcatgactatttttctctacccgcctcttagatgaaaattgtgtacttgtcattatctcaccctttcccctttaaatttggagccctcaaaatcatcttcggagaaaggtacagactgtctcccgagtgttcgtccttaactttggcgagtaaacctcctaaaatgattgagacttgtcttgtcatttttctcaattgatacacctcagtctcccaagtagctgggactacaggcatgcgccaccaagcccagctaatttttgtattttttgtagagacagggtctcacgttgttgcccaggctggtcttgaacccctgagctcaaacaacctgcccgccccggcctcccaaagtgctgggattacaggcgtgagccactacgcctagccaagagaattttaaaaccattgaggaaatagtgccattgttgtgaatcagagacttgatgtgctatttcatgtagtggttcctgtcgttttgcttgcaaaattggcttcaattatcttgaattatatgaactgtcagaaaagccctgcggcagatgatggtaacgaaaagacatcctttagcagacagggaataggactgattcactgatgcatctgagttgcaatttttttagctgcttctaaaaatcttgtaattaaattcactggtgagagcacagtagccttcataaatgggaaaacagaaacatcgaagttgttctcaaaccatcctggaatcttaaagttcagggggcacctggcagaggggagccacagaaagacggcagggaagggagggttaaggcgaggccgggataagccaagcagggctgttctggtttatctttcttactttgttcttaagaaaacttgctgaatgtagttggcttcagatcttcctgttttaaaaaaaacgcagtaagatgaaaaacctgatgtgtcctctgcccttccccgtccctcccgcctctccctgcggggggtgagcactcctcagagtgcctggtggagaggcccctgccctcccctgcacggagctggggtggccttaggccaacaaccatcaaagaactcaggcccttagttcagcgacccggggggaactgggtccagtc

SEQ ID NO: 1885236 - DNA, 4001 bp, Homo sapiens
tgccgaggctgagccttcggctttcccaggggaaatagctgtggataagttattcaattagaacagcattattggccagctaccttggagaattgggttgatgatgttgcgattatcctcccgtacattccttcatgtctccggcaggctgcagtgcacggcaacttccttaagtgtttactgagccctacagtagaggtgaacaattggaatgaagaatatcaaggattcctgaaagaaaatcaattttgaatgaacttttcttgcttagccacagctccaatattctgagtcatactgtatttttgtggactttcattgaattaagtgacataaatggcaatcgggaggaaagtgaatttcatgatatgcatttaacctatggcactgcataaaataattatttatgtacaattgtaaggtaacaaaaaatactcaggtctcctcaactgtgatattaatcttaggcatggggaaatctcataggagcataatgcttttttaatgaagactttagctgttcttcaaaaatatttgtatcataaaaaggagtaattatttatgagtcactctctcaggaagtcagatcccttcaagggtcatgccatcaaccaaaaacttcctaaatgggagcttttgggaatgttcattgttatctctaagatcctatggtttgtaactagaagacccaacaatattcctcttgcctcacacaaatatttataatatttttatatttttaaaaattgttggtgcttaaagaaagttagacacaaggaaaaatattaaaatctaaaacaatttattttcacaattatgtatatacacatccaactatgctctggtatgccaaatattttcagggtgcatatccacaccccaggggcagttcaggtgatcttctatgactgttaattgggcaggaaagcaaatgtgctcctcatcactggttcaaattctgatggctttggaagatatctgtctgtatttctgtttttataaattggaagaattatgtttatattctttgtctgtgtgtgtgtgtgtgtgtgtgtgtgtgtgtgtgtgatgctgatattttaagatactcatttttaagagcctcttatatattaggacataaaccctctattgcaaaaatgttttcccccagcatgtcattaattttcattaagttgttgatatttctgatgttcaaaagtgttatttgcaagtagtcagatctactttttcacttgtgttgttttcacgacattatgtgtaaagtcttcacttgagataagttaaatatttacttacattttctgggtttaaaagttgaaatgtattttcttttaactaatccattagatatgtatgcacatatgtttgtctgtgtgaatgtatgtatttagcatagaatggtctaagataaatgtatgtatgagatcaggctatattatcaaaaacactaacatctcagtatctgagcacacatttttttccttgctcgtgtaaagttcatgtgtgtcctgaaagcttttggatagatgccctccacaacaacaacaacaacaacaacaaaaacaaattaagaatttggaccgcactttcacctgttaaaagcctttaagctctgtttttcagagtacttcaatcttatggcacccccatctcaactcaaagctctgggttcactgtggaagaggaggagaatgtgggaaatgggtccatcatctctcatgtactttgggctgggaaatcatgcattgcctcctgatagacacagccgggctacgggaccagtcatctagctacggcctactgactagaggagtgaaaaaggagaactggaaatattgctaaggactggtagtatctgccacaatttacccttttgtttctccaaatattcagtgcagtctccctctggtatagatatgtatgacaattatactcacctcccctctaagagagaaaaccccgtggtcttcctcagtcatggcattgagctcaaagtccagaattcagaatctctgagtgatagaattgtccttccgtatccatgggggcttggttccaggacccgcatagatatcaaatccacagatgctcaaatcgctgatataaaatggtgcagtatttgcacataacttatacatatccttccatatactttaaatcctctttatataactttcaacacctaatacaatgtaaatactatgtaaatagttaatactatattgttttatttacattagtttttattgttatattgtttttattgggtttttaaaaaatattttccatccacagttggttgaatccttggatacaaagggcctactgcatactgtactctctatgtcaagtctataggtagctcccatagctttggaaacctagcaactaaaatgacaagttatctggcacttacacatctcgtaattgaaaaaggaaacaggagtccctgttgctgaaaaattctgtccttccaggcagacgttttttgagccccctaccttcacgaggcccggactctgctctcctggaggattcaacttggttcttgttctctgtgtcttctgtctccaccctcagggagatatttgtcctttcctttctcccttcttgggctcatataaaatagatactagagaatatgaagttttcttagcctacttcctacccagggcccgagaggtgttttagcaagccgcccagggcagctttgaatgcagcctaacacaaatttgtaaactttcttaaaacattttgaggtttttttttttttttttggtttttgtttgttttttggtttttggttttgcttatcacctatcactagtgttagttagttagacaattcttcttccagtgtggcccagggaagccaaaagattggacaccttgttttagagtctcaaacacttttagtgcaggctcacagtttcttaagcaatacaactctcttaaaactttgttggtttttctaagctattggattccaattaattccatgtgccaataattacagctacgattctttacctaacacacttcttacttcatccgtatttctttacactcttgtgcctgtacctctccctgcttgaagacctggtagttttcctgagtctatctggatttgatgagagaatggaacccttaagctcttttacctgagctatttttccgattgaaaagattactgggcctcaggcccttagtttgatctttaccctaaggcatttttatctcattaattcctttttataagtaaaagttcagtttaaatctattatttatttttgttgttgttgtttgtttgtttgtttttgaaccagctcaattttaaagtcttttaacattttctcttttaccatttaggattgaaagcaattactggtttaactcattcaagaccccaaatatctgaactatttcctttcattcttgctggcaaacagataatacttttcagaactgtttttcttataattccttatcaaatacagcccatagcgaccagcacagataaatacctgctttgcgagatctcacactagagacacacattcattgggtacacattctgcctcgcacattatcagaggggacagtcttaccaaatgagttcccgctgcaaaacttggcgttccgtctttctagacacaggtgtctgcaacagaggaaagagcatggacaatcattcactggctcctaattaatttatcagagcccattgatcagaaagataaatgtagctctgcaaaacatagtatgtccacagaaaggaggaatattggaaatattggtaatatctagaaatctctatgcaaagaaaactctaatttgtgttttcttccaaaagacaaattttcctaatttgttaaatatccccctttacccattggtccttttaaaaataaaacatttcataatctgtcacaggagtagaaaaataacaataaaataaatacttcagacatagttagggttacaaggaataaataaac

SEQ ID NO: 1885237 - DNA, 4001 bp, Homo sapiens
ttatggtttgtacttatatcatgtttaagaatttctgcttatcctgagggcatcaagatattctcctgttctttgcacaaaagttttaaagattaacatcacacttaggtcttctaattcatatgaatttatttttgcccatgggttgaaacaagattccaaatttatttagttcacgtagataactattattgactagctcattattttctcactgatctgtaatactaagtcttttatttaccaagtttccatgtggacaaacagatcaaagattcaaatcagactcacacagacatagattcacagactcacacagaaatatagttgaccctgcatcaagctttacaaataatgttaagggcatcaacaattgggaagcccaggtaacataagctactgatacacaggaggtactctggccctgatcattatatgagatctctcagaagagttgcagtcacatcactgacaaacatgacagctgtattaggtatgaaacaccttcagttaatatattaatggttgtagttcctagggatctatggcctccaaagtcacggattccaaattggctgttcataaggcaacatagaacagaaagtagcatttccttttccatgtgctaatattaataatgttgcattagaatgtttctgagaaaattggatcagatcatcttccttctttcttttatggaaccatctccctcattagtttaacaatgcatctcagtccagctgttaaccatttcttcctaccatgaataaggaggtgtggttctggggtccctattacattctaccaatcaatttgtcaatttctacatcaaaatcacactgaattaatagagacacaagaaagtgcagcacagtagttaggagtgagagctagactgactatatttattcctggttctgctatttaatgcataaccttgggcatcacttttccactgattttttcatatctttgggttactttcaatacaaatccattaatgcatacaatttcttaaaacagtacattggacttactaagccctcaataatataagctattgctactgaggactaagctctgattttttatctcaccctaattcctatgtaaggggtgtaagggaatcatgccctacaaaccataaattttcatcagatgggttttatttgaccctatatatggtgactaactctccaatttgattctggcataacaaggtagaaaatcaaaatgttttacaccaaaatatatttccttgccgtaccttgaaattgccctgcagagtctcttttgggaaaaactcacattctatagggaatcctctttcccctttgttttccttccttcccagatccaggagataatcagctaagagccaggcacccttttaggactgataagaagtattttacaacctgctctctctctgaagtctgctatctgagagattcctccgcacaataaaacttggtctccacaatcctttaccttaacctgaacattcctttccattgatcccaggtcttcagataaactcagcaaattgtcaaccagaaaatctttaaatttacctatagcctggaagtcctgcttttagttgtcctgaccttctgaaccaaaccaatgtatttcttaaatgtatttgactgatgtctgatgcctccctaaaatatataaaaccaagctgtaccccaactaccttgggcacatgttctcaggacctcctgagggctgtgtcaccagccatggtcactcctattttgcttagaataaatctctttaagtattttacagagtttgactcttttcatcaacatttctgtcagaggcgtgtaaaccagagcaactgcatctcgaacaggaactgggtaaaatgaggctgaaacctaccgggctgcattccagacagttgttaaggcattctaagtcacaggatgagataggaggtcagcacaaaatacaggttataaagactttgctgataaaacaggttgcggtaaagaagccagacaaaaaccaccaaaaacaaaatggcgacgagagtgacctctcgtcgtcctcactgctacactcttcccaccccaccccccgccccatgacagtttacaaatgccatggcaacgtcagtaagttaccctatattgcataaaaaggggactcatgaataacccaccccttaaaatcggcaaccagcagccctcagggctgctctatggcgtagccattcctttattcctttactttgttaataaacttgctttcactttgcactgtgaacttcccctgaattttttcttgtatgagatccaagaacctcctgtaacactactattatgtagtttcataaaaagacttcatatctggtagcatgatttcctaacatcctccctttttatgtcctttcttattattcttcaaaattatatgggccgtgtttagtctatagatcttctgtatatattatagaatcaacttctcaggaatttcagctcaattgtaatgaattgatatcttctatgatacatctttatttcatcatagaatctttctcaattcattaaggtctttcatgacttttgataattttttaaataatattcttcataaaggacttatgtatattctttggattatttttctgagtaccatgtattatttgctgctatgactaaatattcattttatttagaaaaatatattttaagatttatttttggtgcaaagtaattaaatgtatttttgcatattgttatattcaccaattgtgttgaattctcattagtttcctaattttctgttttctttgatatttttgataaaaactaccattatttatgaactactatagttttctttcattctttccgattattttacattttatatatttcctttgttttcctgagttttctgggacttacagtacatgatttaataaatttttcttcttttactgttacctatatagtctgaatttgttgttggttaatttcttctgccaggttaagaagactctttttactcatagctttaatgagctattaaatatgttttaaatgatttcaaatatattttctttatattctggatatgattatatatatttaaattgttaatgtaataaattttgttaatagatttttgaattatatactatgttgtatttatggataaaccaaaattagttgtgccatattatttcatataaaatacatactggattctatttgctaatacttacataggatttttgtatctatgtttataaattcatgccttaaatttattttttacatagtgtcattcactgattttgtatcaagagtatactagttttctaaaacaaattgaggagcaattcacatgcctgttataagaaaaaagttatggctgggtgtggtggcttacacctgtaatctcagtaatttggaaggccgaggtgggtggatcacctgaggtcatgagttcgagaccagcctggccaatatggtgaaactccgtctctactaaaaatacaaaaattagccaggcatggtggcacgcccctgtaatctcagctactctggaggctgagacaggagaatctcttgaagcccggagatggaggttgcagtgagctgagattatgccattgcactccagcctgggcagcaagagcgaaactccatctcaaaaaaaaaaattacttaaatttagtattatcaacatcttgaaagtttgggagagtgtgtaatcattgtgcctattaagtttatatgtaagatagtaaattactgactcaacatttacaattgtgttatttttagtaagttacagttttctcatttgtgtattttttgtaagtttaacaatttactcatgggaagtgcttcataccattctttataaaaatatatgtctctaattatgagccattttcactattaatgctatttatttgtaaaatttctcttttcttgagctagtatactacatgatttttaaaataaacacgtcat

SEQ ID NO: 1885238 - DNA, 4001 bp, Homo sapiens
gagttatgaattaaattgactgtggtattctaaagaagcataacctaaaacattcagaagagaaataatgtgggtcttaaaagtagaagtaactacctaacaaattttgctttcaaattagagtagtgagaattaatgtttatcataatattacaaccactatggaaaacagtgtggagattccaaaaagaactaaaagtagatctaccattcgatccagcaatcccactattgggtatctacccagaagaaaataagtcataatatgaaaaggacttgcacacgtgttaatagcagcacaattagcaattgaaaaaaatatggaattaacccaaatgcccatcaatcaatgcatggataaggaaaatgctctctctctctctctctctctctctatatatatatatacaccatggaatactacacagccataaaaaggagcaaaataatggcatttgtaacaacctggatggaattggagactatcattctaagtgaagtaactcagaaatggaaaaccaaacattgtatatactcacttgtaagtgggcctaagctttgaggacacaaaggcataagaatgacacaacggactttggaagggtgaaatgggggtgagagagaaaagactacacattgggtacagcgtacactgctcaagtgatgggtgcaccaaaatctcagaaatcaccactaaagaacatatccatgtaacaaaacaccacctgttccccaaaaacctattgaatttttttttttttttaaagaaactgagataacctggaagacagtcagggtgtgagccacccctttgctgatgaagacaataacagatcagctggttgtggagctggcaccaccccactctgcttgggaatttgttgctggaagagcagcttggagttcacctcttcaagtctcccaacagtcataaaatcttatgtaatactccagtgataaaactgtttctctctaaaccagctagattctttttcctctgcagtaaaacctgatcttcccagaaattagttttttttttttttttggttatttctccaccaaacaatgtgtcatgatactcaacgtttctctagaaagtgggttggggaatagaattttacttctttatgattttcaaaatagcatgattatagatattttaagcttttttagatttttcagaattttcaaaacaaaatggaaaatatattgttttttgacccccccctccacccacccacccacacacacacacacacacaaagggtcagggcccagttttactcacgtcaagtttgagatacctattaaaaattcaagtgagtaggcaattggtaaatataaaattttcagcatgtaagcggcatgtagatggtgatatgcaagtggagtgagtattctgagttcctgtctctaaaggtgctcaaatagaagggaggtgaacaattaaaagtgtaggtaatattgttacatagattgcaattctgatttgcgttggaataaattacctctgtgattccagaatatgatcccacaggaaatgatgttgtgtccagaatttgtggttcttggtcttggtgacttcaaaaatgaagctgcagacccttggaccctcgcagtgagtgttacagttcttaaaagatggtgtgttcggagtttgttccttcagatgctcaaatgtgtccggagtttatttcttctggtgagttcgtggtctccctggcttcaggagtgaagctgcaaaccttcgcgatgagtgttacagctcttaaaggcgtcgcgtctgcagttgctagttttttctggtgggtcgctggtctcactggttttaggactgaacctgcagaccttagcgctgagcgttacagcttataaacgcagcagggatccacagaatgagcaacagcgagactcattcctgaagagcaaaaaaaaacgcaaaaaatcaacgctcccacatcacggataggaaatctgagtaggctgactctgctggctggggtggcccgcttttattcccttatctggtcccacccacatcctactgattgggccattttacagagagctgattggtccattttacagagagctgactggttcgttttgacagagtgctgattggtgtgtttacaaacctttagctagacacagagtgctgattgttgcgtttacactcctttagctagacagaaaaggtctccaagtccccaccggtccgagaagcccagctggcttcatccttcagtggcactcgcctagggactttgcagcacctagcctgggcagtccggcagcccagagggagctggtcccctaatcaagcccagcaggcgcccgccggccggcggcgctgagtgccggcccgcggggccgcggaaccctggcccacccagaacctgcgcagagccacaagggccgtgcacagccccggctcccgcccgcgcctcccactccacaccccccccgccagcagagggagccggctccagcctcggccagccccagagagggggcccccacggagcagcagggggcccccacggagcagcagcgggccaaagggctcctcaagccggccagagcagacgccaaggccgaggaagcgcccagagtgagcaagggctgctagcacgttgtcatctctcaatgtctcagcaaactaacacaggaacagaaaaccaaacaccgtatgttgtcactcataagtgggagttgacggtgagaacacatggacacagggaggggaacatcacacactggggcctgttgggggttgcggggcaaggggaaggagagcgttaggacaaatacctaatgcatgctgtgcttaaaacctgaatgacgggttaatagttgcagcaaaccaccatggcacatgtgtacctatgtaacaaatctgcacattctgcacatgtatcctggaacttaaaaaaaaaaaaacgaaatcttcatagatcatcttaccaccattacgatacaattttatggaaaaacagaactcaagggagttaagagtctttctaatgggcaaacatcttgttagtggcttttatgaaattcaaacttaggacatttttagtgtgtgccttttacattgcaccatgaaccaaattgtttcccttgagacactttaggatgatttcagattttcattaagtaataaaatttagcccgtttattttcttaaaatagacaactgtaagttagacttttgcttaagacgtaagaatatttcaactctgttttacaatgatatactatttatcaacctgcatttagaaagctaaactaattatattaaataggacaggaattgagcagacagaaggagacatttgtttagataatgtcttggttgtgagagacaattgcatttcaaacatgtatatttattctgttgtgagacagctataatatttttggttccaaaatgtgtgaattttaatgagactactagttttcttttaatcttgtgagaaatggaccaaattatatatatgttaaaaattagctaccactctctcaaaatatattttatagaatattgtaaactctaacaactgtcacaaaaccaagtgatgttgatagtagatgctcttggtataatctgatgaatatgataattcacctctatgctctttgtatcaaaaacccgtaacccctatctgtaatgagaaaaaacatatacaaatctcagttgaggggcagtatatgaaataactggcaattattcctcaaaactgtgattattgaaaagaaggaaagtctgtgatactatcacagccaaaaagaggctaaggagacacgacgattacatgtaatatggaatcttggatgggattctggaacagaagaagggaattgggtaaaaatgaaaagagctgaatgaaatatggtttgatttaataactgtatcaatattctatcactaattgtgacaaatgtatcatactcttgtaaaatgttaataaaagtgaaaattgggtgttaggtatacg

SEQ ID NO: 1885239 - DNA, 4001 bp, Homo sapiens
attttcctctagttcattgacatatatatcaagtagaacattggcatggatgaacaaaaccacaaataagaggcccagcttgacggaagctgctaaaataatgattttacttggaagatgtggcctgcatgctgttttgaattaggtgccagggacactacatggcaggatagttttcattttagatgttagttatttctttagtcatgaagtggcatttgtactgtaacagaatttgtgatgaatttgtatcccaaaaatttacatctccgggggaatgctgcaatttgctagttgttagacattagataaagcatagcacattttgattctgtcttcacctgtgtaaagtggcatactcatacctactatgttaaaaagctactaaaataattcaataaaataattatagaaaggcgtgaaggaaatgcaaaatgctatctgctagcatctcaaattatgttcttgcttgctcttctccaattaactggacgcctcactgttctttgaatatctcaggctatgtacagcagggctttaagcacttgtttttcttctgcttcaaatcaaaactcctcatccagatatttactccaaagtcattttctcaatgttgcattttttggtcacgctacctaagattgcaacccacatgtgtgacaccccaccctccttcatacacattccctgtccacatttcacgtttcaattttacttttagaatttgctattctttaatacactaaatattctatttattcatcttcactctccccagttggaaagtaagcatcgtgaaagtagtaaattttgtgtgcttgttgatggtcacataccactgtctacagcagtgccagttaggtggtaaaatctaggtatttcattcagaaatgaatgaatgctataagggtggtaaattttcctgttattaacagtggggaaaaaagaaattcaaatatgtaaaacaaggatctactcctttttgtttttatatgtttataaggaaaaagtggaggacattaattaatgaaggaaagcagagataattttagtagccaagtgagaatgacaaattttatttttgtcatgctgtcctcactattgctagcagcttcctagagcactcaactgaagaaattcatcatcctggttcagacaaaatgactttattcaattaaaatacccgccttgggtctgggggtcaaataagtgagaattttgtgtcacacatttggcattcccacaagtaaagaatttcagaaaattttagcagtagacatttggcaatatcttgacagtgattactcgatttaacataatccatccaggtcattcaagagctagtctcttagggtctttaacccagtgtcaattccaatatccctttggagaaagatctctcctaacccactgctcacatcaaagccttttagggcccctagagtttccataggacagtgtaaaaaagatatttaatcaataacacagcttattaaacaaaaattagttgacctaatgaagattgtgtattctcagaatgcacatagagtttgggaacacttaaggagtttatgcagttagatgttgtgaaatagagacaatacccagggcaagaattagctttctatagagttagacatttgtttatggaattttgtttattttaaaaatgaaggcttgacaaactgagggaaactatttgtaaaagatatatctgataaaggtctgttatccaaaatatacaaaaactctcaaaactcaataagaagaaaggaacaacctgatattttaaaaaatagacaaaagatctaaacagatatctcaccaaagaaagtccaagttgacaaataaacatatacaatatcatacatcattagggaaatgcaaattaaaacaatattaagatatcactacatacccattataatggcccaaatttcaaactctgaaaacaccaaatgatggcgagcaggtgaaacaataggaactctcattcattgctgttgggaacaaaaaatggtacagccattttggaagacattttggtaatttcttgcaaaactaaatatacttttaccgtgcaaaccagcaatcatgctacttgatatttactcatatgacttgaaattgtatgtgcacacaaacactgcacaatggtgtttatagcagctttttcctaattgtcaaaatttgtaagcagctaagatccttcaaagagtgaatggataaataagctgcagtacacccagacaatgtactattcagggctaaatagacatgagccatgaagtcacgaaaagacatggaggaacctttgtaaaatgtgctgtacaaaatggcgttacgcaggttccgagttctgaagtagatttcagaagccattctaagaaggattacctgcatggcttgtaaccttgcaaaaaagaaaaacaaaacaaacaaacaaaaaaaaaaacagaagtttgccttgaaactttgaactgggccaaactgcaacaaccatagcatcctgaaaaacaactgaatgtcaccaacactggaactcttgaatagcaacaatcaaggaactatggactcatgtactaagccaggttcttccaccagtgataattctttcaaaacaacttgtgtaattaccctcagtgtactgttaaaatttcctactcccctctgtctcttcggaacacaatttgatctttggacaaatatgtgcctccagaattacaatttcaaagaccgcaataaatgcctgtcttattgcattgcagtctggttttccacctcttcttagttcacacttaaatgcatgatagtaattgaaaaaagccaatctgaaatggctatacattgcactatatcattcaaacaatatgacaatcagtaaaaggcaaaactatagagacagcaaaaaaaaactcagtggttatgaggcagaaattgttaaatcagtggagcagagaggatgttcaaatcaatgaaactaccctatatgatgctataatggtgaatgcatgtcattatacatttgtctaagcctatggaatgtacaccaccataagttaaccctattgtaaactatggactttgggtgataatgatgtgtcaatataggttaattgattctaacaagcatgccactttggtgcaggatgttgacagtggggcaggctgtgcatatgtgggaataggagatgtatggaaactataccctctacctcatttgtctgtgaacctaaaactgctcttaaaaatgaagtctgtttttaaaaaaccatctaggcccagtttcaagtacctttgttagggttattatgtctagaggaaaaattggcctagcaactgtttttcatccagttttaaattcacagagagacttgtattatttcatttagacctcatgacctcattaattcagatctgttcatttcaaatgcatggtattcaactagactaaagaatacttttgtagttctacccatcccccacccaaagtaagggttttctagggaagaaaaatttgaagagagaacgcttattatgctcaaaatattcatctgttttcaattattttaagcactttaagcaattcatttacacatgaatggctgaaatggtagaatacaaaactcttatctgtataaaaatgccaggctgcattttttttatttgaaaatatttgtttgtcataaagcaatataaatgcttggcttgtaaaatcatctctaaattcaactaactccttaaatgtttctaattcctgtctcttacaatttttcaaaatatattttgatattgagtttacttgtatagaatgctcattgcggagatgattactttttatttataaggtactcctaacttttgtcttaattagttttagattatatatagtcaaccaataagaaaaatgtttaataaattagattttcagatctgtaagtgcattctataatgctaaaattcaacttttgttcataaaaatcagggagaaggtaaaacca

SEQ ID NO: 1885240 - DNA, 4001 bp, Homo sapiens
gtgcatacgtgctcatgtacatgtgtatacgctcccacgcgggtgtacacacatgcatttgtgcgtatgtgtgcatgtacatgtgtatgcatgtgtgtgcacattcacagattcatgttcatatgtgcacatgtgtatagacatatcgttcatatttccccatggaaaagacacattctgcttacagaagcctttccttgtctgtcacatatttcctctagcccttagtttctaactctttttttttttctccttttccttttttagagtgaggtctagtgagcatgtattgaactggtcagatctcaagtgctaccattcaatgagttctgaccagtgctcgtttgtgagtaccccacatcctgagcaagctacagagcattccatcaccccagaaggcagcttgtgccgtcctgtcacccccacctggtgccccatcacatgtctgtgctcttctgtcgagttgatttaacttcgcctggggttctccagcattcaactcctttggagtttctgccattctccagggtctgattttgtttttgctcccaagacttacttctacattcacattaaaaagtcttcatttcacacaagaggggccagaaacatctctctgttgttctcttgcccttaagacccacggccacaggccactcctgtccttctagaagctggtcgcaggttgagcagggatcagaaagctgcatcaagttgacccagtcactcacatttaatattaggttggtggaaaataattgcgggttttgctacttttttttagtgacaaaaacgcaatttattttgcaccagcctattagtatttactgtcctaagctttttgtacgtggcaaacctcaggatacccctgcggatccacacggccagcaccctcatttagagatgaagagactgatgttcagagtggttcagagagtcagatgatctgccactctgccggaggccggttagacagcaggacggagtcaccctggagtgctgctctctagccagatcattcccttcgctcccggagcgtgggagaggccgcctctggctgcttttgtgcagcgtagaatgatgtcttttgtcacggtctctgggaagctggagaaggtgcacgcccttcaggacccccaccgagccccaggcctccggatttcctcttcctaagtctcccctggggtgttctgtaaagtcttttcctgctcctaagaccctcctgctaccaccccctctcccagacttctcacttttcctgctcttccagtcacccaggtctgcttcctctccctgcccatgagccagccttgcccggaacccggggtgatgactcccagtgggtgctactcagtcccttaggcccccggcagatggttctcctgcgcccatggctccagggctggggtccccggccccccaactgcctccctggccttctctgtggtcccctcccttcccactccctcactgtcgctgctcccagcccctggggcagaaccagacccttctccctccacagcaccgccaccccccaacagctcgggctgcccctccagactcgtggtgtccgtgaactacctgacggccgactgctcccagacctacaccccaggccggcgtccccgtgctccagcctcgaggggttccagccgctctctgggcatttgcaccgagacgccagggagacagcgcatctcccccagggttcctgtctcagtgaacggctccggcccagaaccctactcggctttcttacctccccttcttcctaacctacttctaaccactcgctgtggcttactcgtctcaatcccaaacggctctcaaaagaggcttctggtttgcctgcccttcgccacgggagtggggagccaccgtccctcccacagccctccagcggcctccgggcgcccaccgggcccctcacccgaggcttctcgatgggacaggctgtgctgcgctccgagaaacggacattctctggctgtcacgagggtcgttagaaaacaagtcacttccgccagcagcgcaactgcgcaggaatgtgatcccctcccggacgcggctaagaataacgtgcctcgttagcgcattgaaaacagcggcacgaaatcacacggggcgcgctgacaaccacgttggcagctcagcgtggggtcgcttttcctcccatgcaactccatgggaattcttaaacacgctttctcccagagcagcagaggcgcggggcgggcccctctggagtgagcaacatgttcttattctaattatgctggtaattagagcgcaggtctttgaacctcaaccagccacgttcccgcctccaggactcacgcaggatgagaagcgggtctgaaggtttcctgctgcccaaggctgtttgccgctgttgtgaagggactttaaaaaataaacccacctgtggatttgtgtttgttgtttgtttgtttccttgcctcgtcataaattgctggtgtccagatcactgtttggtgttctgtatatattgaagcaaacggcaaacagcctttccctctttttcattgtgatttgaattttgtggcatgcgagggctgacatttcattatttccactaaagcttggaatcggagaccagtgatctaaaggaacggtatagggagtgcatttgttttgttttctgaggtctgcatttgtctgtgcatttgaatagggcgtatgtctttggttgggcaatgaattcctccatatcaaaattttcaaatataaactgagccaaataatcaagctgatttacaaagcgatttctgcagaatgaatgatagccttaagtaattgccagaggaagtcccgcaaaccttacgtttatgacaagaatgaattggtccattttgaggagtgagggtaaataaatactccaggctctgaacaaaccagggagagacctgggtgtggaaatccaatcttttgccatcactgtcaaaaaatgtattgagagtgtcctataagcacggtgctgagccacatactttgggtgataagagatgtcaaagacctctgtgctctgtgatcccctagccagtgaaacacaagtgtacatacctgtatattgaatgtcaggatgcctgtgccaactgtggtaggtaaccaatgtatagcccagggctcacagggtgacagaggaaggggtctctttccagccccaggaagatcttgcttgtctatcttgctctacctgacttttttttttaaatgtccttattaaaaaataataattcttaagattatcccattatgtctattttctgttatatctaagctatataaaattctctagccaaatatttgaaaaaaaaaaaaagcttctaaaatgcttctttattgaaggaacaaatagaaaacccagggttggaaaaattaaccctaaaatcagaaacagttcagaactgcaatcaaccaaatgtaggttaaaggcaggatctttaagaacagtgagaacactcagcctggaccctcagcaaaaatgggagacttcttggttccagacatttaagaccttagacatttttgtctaatcattagttgaccactaagataactgagcagagacttcattggccacatatgattttaaaaattatagactttataaaatttgtttaggaaatttactaaacaaagaataacaaccagcctggaggaaggggaagaatctgatttccagagttggtgcattatattacataaaatgtccagctctcaacaaaaagctgtgggacaaggaaagagacaagaaagtgtgacccacacacaaagaaaaagatatgtgatacaaattattcccggggaagcccagacattgaactttttagacaaagcctttatttaaatcttctattgttaatatgctcaaagaaccaatggaaagtatgaaaacaatgtctcaccaaatcaaaaatatcaatacagaggcagaaattataagaaaataaccaaatagaaagtctggagctaaaaac

SEQ ID NO: 1885241 - DNA, 4001 bp, Homo sapiens
atgcatttgtgcatgtacatatgtatacactctcatgcgggtgcacacacatgcatttgtgtgtacatgtgtatgtacttatgtatatgctcctacgtgggtgtacacacatgcatttgtgcatacgtgctcatgtacatgtgtatacgctcccacgcgggtgtacacacatgcatttgtgcgtatgtgtgcatgtacatgtgtatgcatgtgtgtgcacattcacagattcatgttcatatgtgcacatgtgtatagacatatcgttcatatttccccatggaaaagacacattctgcttacagaagcctttccttgtctgtcacatatttcctctagcccttagtttctaactctttttttttttctccttttccttttttagagtgaggtctagtgagcatgtattgaactggtcagatctcaagtgctaccattcaatgagttctgaccagtgctcgtttgtgagtaccccacatcctgagcaagctacagagcattccatcaccccagaaggcagcttgtgccgtcctgtcacccccacctggtgccccatcacatgtctgtgctcttctgtcgagttgatttaacttcgcctggggttctccagcattcaactcctttggagtttctgccattctccagggtctgattttgtttttgctcccaagacttacttctacattcacattaaaaagtcttcatttcacacaagaggggccagaaacatctctctgttgttctcttgcccttaagacccacggccacaggccactcctgtccttctagaagctggtcgcaggttgagcagggatcagaaagctgcatcaagttgacccagtcactcacatttaatattaggttggtggaaaataattgcgggttttgctacttttttttagtgacaaaaacgcaatttattttgcaccagcctattagtatttactgtcctaagctttttgtacgtggcaaacctcaggatacccctgcggatccacacggccagcaccctcatttagagatgaagagactgatgttcagagtggttcagagagtcagatgatctgccactctgccggaggccggttagacagcaggacggagtcaccctggagtgctgctctctagccagatcattcccttcgctcccggagcgtgggagaggccgcctctggctgcttttgtgcagcgtagaatgatgtcttttgtcacggtctctgggaagctggagaaggtgcacgcccttcaggacccccaccgagccccaggcctccggatttcctcttcctaagtctcccctggggtgttctgtaaagtcttttcctgctcctaagaccctcctgctaccaccccctctcccagacttctcacttttcctgctcttccagtcacccaggtctgcttcctctccctgcccatgagccagccttgcccggaacccggggtgatgactcccagtgggtgctactcagtcccttaggcccccggcagatggttctcctgcgcccatggctccagggctggggtccccggccccccaactgcctccctggccttctctgtggtcccctcccttcccactccctcactgtcgctgctcccagcccctggggcagaaccagacccttctccctccacagcaccgccaccccccaacagctcgggctgcccctccagactcgtggtgtccgtgaactacctgacggccgactgctcccagacctacaccccaggccggcgtccccgtgctccagcctcgaggggttccagccgctctctgggcatttgcaccgagacgccagggagacagcgcatctcccccagggttcctgtctcagtgaacggctccggcccagaaccctactcggctttcttacctccccttcttcctaacctacttctaaccactcgctgtggcttactcgtctcaatcccaaacggctctcaaaagaggcttctggtttgcctgcccttcgccacgggagtggggagccaccgtccctcccacagccctccagcggcctccgggcgcccaccgggcccctcacccgaggcttctcgatgggacaggctgtgctgcgctccgagaaacggacattctctggctgtcacgagggtcgttagaaaacaagtcacttccgccagcagcgcaactgcgcaggaatgtgatcccctcccggacgcggctaagaataacgtgcctcgttagcgcattgaaaacagcggcacgaaatcacacggggcgcgctgacaaccacgttggcagctcagcgtggggtcgcttttcctcccatgcaactccatgggaattcttaaacacgctttctcccagagcagcagaggcgcggggcgggcccctctggagtgagcaacatgttcttattctaattatgctggtaattagagcgcaggtctttgaacctcaaccagccacgttcccgcctccaggactcacgcaggatgagaagcgggtctgaaggtttcctgctgcccaaggctgtttgccgctgttgtgaagggactttaaaaaataaacccacctgtggatttgtgtttgttgtttgtttgtttccttgcctcgtcataaattgctggtgtccagatcactgtttggtgttctgtatatattgaagcaaacggcaaacagcctttccctctttttcattgtgatttgaattttgtggcatgcgagggctgacatttcattatttccactaaagcttggaatcggagaccagtgatctaaaggaacggtatagggagtgcatttgttttgttttctgaggtctgcatttgtctgtgcatttgaatagggcgtatgtctttggttgggcaatgaattcctccatatcaaaattttcaaatataaactgagccaaataatcaagctgatttacaaagcgatttctgcagaatgaatgatagccttaagtaattgccagaggaagtcccgcaaaccttacgtttatgacaagaatgaattggtccattttgaggagtgagggtaaataaatactccaggctctgaacaaaccagggagagacctgggtgtggaaatccaatcttttgccatcactgtcaaaaaatgtattgagagtgtcctataagcacggtgctgagccacatactttgggtgataagagatgtcaaagacctctgtgctctgtgatcccctagccagtgaaacacaagtgtacatacctgtatattgaatgtcaggatgcctgtgccaactgtggtaggtaaccaatgtatagcccagggctcacagggtgacagaggaaggggtctctttccagccccaggaagatcttgcttgtctatcttgctctacctgacttttttttttaaatgtccttattaaaaaataataattcttaagattatcccattatgtctattttctgttatatctaagctatataaaattctctagccaaatatttgaaaaaaaaaaaaagcttctaaaatgcttctttattgaaggaacaaatagaaaacccagggttggaaaaattaaccctaaaatcagaaacagttcagaactgcaatcaaccaaatgtaggttaaaggcaggatctttaagaacagtgagaacactcagcctggaccctcagcaaaaatgggagacttcttggttccagacatttaagaccttagacatttttgtctaatcattagttgaccactaagataactgagcagagacttcattggccacatatgattttaaaaattatagactttataaaatttgtttaggaaatttactaaacaaagaataacaaccagcctggaggaaggggaagaatctgatttccagagttggtgcattatattacataaaatgtccagctctcaacaaaaagctgtgggacaaggaaagagacaagaaagtgtgacccacacacaaagaaaaagatatgtgatacaaattattcccggggaagcccagacattgaactttttagacaaagcctttatttaaatcttctattgt

SEQ ID NO: 1885242 - DNA, 4001 bp, Homo sapiens
acttatgaagtttgtgagcaaaagagataagatttcatgggtcaaattattttataaggatccagatgatgaagggggcacaatgtttgttctagtcttccatttagatcagggtaagataagaaaatgataaagaaagtagtgagtaagcataaatgtatgtttgtcaaaatcatgtttactgatgattttgataaatactcaccttaaaaaacaacaaaagaaacagtgtgctatttattttctgaaggtactggaaagtcaacagtaacttggtatttctagtgttctctgggactttgaaaggacaaagaaatagttcaggtctaataagaagttgccaagaaaattcatggcttcgtaatcatgaattaataaaataaagatataaagaagacatatgtgataaaaaccaacatggttatagcaaccatgctgtaatagatcacaatagatggttggtgaagaagaggaggctgtctttgaatagaaacacttagcaaataaatgtacatgactaaaacaaaacattatgtaaaggttaagccaaatgtgactcaaactttacaaaattttaaggaaaaattaatgattttaactatatccagaatatatatcttgactagaataatctttaaaccataagataaagaacagaaatatttatgagacatgaaagtcctgtgtcaggctgggcgctgtggctcacgcctgtaatcccagcactttgggaggctgaggcaggcagatcacctgacatgaggtatttgagatcagcctggccaaacacctcactgcaggcaaaactctgtctctaccaaaaaaaaaaatacaaaaatcagccaggcgtggtggtgagcacctgtagtcccagctactaggaaggctgaggcaggagaatcacttgaacctaggaggtggaggttgcaatgagccaagattgcgccactttgcctgggtgacaaagcaagactcagagaaaaaaaagaaggaaggacagaaagtagggagagagagagggagggagggacggagggagggagggagggaggaaggaaggaaggaagtcctatgtcagtaaagagttattcaaatgaaatcagtttctgacaaatattatctaaaaacaataaaaacaaagggagaaagagaatccttacttcaaaaaatgtaacctccaaaacttaagaactcaagacaaattagaaaagtgcaggtagggaatatttttctcaacaagatcatagtgagcagtcagtaaacttttgtgaatgattataagaatcactgcaatacatcggcagaaatggaatgagaatggaaagcaaggagcaggtacatatgaaagatattgtaggggtatgggtacaattatcaaaatctgttcatcgcccaaatgtcatagcattaaagactaagaattcaacacttatgtttcaagccttgataagtagaaacagtacatatacctataaactagaatatattagaaaacctgaaggagggttactttaatttgtgctcgtgtaagttgattatcattgttgttaaatgcactgaatttgcaaagctgtagctataattaggtacattattcattttcttatgaagcctttatataacatttacggagaacatattatgtacgaagaacccatgtgtatatcagagtagagaaaatactgaagctatgagagtttaaacacttaccaaaggtcacagggttagcaagggtagaatcaaaacacctgcctatttgactctaaatcccatgttcttttctttaacctaaacatatttggaaaataaagtaaaaaataacaaaatgagagcaaaatgtctacttattcattgtttcatttctaaatcctaagcttttgtcctggcagtcatagagttaactcagtttttcaagcagttatgttttctgagccttcaaagctgtaggtggaattagattcagtcagatgtgggtttgaagctagactccctattaactaggtgtgtgaccttgagtgagtgccttaacctccctgaggttgaacaaagctgttaatgagctcacaaagctggttgcctagagtagtcctcacaaagtgcaattaggagaaggaagcaggccaattagtaatccgaaacaggaattgattcaaatacgcatcaggaatgcatagtgctgggttatatcaatcaaccgatcgatcagtctgggttaagaaaggagaagtgacagatagcttggagatatatatactaattctgacttcttttatatcttaactccgtgtcacctctttttaaagggctattcatcagagaagcaatgagcagtttgaaaaactagagcactaaactcagacgaaacaatttagtttaagattattatttgctcattgccaatattatggcttagattataaaaataagaactaaggagattagatccccagtacttattttttaggaatatactgttgacctttactgccagtctttgactgtatctctgaaccctaattatctacctgtgaaatgaaagttaaggaataaataatatgatatgtttttgatatgaaagttctcgaattctattgcttgaattttaacaaaagtaacagagaaagaaaagaaagctacaaaaaattaaagctatgtacatattaaatataaactgtgattgaaaagaaaatgtcccacattaagaaaatgtttttcagttaatgcatcctgcaatcaatcatactattggatttaaagggtgattacatataatatacacataagtatataaaatatatgtatataaatatacgtaagtatataaaataatattaattgggtaaatataagaatatttgagtaaaatgtaaatataagaatatttgagtaaaatgtaaatttgtagtagaaatggaaggagtaaaagcaactattgaatcctaccaaataaaaaaaataatggaggattgccgtgttataatttaaattaaaaaaatctaaatattacatgtaaaataataatatacatgcatatgacctatcacatttaattgaaaaggagaaagcttttgtccattaaaagaaggaaaaacagtaggtcaaagatgtaaaattttagctaagtatttagtgaaatttcaatgggacattttatggtactaaaaaattgtcagtttcctcatttttatgagataactataagaattaaaaaaaacaagtgtactgtctttcacctcattgtttttatcatttcatgaatcacagaatgcccaaacagtaggtcaaagatgtaaaattttagctaagtatttagtgaaatttcaatgggacattttatggtactaaaaaattgtcagtttcctcatttttatgagataactataagaattaaaaaaaacaagtgtactgtctttcacctcattgtttttatcatttcatgaatcacagaatgcccaaacactgtagaggcttatattctacgatcgtaagatattgacaatgaactaccttgccgcctggtctgattccattattcaatgtctttttatttgctatacatgggatttttctatcatccttatttaattcatccagagagggctgttaaaagtgctgtgcttgttgttcttgcatccaaccagcacggttggccatgaaacatggtttgaaattgaatttcattaatagctcagcagcctattagtatcccttctgtatgaatgcatgtcagattcatagagaacaagcagggacctgtcttagtttgatctcacagacatcatcccttctaaaataaggtaaaatgcttaatcaaaccacaggccttgatgcctcctcatttctgaagacccataccccaggcatatgggtttgtctcatttttagatacacataataaaatggtcattctgaaagttcattcatgtgggcctgatacaactgctgacacagtgggcttgtattcttttagaacatggggcacagtgggtgtttgcaacagg

SEQ ID NO: 1885243 - DNA, 4001 bp, Homo sapiens
aaatacctatgattattcagttctggaatatatagaaagaggtagacaaaatagatttgaaagacaaccaaactcactgaaatagtagaattaataaaaagaaccacatatacttctataaatgaaaaaacataatctctgaaattaagaattcaatggatgagtttaatggcaaattgtatgcagtacaaggtaggattaatgaaatgaaatagattgatggaaaatattcagacagaagcatagacaggaaatagaatttaaaaaacagatcattgcatattataatttaatttcttcctgagaactcaataatagaaagaactcacatgcttcaggcattttttatgttacctgccttacattgtttgataacatttgagctcattgtaaaatatcagatagattatatagaaggatgttgctggatagaatttaagaataaaattagagcaggagtcctcaagtgctacatggccttgcagttaatcagtgttttattctgtctttttcagagctttctggaggaaaatgtcaatgtcttgcatgatccaagagggtacacaaagacactagggtgggtttggaggagaagtacagcaacagtaaggcaatttcctctgttaatctcctccctcatgagggcagctccaatcttgtggctcataacattggctgttaaccgcaaaatgttaaaagaacaaaaacttggcccatattgaaaggaaatcctgtcaaaatttccgtcaacccttatgatctcattgaggaagtactaggaggcagctcccacatcccttttcattgcttcctttgcctcaccagaaaagaaagagtaaaaagattcatgggtgagaattatgttaagaatggagggtacaaaattttgatgggtcaaagatctttctagaaaaactataataaaagcagaggaatgttagaattttatgagtaacctagtggatcaaaatagaaatgagcaactgaaaacactaaacataaagctatgaagggggagaagatggggaacttatgatgtaaggatcagaataatatgtcctgaaaatcctgctcaattgctaagcataggacagtcagacacaagcaccttcctaggtgaattagtgttcctataaaaagaaaagaaagaagaaatgaaggagggaggggtgagaaggaggaagaaaggaatgaaagaaaacagggaaggaagggaagggaaagaaagggaagggaaacgaagggaagggaaagggggaaggaaataacaacaaataatctgtatctaatctaacctatagctttaccttccaaattactgcaaatatgcaggttggaggaatgtgataaataacaaaatggaattaaaacagtcggacctgcaatgtgaaaaattctataggacaaatgacttgacttgatttcttcagcaaataaacggcaattaattaagaaaaggggagctcctttagattaaaataaattgaagagtcatatcaaccaaatgcaatgcatggagcttcctttgatcctgatttgaaaaaaaaaactgtataaacatactttggggggaaacaggggtaatgaaacatggattagtattagatgatattgagaaatcagttattattttgttttggttttgtatgttttgaaagaaatctgtgttgaagcatctgtaggtaaaactgtatgttgtctagaatttgcttttaaatattctagcaacaaagatgtgggaagagagagataaaacctgaagggtgggatgttggctattgatgaaattaagacatgggttacatgaggccatttggctcctttttaaattttgtgactgtttgaaaatgtccacaataaagagttacaaataacgcaagggattaccatgtctcagaagtttggaacaggtttttctggcttccccatatgcaggtgcagtgagcctgacttgcgctttcggttctcacacagcgagtagacctgagtagctgtgccctggcggacacagtcagagctctgctcttttgttctcattctgtcttcctctgcctaggcctggttgtatgcagcaaggtcacacagttcccattctagcctgggaaatatcatcaatccctttttttggcctcagttcaaaactgcctccttcagcacaaataacccagaactcttaactttgtaaaataaaactcatcctttgaattaaatttagcttggatctctgtgattctgttctatcggaagaaccctagagggcagactgtcatctgcacccaacccacagctgtgggaagcagattaggtaacagaacgacataaaagcttaatcaaggggaggcatttttcggataatggaaaattatgcatgcttccaagctgaggtcaattatccagggtaataaaaatattaaaaacgtgagaaagtgagattaagtgttggagcaaggtccctaagagagcaaaataaagaccagagataaagtgcaagaattcctgccagaaggatgatttgtttttctgtacattggtaggaagaaggtaaaaaataaaagaagctacacagatgagttgagaaagacatgaaggatgttgaagtggcttttctctggtgggtaaactcttttttttttttttttttttgagacggagtctcgctctgtcgctcagcctggagtgcagtggcgccatctcggctcactgcaagctccgcctccccggtttacgccattctcctgcctcagtctcctgagtagctgggactaccagcgcccgccaccacgcccggctaattttttgtaattttttgagacagggtttcaccatgttagccaggatggtctccatctccagacctcgtgatccgcccgcctcggcctcccaaagtgttgagattacaggcgtgagccactgcaccctgccaactctttggaataagaaggaataaagatgaggagagaaagaaaaggggtttgtgcccaaggctagaataacgacagcagtggaatacaggcaagtctgtctgcactttagtgatagcccaggggctgggctaggcatcggggaaaagaaaaagagctagcagttccaggtggacctctgaatacttctcgatgctgtacagccagggcagatgagcaaattggggtcctctagtgaaatagcttattccacatgttatagaaaggctcagaagaagatggctcagaaggtagggattgcaaaaagcaccattgtccagaaaacttcatgttcagatccatcggcttgctcttccttctctcaacttgctctgaagaggttcctgatgaatatcctcacttaagtctaagtcagatgtcatgtcctagaagaactggaacatcaggaagaatttctatggtacccttccctctgtgtaagtcaactatttctgccttattctataatattattgattcttaacttatttttgttcctaaccatagagcaaataagtttcatgtaaatataatagtgataaaactgcattttcacagaaaaatatgaccaaacagcctattacataattataaataagtttattaactgtaccaacatgtttatgagggttttaaatatccagaccatgtgttttctcaaatatttatacttaccgataattaagcacacatacaattcaaaaatatctttagctatcacatagacatatgttcattgtagtcataaaagaacaaggagtctaaagagaattagcgtttcctggaatattttcccacaaaaatcaaaacagtgttagatatgattgaacacccaatacatacatgacatctgaaagtgacttctgtcctagaaagtttcccttccttccccaggacatgttaataatgatgaatacaatttgataattttcatacattcaataaaaactttttaacaacaataaagacataatactccaaatatattgcaggtactaatttcaactatttgcatggacgtccttggattatttcaagggt

SEQ ID NO: 1885244 - DNA, 4001 bp, Homo sapiens
tcctaaatatatatgcaccaaacaccagagcacctagatccataaaacaaatactattagacctaagaaaacagattgatagcaatccagtaatagtggggtgtaatcaatatttgggtgatgggtatactagaagcccaatccccagcatgatgtacgtaatacccatgtaacaaataaatacatgtaccccgctgaatttaaaatacaatttaaaaaaataaaaacaagtgtttgtatcttacctcaaaagtcatttggctcttgcatctgtagaaactaggaaaatccagtccgttgtttttttccttatttctaggaagaaagatttatcctgtatagtatttctcaagaaaaataacctaataaacagacaagaaataacaatactctgtctccaaaattcctcactctgaaattaactaatgatgcccaaagattagaaatagacactgtacatacattatgtatacatatttatacatattttacacacaaaaaagtgcaagtttaaaaatttcccaatcttgcatgttagttgattcatacagatttttcaatattttttctttaagtgacattagtccattaccatattagaacattttaaaaaataatcatattttctccttgaagatctgtgaccatgaaaattatggaccttatcagtttaaatggttctttaacgaattagcgattcaaaagaagattgcctaggaagaaataaataccgttgttgatcattatttgattttcagttataaactagaaagggacacttttaatgatgcggatgcttccaaatatttctgtgtgataaattgtttgcaatttcctcagcatttcaaaagtgagtgtcttcagattagagtttctaaataaatcccagttctaagggaaaaaaaaacccaaatgtctcaattttctaattttggtccatatctgttggataatgtaaagggaagtgcgcctgctgccatgtggctataagtttttatagcatattagagagtcaagcagtttggtgtgccaagctcacacaacctcatggcaataactccgcaagtatgatcacaaaggcaagggtgtgcttagtatcagtgaggcgagccataaataacccaatgccaatcctttgaacactgatgccaatgctttaattttgaacagtaaaatccacctgcatatctactagacatatcttccagtctggaaccctgattctttctcctcctcagaaggaaatcacatttcttctgtgagtcactgacccatgttgctaaagtaaaacataagaaaagctgttcctgcttcctgcacagaatccctgttggacacctcataacccaagtgattgtgtctatggaaacaggagtaaaatccagtggaatgctctttcctatttcaaggaaaatgtgttttcttgggtagtattttccaagataagtaagttgaaaacaaacaaataacaatcagccctcatcccattctttattctgaaactgatgataccaataaatgtaagaaatagttactatttaatatacataatcaagtgtattcataggtgaatatgtgctgctacataatccatcacctgctttacttactcgccaggacaacatctatcaaattggcataatttttttttttcctgagaaaatgacaaaacattaagccgtgttgcttttaaagtacttactcatgtaagtaacccctattaaacagtattttattctgcagctctatattatatgggaactaaataaaatattttggtttgctgttgctgtataacaaaccacttcaaatgttggtgaactaaaacagcaacttttccccaataattctgtaggtcagctgggcagttctgatatgagccagcttggtaagaccggatcgtttaagagggccccactcatgtgtctgtggccttagctggttcagcagacttggcatgccttgcttacctggtctgtcatactccaggaggccagcctgggccaattcacatggtgacaaaagaattcccagcagcaaagaaagtgagctccaaggtgcaaacactggccacactttgcttgaactgcatttgtttaggcctcactaaccatagtaagtcacatggccacgcctagattccaattgcagagaagtaggctccatcccttgattggagtgaatgaaaaatactgtgggtggttttttgtatttgtttggtttttaaaaatctatcacagagaaatgctggaagaaaaacaaacagctgagaggctacacttcaacttttccttaactatttatttaggcttttctgagactagaactttgtgttggggtggagagatgaggggaatctccaggttgcagctataaacagagattcctgagagtctgaaatccaataaagaacagagtgttggcttctgaattagagcttcaaattgctgcagttgagaagaaatgtctctgccccacacaatgtcaccatgtggaaattatatcttccaagacatgaagttacctattggaggaaacatcaagccaagcttccagtggattcctgttggggtgatcagacccaacaccaggtcatgggggcaatgaagtccggtggagtcaaaggattgagaaaaagacagtttgagaagtgggaccaggaggccatcatgattttggaggctgcaagggccctgagctctgagagcccacactatttattggtaatccaacagagaaacaggtggtgagaatgtaggggtcaaaaatggcagctgcatgatctacagctgtgatggtttagcatttatatggaacatgttctgctacttgagataatgggaatacaatcaatctaggagcctaggagggctagaagcaaggagccagcaagtctagacatattccaggggacattgtgcaagccctgcctcagctttcttcccaacactcagctttttcccaacatgccccccttctcttttttgtaaaagagaaggtatcattattactagctatcattattactagcataaaaggtggcctcttttaattgagcaaggcgattgtaggccgtgcggcccttaattgccggttggtgatccagcttcatttttcttagcccttattcaaactggagtcactctggtttgaatgcttcccacatatttcccttttcccttttacaagaggacccttaatcctaggggttgcagaaggatgaaggtccgtcttctgtaacttcttcatgctgaatagggtctcttgtctcttgtattcaggatagagaggagctgagtcagaaagcattggtccatcaagcatcgtgactctggtcggtccttgttccgtcttcgcattcagattcaactggcttatggcttataatgggggaatctggtccatggttgggatccacgggtccctccagtctcccattccatggtcatacacatcttgagggcatccacacggttcgttcatctcctgcaaaaacacaaacataccctcaccctcaccttagtaaacctactgaaacagaagcaaaaacttttgtggctgtagccgggaggcatgccgttgctgaagcatttgtaactcagcttctgccttgtttaattaccagggggtaaaacttactgttgattaacgagaagcaggccccttctaacaggaggcacagagaaaacaaatcgaggcttaaaagcaatccttaaaccttcaatttgcactgttcaggtgggtccactagatgctgtggttcatgacagatcttcagatgtttggtgggcacccacataggtgcctgattgtcacgtggagagacacaagcaaatcctcttccctgtaaaattatctttaggcagggattggaggaagtagattcagaggtaaggagaatttgggggtctaatggcttcctgatgtttgataggtgttccctcggaagttaggaattccctttctctccatattgctgcgtgggcatggaggactaggta

SEQ ID NO: 1885245 - DNA, 4001 bp, Homo sapiens
ttggtatttattagtattttttattttttttgagacagggttccactctgttgttgaggctggctagagtgcagtgatgtgatctcagctcactgcaacctccgcctcccaggttcaatggattctcccacctcagcctccggagtggctggcactccaggcatgtgccattatgcctggctaatttttgtattttttggtagagacagggtttcactgtgttggccaggcttgtctcaaactcctgaccttaagtgatccgctcaccttggcctcccaaagtgttgggattacaggcatgagtcaccgtgcctgaccttgatttgtatttttttccactgtggttcaaaagtatggttggtatgattttgatttctttaaatttattgagacttgcttcaaggccaagtatgtggtcaatcttacagtatgttttgtgtgcagatgagaagaatgtatattatgtggtggatgggtagagtgttctgtagatatctattaggtccatttggtcaagtatccaatttaagtccagaatccctttgttagttttctgcctcggtaatctaacactgtcagtggggtattgaaatccccaactattattgtgtgaatgtctacatctttttgtagttgtagaagtatttgttttgtgtatctggttgcttcaatgttgggtgcttatatatttaggatagttaggtcatcttgtaggattgaaccctttatcattatgtagtgtcgttctttgttctttttttactgttgttggtttaaagtctattctatctgacataagaataactaccctcgctcctttatgttccatttgtatgatagatcttcatccaacctttaccttgagtctatggatgtcattacatgtgacatggacctcttaaaaattggagatggatgggtctttttattttttaatgtaacttgccaccctatgccttttaaatgaggcatttagactgtttacattcagggttaatattgatacttgaagttttgatcctatcatgaagttttttgttggatgttttgcagtctgtattgtgcagttgctttaaatggtctgtgggctgtgtacttaggtgtggtttcctggtaacaggtattgtttttcatctccgtattcataactcttctaaggatctcttgtgaggctggtttagtggtaatgaattctcttagcaatgccttggctgaaaaagattgtatttctccttcatgtatgaagcttagtatgacagggtgtgaaattcttggtcagagttccttttctttgagatgctgaaaataggcccctactctcttctagcgtgtagggtttctgcagagtagtttttcttagcctgttggggttccctttttttgtgatctgacctttttctctagctgcatttaagatttttttctttagcattgacattctggtgactatatcccttggtgatgtttgttttgtatagtatcagtaaggtggtctctgaatttcttgtatgtgcatgtctaactctctatcaagattagggcaattttcttgaattttgtcctcaaatataatgtttactaggttgtttactatctcttcttatctcccaggcatactaataattcataggcttgattgcttttcaaatcccatatttctcagaggctttattcatctattctaattcttttttctttatttttatctgactggtttagtttgaaagactgatcttcaagctctgaaattctttcttctgcctggtctatgctactaaaaaatatgctttcaattctgttttgaaatcccttcagtttttcagttccagtggctttgattgattttgttttaaaatgttttcctctatccttatttcctggattgctttagaagtttttttctgtttgtgtgttgatttgcaatcttaccttgaattgcactgaacttgcctgcaatccatgctctgaattctccatctgcatctctgtgcctccttttctgctagggaccattgctagagagctactgtgagcctctggtgatgtcacaatattcagacagaattctcacactggttccttctcatctggagatggctgtagtgggcaggctgttttggctctgcttctacagacctatgcagcaggttttgtattgggttcaacctacaggccaatagatgacatttgcaggtaagagccagctacttactgcacaacagggagggtatggccctgatctgtttactgtgacgtgttctttgctgtttcaggtgaagagctggatagtggggttcctggtgttccgtggaagaggccggacacaattgggcagagctggagcctctggcttgcccatgtgtatcccaatggcaagcacaggcaccagccctgaaaagggtggctgggagatgctcttagggacatgccccagagatctctgtgtggggcagagtgaggaggcttcactggctcccgcatggtagacagacatgaacagaatctatttccctatcacacccattgcaggtacttcagatgcacactgtagtctatctccagaccacagtgtggttgattgaaagcctcaggaaaccttgttttccagaagaaaataaacttgatgttttctttgggcctatcattatcatcactatgattatcatgtacagtttgcttgaatttaccacaaaattcaatgcttgcttaatattaaaaaatgagacggttgttctccaagattgtgtacattattatttaaccatcttcttctaaataaaggacgatgaaaaacttaagatttactctagttttcctctgccagttcaatgacatactgcttgagaaatggaaaaactggagtttcaactccctatttagtatggcagctattctgttcctggcacggccatttgtgttgtgttgtgagcccattaaaagtgattctatgttttttccatagatgtcgtctttggtagttggcattcttcccagaggaagataatgggaatcagacatgcttctgattgtcccaccagccagctgccggtttcagcccaagccattctgaattggaggatgatggtctagctttacttctcaaataggctactccttcccacatggtcaggtcagctttttaattagttaatttttttcctccagccccaccagtactatatttagcagaaatatactactttgtagtaaacactactctcttccagattgatttaactctgacaaaataaacaaagtcttaggccaagtgtggtgacttactcttgtaatcttagcactttgggagatcagaaagatcacttgggcccaggaatttgagatcagcctggactgtgagaccctgtctctacaaaaaaaaaaaaaaaattagccaggtgtggtgacacatgcctgtagtcccggctaatcaggaggctgaggcaggaagatcgcttttgcctgggaggtcaaggctgccctgagccgtgagctgtgatcaagctactgtactccagcctggaaaacagagcaagattttatctatactaaaaaaattaaacaaattaaaagtctttctattcttgttgttctggtgactatttcaataaaagtctaggagaggaggaatttaaaatgggcattcgagtcacatctgttcattcagcagataattttgagtactgcctctgttccaggcactatcataggcattgagtggtggacagagaatgatcatcctcacttgcggggagaggattcagcctcttgagatcttacttggaaattatcccatctattcattttgaattacatcttatcttgaattatgagtatttaatgtagctggctcaattttgaaacaaagtgatttataaataaataagatgaaatattaactatatatacataaaagagatttcacttgaggtccatcattcaagcacaataaaccatcactaaatattcttgaacactggctccattgggtaacagtctcttta

SEQ ID NO: 1885246 - DNA, 4001 bp, Homo sapiens
cacctggccgatttccttctttttaaaggctctataatattccactgtatggatgcaccacattttgtgtaataattcattcactgatggacacttgtgctgcttccaccttttggctgttgtgaatgatgctgctatgaacaggaatctgaagatttgggttcagagcatagaggtggcatgtgagttttatgaggcaaatctctcagccctgagtttttcaactgtaaaatgagatgtcaatatttactatctttcaggtttgtggcaaatataaaacgagatcatgtgcataaaagtatttgtaaactgaaaaatctcacctcatgtaaaactgttatgatttttgtgaccagccattacgaccaatggaacatatgatttgtgttggttaattcatggtagaagcagatgtggagaagttctctgcaataaaagcgaatggccagttatatcaggttaatacctgaaaagttgttttctgtattctgtaggcatttaaggaaattttttatttgcacattaaaaaaaacacatttattcagggtcacaatcagactattacatttagcaatcaatagcatgcgtgccaaaaaaaaaaaatctacattaaaaccctttgttggaatgctttacactttccacagaacagaaactaaaataacctgttatacaattagtcacaaatacagtcctcaggatttttgcccatacacatgagtatttgtctaaaacatgtcttctttgtagcagctagaccctgccaccgctgtgcttggctgagttcacaaatctgttgtaacctgtagcttccctgacacttctcttgctctcctctcctgctaagctttgtttcctaattaaaatattctgccacagccatagctaactgctgctactggaaccgccatagccacctgaagagtacaatttttcttggtttcatggtttggcaaagtattggcctccatcaccataggggccagagcttctgcctccaaagtttcctcccttcatgggtccaaaatttgaagactgattgttgtaattgccaaaatcattgtagcttccaccacctccaaaattgcttccatcattaccaaatccattatagccatccccactgccaccatatccaccaccaccatggctgccaccaaagccaccacaaccactgaagtttcctccacaaccaaagttgtcattcccatgacaccaccatgatcaccaccaaagtttccagaaccacttcgacctttttggctggatgaagcactcgccatcttttgctttgacaaggcttcctaacttcacagttgtggacattcacgttatggtatttctgaatgacaatcttatccacggagtcatagtcatcaaaggttataaaagcaaagccccttttcttgccactgcctcggtcagtcgtgatttcgatcacttccattttcccatactgttccaaataaccaataatctctgaggggatgttcctcagtgtcttctttaatgccaccaacaaatatctttttcttttctttcttttttcttttgttttttgagacagcatcttactctgtcttccaggctggagtgcagtggtgtgatctcggctcactgcaagctctgcttcccgggttcacaccactctgctgcctcagcctcccaagtagctgggactacaggcgcccgacaccacacccagctaattttttgtattttttttagtagagacagggtttcactgtgttggccagaatggtcttgatctcctgacctcgtgatccacccgcctcagcctcacaaagtgctgggattacaggcatgagccactgcgcctggcgaacaaatatctttttcacagttaagtgggcacctggtctttgagaatcttctcttgagacagctctctttggttccacaactcttccatccaccttgtgtggccttgcattcgtggctgcgtccacctcctccacagtggcatagatgacaaacccaaagcccctggcgtgcttggtgtttggatctctcattacctcacagtccaggagcgttcctcattgctcagaatggctcctcaggctctcatcggttgtttcaaagctcaaccctccaaagaggagcttcctcagctgttcaggctctttaggagactctgacttagacatgaaggcagggagaaaagaggctttcatgatgcttctttggtggtatccacgggcagaaagataaaatttttttggtggggggcagagtttcgctcttatttcctagtctggagtgcaatggcgtgatctcggctcactgcaacctccgcctcctgggttcaagcaattctcctgcctcagcctcccaagtagctggaattacaggcgcgtgccaccatacctggctattttttttgttgttgtttgtatttttagtagagatggagtttcaccatgttggtcaggctggtttccaactcctgacctcgtcgtctgcctgcctcagtctcccaaagtgctgggattacaggcgtgagccatcgcacccggccagaatcttttctattgtggtaaaaaaaaaaaaaaaaaaaccataaaatttaccatcttaaccttgtttgtttgtttgtttggtttgtttgtttgtttggtttggtttggtttgagatggagtctcgctctgttgcccaggctggagtgcagtggcgcgatctcggctcactgcaaactccgcctcccaggttcacaccattctcctgcctcagcctcccgagtagctgggactacaggcgcccgccaccacacccggctaattttttgtattttttagtagagcgggatttcaccgtgttagccaggatggtctcaatctcctgacctcctgatccgcccacctcggcctcccaaagtgctgggattacaggtgtgagccactgtgcccagcctattttttatatttttagtagagatgtggtttcaccgtgtcagccaggatggtcttgatctcctgacctcatgatccacccacctcggcctcccaaagtgctgggattacaggcgtgagccactgcgcctggcccatcttaaccatttttaagtgcacagttcagtagggttaggtatatttacattgttgtgcaaccaatctccagaactttttcatcttgcaaaactgaaaccgaacccgttaaacaactcctcttccccgccctttccccagcccctggtaaccagtcttattggttagtttgctttgaatgaagactgtctactttctgtctctacattttgtctttttgattttgactaacttaagaacctcatataagtggaatcatgtagtatttgtgtttttgtgagtggcttgtttcacttagcataatgtccttcagtttcgtctatgtgtagcatgagacaggatttctttttttaagtattccattgcatgtatataccatattttgtttgtccatttgtctgtcaatggaaatttgggttgttttcgcttcttggctgttatgaatagtgctgctataaacatgggtatgcaaatgtctcttcaagagtatcatggaatcttataacaaaaaaccttgagagctggaatagctttagagtcacagtgatttggtcctactctgtccttttacagaggagcacactgaggtgggaccagttatgtgacttacccatggtaaaatgatttggtggtaatagtcactaacactttttaaaatttttttttttgagacagagtctcgcactgtcacctgggctggagtgcagtggcgtgatctcagcccactgcaacctctgcctcccaggttcaagtgattctccctgcctcagcctcccaagtagctgggattacaggtgcctgccaccaagcctggctaattttttttgtatttttagtagagatggggtttcaccatgttggccaggctggtcttgaactcctgacctcatgatccgcccgcctcggcctcctaaagtgctgggattacaggc

SEQ ID NO: 1885247 - DNA, 4001 bp, Homo sapiens
ggggaaagaaggctcaagaggcttggagcaagtggcagcccctctcctgtttcacagcacagctgcccccagcatttctgccctccccagaccccacactccaattcctcatttccttctttccaaaatacaacccaaatttggtgagtatgtttatcacaccagaactcttgctcctgtcctctggatggtattctgctaactttcccatcccttttctgtcttctccatcctttggatgggtcccttcacctcttctgctaagaaatattccctggatctccccacctcgccttccgcacccctactctctccaccttccttgtctccaatcctaacctttaacaatctctccacaaccctatcatcttctcttcaagttattgtcctatattctccctccccttcctagttcctcacccctcaatcacacttgcgttgagtaaaactccttcactagtttgctaaatgagcctcaaaactaggaatgaagcatattttttgtggaagttataattacccggcaggtaccagaacttccccagggctaagtaggaaaggctctcgcaccattttgtttccagaaagagcacgaacaagaaggtccaaaacaggataacactctttcttaatggtcttggggctaaaaagcctcttgagaatctggtggaagctaaggaaactctcctccaacacagaacatttcagagggcacttggatgccctggggtgtagccatgggcttcacattaagcgtgtgctcgctcaggagcaaatgccagtggaggacacacgagcctgaaggattccacggcccagaaaacctactcaggagaaagcagcaggcactggaagattaagccagtccagtgagctcttgtttgtatgcatcatcaggatgccatgatagacaaggcttgttggaaagccaaatgttttacaaataaaagctgttttcttctccaggtgaatttacctaagagaggcttgcaagtgctgtcctcagtgcccttgcctgggtgtaaaatagcagagaccgaatccaggactgggtgtgaaaactgctgattggtcgcaaagcctgaaacaaatactgccttagaagtgagcggtactgtgattcttctgttaaaatgcccgttcatgctttacctatattctgtgcaaaactaaaaaaaaaaaaattatactggagaagtactttttgaagcagaacagaagcagataccaacaaataaatatttgatgcataattagttccctgccatattttgtacctgggtagtaaatcaatcttacatgaacattttttgctttatatggctttggccatttgaatgtaaattttacttccagagggaagcatttttaattgccctggttgctgtttttgtttttatttttatttattcccggaaaaaaaggcacatcaattaaattatgagtttgattaattggaacccaattttagaagccgcgtcttattgaatatacagaagacctttaagaaacagggatttttgagcttgtcctggtcctacatttcattaagagtctgcctagatagtgtgagctaattagcccggggtgagaaagcctcatccccaccaaacaacttctggtggagggggttcccttagctcaggaaactggttagagatgaaggcagtaaaacgaaacgaagggttcacagaggagttaagaaaataaggagtggaacaaccagcccaataaagaagtcatcggtcaaaggggttaagaacgaaacacagaaaggacagaaagaaaaagagactaggctcatggcaatatgcgagcactggaggttctaataaaatgtgagtgtggggtgccagctaattcaaatgtaaggctaaaggtggcttagaagtaaagtattaggataaggaaacacattaaatgaagaaaaggcagcatacatacatgtgttcatagcagtgtaattacttcatgtaggagcctggaaatattcgtatcactgggaaagggcgtggtaaacagggtagaaccttcacagaccattgtgaggtcagcaggaacgtgaagagcgtgaggtcagtgtatagaaaataagcacgaccgtttatactacaactacagccacaccccagaaaagcaggggtccgtgacccccacagccggtcgccacatcgagccctgggcataagggagagttctatttggatgcggtccaggagcgcgcgtaatcctgtcaaggttggaagacgatgcaagtgtttcccatggcaggacggtgactctcttcaaacacgaacactgatctgaattacaaaatgtcctaaaaggcaggtcatacctgttctggtgctgttctctctcagctcccaacacgccctcctgtgctttgccgcatcacactgcgctggagcctcgcagctctgttcccctgcaccctagccaatcccaccccacccctgtaagtgctgccaagagtggcacccagaggggctgaagctgcgctcctcgtccaggcttgctgccctgccaccctactctggcagagctgtctgtccccttttcagtttcctcccccactcccctacaccagccctccgcagcctccggaggccccaccagcaaccggcagcctcctctcccaggctgtccccgtggactggccagcaccccctgggctccagcagcctggcagtccctccctgtcgagcctgggctccaggtccacagggcctgcccccgttctcagttctgatggtcacgtttccctcctgccagccctgtaggcagtggcctcctgcgggtcaccccatggaagctcagagcccccttcacctgtggcctccagtgggttctattgaacaaccggtccctcaggtgcaatcctacctggcagacaaccatgccgcttcccaggggaccccagccagcatgggcattgaggaggggacagcgcacggaagccaggcaagggctgggttagatacaaagagctgaggacggtgtttagtgaaacgaggagtcagtgttatatggaacagggtaatcagtttgccagaaaaagtattaggcaaggaagagaaaaggagagaaaggagtagaattgctcacagagatggcgtgaggaccaggagctgtgcagagtgctaacagtctatgcagtcacgattgtgctagttgatcagctagcagtctacgcaatcacaactacactaattgatcagctaacagtctatccggtcatgactgccctaattgatcagctagcagtctatgcaatcaggactgttccaattgatcagctaacagtctatccagtcacgactgctccagttgatcagctaacagtctgtccggtcacaactgtgctaattgatcagctagcagtctttgcaatcacgactggtctaaatgatcagctaacagtctatccagtcacaactgcactaattgatcagcaaacagtctatccagtcacgactgtgctaattgatcagctaacagtctatgcagtcatggatgctctaattgaccagctagcagtctatccaatcatgactgtactaattgatcagctagcagtctatccagtcacaactgctccaattgatcagaatgccatgaagcacagagcaagagactcaaaccatgctgaggaatcagatgcacaattaaaaacctcccttccttctcttctccccagaaagaatggctgctaagatttttttctttatccttccataccctttttctgcatgcatacagggttaaaggactctcttcctgccttgagttatatgaataaaaacaagtgctcagggaccccacattctaaaataaggtgctgaggtgcccccatgagaagggtctgccagccttccctccttccccacctccaggcgacatgggggctgggacagtcaggggagcaaggtcggcagggcaggtgcgctgtggctctctcccttctcaccaggagggggtgcttcactccgccaagccaa

SEQ ID NO: 1885248 - DNA, 4001 bp, Homo sapiens
tcggactcagcctgcctgcacccaggtgaaataaacagccatgttgctcacacaaagcctgtttggtggtctcttcacacggacgcgcatgaagtttggtgccatgactcggatcgggggacctcccttgggagatcaatcccctgtcctcctgctctttgctccgtgagaaacatccacctacgacctcaggtcctcagaccgaccggcccaagaaacatctcaccaatttcgaatccggtaagtggcctctttttactctcttctccaatctccctcactatccctcaacctctttctcctttcaatcttggcgccacacttcaatctctcccttctcttaatttcaattcctttcattttctggtagagacaaaagagacatgttttatccatgaacccaaaactccagcgccggtcacgggctgggaaggcagccttccccttggtgtttaatcattgcagggacacctctctgattatacactcacgtttcaagggtgtcagaccacgcagggacgcctgccttggtccttcacccttagcggcaagtcccgctttcctggggcaggggcaagtatccctcaaccccttctccttcacccttagtggcaagtcccgctttcctggagcaggggcaagtacccctcaatcccttctccttcacccttagtggcaagtcccgctttcctagggggcaagaagcccccagttgcttatttccacaccccaacctcttatctctgtgccccaatcccttatttccgcaccctgacctcttatctctgtgcccccatcccttatttccgtgccccaaccccttctctgcttttctggagggcaagaaccccccaacccttctccgtgtctcttttctctgggcttgcctccttcactatgggtaagcttccaccctccattcctccttctcctcccttagcctgtgttctcaaaaacttaaaacctcttcaactcacacctgacctaaaacctaaatgacttattttcttctgcaatgccgtttgaccccaatacaaactcgacagtagttccaaatagccagaaaatggcactttgaatttttccatcctgcaaaatctaaataattcttgtcgtaaaataggcaaacggtctgaggtgcctgacgtccaggcattcttttacacatcagtcccttcctagtctctgtgaccagtgcaactcgtcccaaatcttccttctttccctcccgcctgtcccctcagtaccaaccccaagcgtcgctgagtctttctaatcttccttttctacagacccatctgacctctcccttcctccccaggctgctcctggccaggccgagctaggtcccaattcttcctcagcctctgctcctccaccctataatctttttatcacctcccctcctcacacctggtcgggcttacagtttcgttcggtgactagccctcccccacctgcccagcaatttactcttaaaaaggtggctggagctaaaggcatagtcaaggttaatgctcctttttctttaccccaaatcagatagcgtttaggctctttttcatcaaatataaaaatccagcccagttcatggcttgtttggcagcaaccctgagacgctttacagccctagaccctaaaaggtcaaaaggccgtcttatgctcaatatacattttattacccaatctgctcccgatattaaataaaactccaaaaattaaattctggccctcaaaccccacaacaggatttaattaacctcaccttcaaggtgtaccataatagaaaaaagttgcaattccttgcctccactgtgagacaaaccccagccacgtctccagcacacaagaacttccaaacgcctgaaccgcagcggccaggcgttcctccagaacctcctcccacaggagcttgctacacgtgccagaaatctggccactgggccaaggaatgcccgcagcctgggattcctcctaagccgcgtcccatctgtgtgggaccccactgaaaatcggactgttcaactcacctggcagccactcccagagcccctggaactctggcccaagcctctctgactgactccttcccagatcttctcggcttagcggctgaagactgacactgccggatcacctcggaagccccctagacagtcactgacgccgagcttcaggtaactctcacagtggaaggtaagcccgtccccttcttaatcaatacggaggctactcactccacattaccctcttttcaagggcctgtttcccttgcctccataactgttgtgggtattgacggccaggcaaacctcttaaaactccccaactctggtgccaacttagacaatactcttttaagcactcctttttagtcatccccacctgcccagttcccttattaggccgagacactttaactaaattatctgcttccctgactattcctggactacagctatatctcattgccgcccttcttcccaattcaaagcctcctttgcgtcctcctcttctatccccccaccttaacccacaagtataagatacctctactccctccttggcgaccgatcatgcaccccttaccatctcattaaaacctaatcacccttaccccactcaacgccaatatcccatcccgcagcacgctttaaaaagattaaagcctgttatcactcgcctgctacagcatggccttttaaagcctataaactctccttacaattcccccattttacctgtcctaaaaccagacaagccttacaagttagttcaggatctgcaccttatcaaccaaattgttttgcctatccaccccgtggtgccaaacccgtatactctcctgtcctcaatacctgcctctacaacccattattctgttctagatctcaaacatgctttctttactattcctttgcacccttaatcccagcctctctttgctttcacttggactgaccctgacacccatcaagctcagcaaattacctaggctgtactgccgcaaagcttctcagacagcccccattacttcaatcaagcccaaatttcttcctcatctgttacctatctcggcataattctcataaaaacacacgtgctctccctgccaatcgcgtccgactgatctctcaaacccaagcaccttctataaaacaacaactcctttccttcctaggcgtggttagcgcggtcagaattcttacacaagagccaggaccacaccctgtagcctttctgtccaaacaacttgaccttactgttttagcctagccctcatgtctgcgtgcagcggctgccgctgctttaatacttatagaggccctcaaaataagtagaggcctttcatacagggtctgagaaggccaccgcagtcatttcttcccttctgtcagacataattcctcagtctagccttcccacctcaatacagtctgataacagacgagcctttattagtcaaatcagccaagcagtttttcaggctcttagtattcagtgaaacctttatatcccttatagtcctccatcttcaagaaaacacacctcaccaagctcagccaccaacttaaaaaggactggacaatacttttaccactttcccttctcagaattcaggcctgtcctcagaatgctacagggtacagcccatttaaggtcctgtatagatgctcctttttattaggccccagtctcattccagacaccagaccaacttagactgtgcctcaaaaaaaaaaaatcccaaaaaaaaaaacttgtcatccctactattttctgtctagtcatactgctattcaccgttctcaactactcatacatgccctgctcttgtttacactgccagtttacactgtttttccaagccatcacagctgatatctcctggtgctatccccaaactgccactcttaactcttgaagtacataaataatctttgctggcaggactatgctgaatctccttaggcactctctaatcagacatcctgagttgt

SEQ ID NO: 1885249 - DNA, 4001 bp, Homo sapiens
tgagaaacatccacctacgacctcaggtcctcagaccgaccggcccaagaaacatctcaccaatttcgaatccggtaagtggcctctttttactctcttctccaatctccctcactatccctcaacctctttctcctttcaatcttggcgccacacttcaatctctcccttctcttaatttcaattcctttcattttctggtagagacaaaagagacatgttttatccatgaacccaaaactccagcgccggtcacgggctgggaaggcagccttccccttggtgtttaatcattgcagggacacctctctgattatacactcacgtttcaagggtgtcagaccacgcagggacgcctgccttggtccttcacccttagcggcaagtcccgctttcctggggcaggggcaagtatccctcaaccccttctccttcacccttagtggcaagtcccgctttcctggagcaggggcaagtacccctcaatcccttctccttcacccttagtggcaagtcccgctttcctagggggcaagaagcccccagttgcttatttccacaccccaacctcttatctctgtgccccaatcccttatttccgcaccctgacctcttatctctgtgcccccatcccttatttccgtgccccaaccccttctctgcttttctggagggcaagaaccccccaacccttctccgtgtctcttttctctgggcttgcctccttcactatgggtaagcttccaccctccattcctccttctcctcccttagcctgtgttctcaaaaacttaaaacctcttcaactcacacctgacctaaaacctaaatgacttattttcttctgcaatgccgtttgaccccaatacaaactcgacagtagttccaaatagccagaaaatggcactttgaatttttccatcctgcaaaatctaaataattcttgtcgtaaaataggcaaacggtctgaggtgcctgacgtccaggcattcttttacacatcagtcccttcctagtctctgtgaccagtgcaactcgtcccaaatcttccttctttccctcccgcctgtcccctcagtaccaaccccaagcgtcgctgagtctttctaatcttccttttctacagacccatctgacctctcccttcctccccaggctgctcctggccaggccgagctaggtcccaattcttcctcagcctctgctcctccaccctataatctttttatcacctcccctcctcacacctggtcgggcttacagtttcgttcggtgactagccctcccccacctgcccagcaatttactcttaaaaaggtggctggagctaaaggcatagtcaaggttaatgctcctttttctttaccccaaatcagatagcgtttaggctctttttcatcaaatataaaaatccagcccagttcatggcttgtttggcagcaaccctgagacgctttacagccctagaccctaaaaggtcaaaaggccgtcttatgctcaatatacattttattacccaatctgctcccgatattaaataaaactccaaaaattaaattctggccctcaaaccccacaacaggatttaattaacctcaccttcaaggtgtaccataatagaaaaaagttgcaattccttgcctccactgtgagacaaaccccagccacgtctccagcacacaagaacttccaaacgcctgaaccgcagcggccaggcgttcctccagaacctcctcccacaggagcttgctacacgtgccagaaatctggccactgggccaaggaatgcccgcagcctgggattcctcctaagccgcgtcccatctgtgtgggaccccactgaaaatcggactgttcaactcacctggcagccactcccagagcccctggaactctggcccaagcctctctgactgactccttcccagatcttctcggcttagcggctgaagactgacactgccggatcacctcggaagccccctagacagtcactgacgccgagcttcaggtaactctcacagtggaaggtaagcccgtccccttcttaatcaatacggaggctactcactccacattaccctcttttcaagggcctgtttcccttgcctccataactgttgtgggtattgacggccaggcaaacctcttaaaactccccaactctggtgccaacttagacaatactcttttaagcactcctttttagtcatccccacctgcccagttcccttattaggccgagacactttaactaaattatctgcttccctgactattcctggactacagctatatctcattgccgcccttcttcccaattcaaagcctcctttgcgtcctcctcttctatccccccaccttaacccacaagtataagatacctctactccctccttggcgaccgatcatgcaccccttaccatctcattaaaacctaatcacccttaccccactcaacgccaatatcccatcccgcagcacgctttaaaaagattaaagcctgttatcactcgcctgctacagcatggccttttaaagcctataaactctccttacaattcccccattttacctgtcctaaaaccagacaagccttacaagttagttcaggatctgcaccttatcaaccaaattgttttgcctatccaccccgtggtgccaaacccgtatactctcctgtcctcaatacctgcctctacaacccattattctgttctagatctcaaacatgctttctttactattcctttgcacccttaatcccagcctctctttgctttcacttggactgaccctgacacccatcaagctcagcaaattacctaggctgtactgccgcaaagcttctcagacagcccccattacttcaatcaagcccaaatttcttcctcatctgttacctatctcggcataattctcataaaaacacacgtgctctccctgccaatcgcgtccgactgatctctcaaacccaagcaccttctataaaacaacaactcctttccttcctaggcgtggttagcgcggtcagaattcttacacaagagccaggaccacaccctgtagcctttctgtccaaacaacttgaccttactgttttagcctagccctcatgtctgcgtgcagcggctgccgctgctttaatacttatagaggccctcaaaataagtagaggcctttcatacagggtctgagaaggccaccgcagtcatttcttcccttctgtcagacataattcctcagtctagccttcccacctcaatacagtctgataacagacgagcctttattagtcaaatcagccaagcagtttttcaggctcttagtattcagtgaaacctttatatcccttatagtcctccatcttcaagaaaacacacctcaccaagctcagccaccaacttaaaaaggactggacaatacttttaccactttcccttctcagaattcaggcctgtcctcagaatgctacagggtacagcccatttaaggtcctgtatagatgctcctttttattaggccccagtctcattccagacaccagaccaacttagactgtgcctcaaaaaaaaaaaatcccaaaaaaaaaaacttgtcatccctactattttctgtctagtcatactgctattcaccgttctcaactactcatacatgccctgctcttgtttacactgccagtttacactgtttttccaagccatcacagctgatatctcctggtgctatccccaaactgccactcttaactcttgaagtacataaataatctttgctggcaggactatgctgaatctccttaggcactctctaatcagacatcctgagttgtcccaattcttaggccttttatacctgtttttctccttctgttatttcatttagtttttcaattcatacaaaaccgtatccaggccatcaccaatcattctatatgacaaatgtttcttctaacatccccacaatatcacgccttaccacaagacctcccttcagct

SEQ ID NO: 1885250 - DNA, 4001 bp, Homo sapiens
taaatgatgggattacctaggaacaatctgagttatttgcttacaatttatttttttgctatacactgtttcattaaattttaacaacagtaactctgagaggtagttatgattcactccatttccaactgatagtcaaatgtcaaggctatgtcctcagtcagccttatatctgggaacaggaacagagacctccagtctccaatccaatatttctccacttcactttgcttatacagtgaaactgattaaatgatatatgcatgattttgtctctaaaaagttgcacttaattaagcaataaaatatcttcataagaaacaaaagactatcatcgagtgtacaaaattgttacattgtccaataaatcagtagttaccaaaatttttaattatttgcatcacatcagagcatgaaaatgatacatcatttattagagaatacactcctccaacacacacataaatacttgcaaaaataaagatatttttattctgttaaagtttaatatcgatttctgttttatgacttccaaattttttgtctaaaaagaaagtaataaaatattcaatctatcattcaacatatgtgagtgtttatgcagttaaagaaaatgagcacacagtaacttgtgaacaaatccaagctactgccttacatacaaaattaaattcaccagggtaaagtagaatggagagttaaatatggtaatataatctttctttctctactttctccacactccctcatcctattctgtcatcctttcttcctttcttttttcttagtccttcttttcttccttttttcttgccttcgttatttccttcctttttttattattcttacttttgcaggtgttttgaaaagcaaatgtatttgcttctacttttcacgtttcaattctataacttctttaaaataaaatgttacccatttctcatgaaagtaaatttaatttttattacattaattttatttatttatttatttattttgagacggagtcctgctctgtcgcctggactagagtgcagtggcgctatctcggctcactgcaagctccacctcccaggttcacgccattctcctgcctcagcctcccgagtagctggggctacaggcgcccgccaccacaccctgttatttttttgtattttttagtagagatgggatttcactgtgttagccagaatggtctcgatctcctgacctcgtgatccgtccacctcagcctcccaaagtgctgggattacaggagtgagccactgtgtctggccatatattaattttaattacgtaaaagctaaagtttaaaaaaaaaaaagcaactgccatcccagaacctgtagataaacattttatatatatacatgcatagatagatatatggataggatacacagatagtgagaaatgaaaagaggatcatacattatttcattactctgtaatttgtttttatctatattaataggaactattctaaacatcacttaaaatagcaatgctaagtatgcagccatttaactgatccattattgcaaaaattcaaaatgattcttcttgttaaccacattgcgatggccattactataattacatatatgtgcacatgcattctcatgtctttaaagacctaacaatagacagttttggtcagattaaaataaaacgtggtatttaatatctattttcagattggtatcctgaaagttgtaccaatttaccatctctgtcattcatgagaatgtccaaccaaaaactgttcagaattttgagtggtattatcacatactatactctcactaaatatgtcacagtggtgcacaggttctgagacggtcctcagtgatccctctcatggtattcaggcaagatggataatccccaccccttcagtgtgggctacatctagtgacccacttctctggaatagaatagtgcaaaagtgattgtatgtgacttactaggttaccaaaacaccatggctctcatcttgctagcattttcttacacattctctcttgcttgctgtgctgaacccagctgccatgtgtttcctgccctatggagaggtacatgctgcaaagaactaggacagccagcaaggattcgaggcctttgttccaacaacccgaaatggaatcttgccaacaaatgcatgagtgagcttggaagctaatcctccctgcttaagcttgagctgactgcagtcctggctgataccttgattgcagcctgtgagaccccgaacaagaggaccaaggaaagtcacactcagattcctcacccaaataaactatgacatcgtgtttgttattttagggtctaagttctaggggttatttgttacacagaaaaagataaataatacagttgtcgaaaaacaagaaactttttttaaaatgattttgagatttatttaaaagttttaacttttatacatgtttccttttatttctgatttactaataaattttcatagttctgctttcttggattaatttataaaatgaataatttctactatattttcaactacctttctgatatttcacctaaatcataaaatgtttctcccagtatttattatcataataaaatatcttagctgtaatttcaacaatgtgaggttgcatacaaatttcagttacatagataattaatctgtaatttaataatgtggcttaatgaattttataatttaatgtttaattttttactgtttatttaaaattttaattttatgaattataacatgttaaactcatgtgctgttaagaaacaacattttaaaatgtgtttgtatatgtatttgtatgtgtataattgtcacaattgcaaaaacaaataattatcgggagaatgtgaacagcatttgtatatacctagatggtcagattgtgaatgatgttatattttttgtccatttttaatgtctatttttaaaattttgacaatatgtatgcaatgtgtcagaccaaaaaacataacaacaaaattaaaacgtaaataaggaaggctacaaacaatctgtttattttgttttatattttattttatttatttatttttttccagtcagggtctcgctctgttgcccaggctctgcagtgttgtgatcttggctcactgcagcctcaacctcccaggctcatgcaatcctcccacctcatcctcccaagtaactgggattacaggcctgtgctgccatgcccagctgacatatatatatatatatatatatatatatatattttttttttttttttttttttgtagagatggtgttttaccatgttgcccaggctggtcatgaactcctgagctcaagcgatccgcccacctcagcctctcaaactgctggggttacaggtgtgagccaccacacccagccaaacaatcattttaaaatttcttattaaagcatatcttttttcatataattttcctataaatgattcctacaaaagtatttccagagtccaaattataaatatgtatggaactgtaatttaatgtctgatgtattaaaagatgtgtattccagaatacatatgtgtatatatatatatatatatatatatatatctttaaaatttttttttttttttttttactgaattgacaaattttttgtttattagtttgtgttttagagatgggggtctcactatgttgcccaagctggactcaagcttctgggctccaccaattctccttcctcagcccccctagaaactgggtctactgagctgagtaatctcagctgcagtaaatatactcctcattatagcacaaatttaaaacttaaggcattaaacatggttttaaaaatcttagatattttcatgtaagagaaagaattcacattactattttaagtcacatttatatgaccacttatgatttataacatatttttaaaactttttggccacatttcctttttctcttgcccaaatatatattaagtatgtagtaggctattttaatat

SEQ ID NO: 1885251 - DNA, 4001 bp, Homo sapiens
ccttcaatcaaagtttcaaataatcaatatatttgtgaataaattctcaagccaactaggttaaaatttaaaaataaacataatttaaaataagatagaaatctgaaaagttgcaatatttaagttggctgtgctataaaaagaggttaattttcctacattgctagaaaaactgctattgatagttactttattttttttggaggaaaattgctcagtatccaaaatctacagtgacatacaacttggttcagccagcatttcatagaaatcatagtctatatccataaaaatatacttatgtattaatatgttgattataatatctcaacgtagaaatgaattaaatgtccatttaaaggtaaatgaagataatgaagtataatggtaatcaaatgcaccaaaacccagcatatttatagtttattatggcataaatagtggatggaacagaaaagaaatttgtcatattatcttctctaactacatttcttacattgcatcctctgactcctcttgacggtgataatgaactgttaaacaaacagctatataactacaagccacctaaccaaacaaatctacagccacctggaaatgcttctcttttatgaatgcctcttccaactttttaatttttctttaggaatatattagtgttttcagagtgtatacacagctgacatgttaagcaccttacatttcattctaattgttggccaaatttactggcaattaagtagtatgtatgttttgattcctctgagtttttaaaataattgaacttatgtgtaataaagaaggagtgggttagtgaagtcattgttaattgcatcaaaaaaaatctgtcgggaaagttaatcagaacttaaaactcatttcctatgggactgcactttcaatgtaatcatatcctcgaagaggttatatagtgtgaaattgtaggaaaatgtgagaaactaatgcagagattttcatcacttttgaaaaacagccaattccacaatatttttagttagataagaaattttggtaaaattagacatagtatcacatatataatattgtatcaccattaatataaagttaaaaatgatactaagcagacagatttaggtatcacctctatctctagagatttatatctacttactctgtgtctttcagtgcttctcacttctatgacctcttcatctcaatcaaaactcctttacctactcgcagaataattatgctgccctagaaaatcctgatggccattctgtcaaaatacgttcataatattactacctctcatcgcttctctttatagcaccttcgtacatgccactcttatctactgttttattccaatcgcttcttaactggttttcctagttatatcctgtccacttttgatcattgatcattgtcaagagcagctatattccaatttaaacataaggcaagttagaatatgatgtcggttgtgttcaaaacacagttaactcaaagaaaaaaaaagctaaagtcatgtaatgcctaaaggactctaactgaatagaacatcagttacgactctgacatcattgtgttattttactcttttcacttacttcactatagccacattgatttcaagatactaatgtgtggtgttttagtgatgaactaatatctatatacagctgccaaagattgaaagtgaaaatgtgacttcaatttattttgtggcaaggtgttgaggcaatgttgaaggacatgcaaattatgtgctgagcagtactttactacaagattgtcactaatattttgcattttcaatgagctctaccctgacctccctatttaaaattacatctcctgagattctttcttttcatcattcctaatttatcctcccaccacccatttatgcttatcaacttctaatatacaatctgtgaccaatcgtattttccaaagatggcacaatctcacttttacattttagcagtctgacattggtggagtctaattgttctcctcttgaatctaaactggcattcaagtgactgcttgaactatagaatgcaggagaagccatattctgagaattctatgactatgtcataagatgtcttgtagcctccacacaattctcttagaattcttgttcttggaactctcccttttaaaatgcaagcaccatgctatgtgatgctcaagtcacatggaatggttaaatatattaggttagtgcaaaagtaactgtcgttcttgccattgcttttaatatttgcaccaatccaaggttcagctgagctctcaaatgacatccaacatttactgccagacactgataggttttgaatctgtgactccacccaaattttatgttgaattgtagtcctcagtgttggaggtggggcctggtgggaggtgattgaatcatgggggccgagttctcaagaatggtttagtgacataccctcagtgctatactcatgatagtgagtgagttatcatgatacctggttgtttttaagtgtgtagcacttctctcctctctctctttctcctgctcccaccatgtaagacattcctgcttcccctatcccttctgccacaattgaaaatttcctgaggccttcccggaaatcaagcagatgccagcattatgtttcctatacagcctgcagaattgtgagccaattaatcctcctttctttataaattacccagtctcaggcatttctttatagcaatgcaagaatggactaatacacacataaatgaactctcttggatatccagcctaattaagctttcaaatgtctacttcagactcagcaaacaacaaaatgcagcagtgagagaaattccaagtaagaactgctcttcagagcctagacattccacagatacctaaaagagaaaaatatattctggcttcttgtttgttttaagacataaatggtctttttatttttaacatagcaaaagataattattatttgtcatgtttattgtattttctagccaaataatatataaccttcattaggccaggacacttacccttctgcttgttcaaaactgtatttccaaatatgatatagtgtttgacacctgttacatactcaagaattatttattggttgatgattgtaatagttaattttatgtgtcaaactgatgggctcacaagatgcacagacatttagttaaatgttatttctgggtgtgtctgtgagggtgtttccagaggaggtagtatttgaattagactgagtacagtacatcgtactcacttatgtgggtagacaccatccaatacattgaattcctgaatagagcaaaaagataggggaagggggaattctccctttctctgcttgacaacatgaactggaacattgatcttttcctgtgctaggcatacttagttctcaggtcttcagacctggactggaatttacatcattagccctttacactacacctccagctttcctggatcttcatcttgcagaaggtacatcatgggacttttcagctttcataattacataagcaaataccttaaaataaataccttataataaataaataaatatatgctcaagtgattgtggaaggttagatatcccattctctaccatctacaagctggtatatagtatatagtgacataagtaaataaatacatacatattttatacatctatgtatacatacatatatatatatgttcagacacacctctatgttatatgtttgtgtgtgtgtatgctataggttctatttctctagagaacactgactagcacaatggatgaacttaatatatgacactgtattttagaactatagcctatatctctagttaattttttatatatcctgtacctgtagttaatcaattttgttcgacttccccaattttctttcaaactcactcaatcctttgtcgaagttctcatgtcctaaattatttttatttttatttttttcaataagaacacttaacataagatcta

SEQ ID NO: 1885252 - DNA, 4001 bp, Homo sapiens
atgttatttgagaagatccttgagagttttataatttaagtttcaagtaggaattatactctgtgtctctcggcaatattcataacaggtcttactacagaatgtcattcagtaaaatactctgtgcatgagtttgaatgtaataattttactaataaaaaatcagtgcaataaatctactgattcagcattaaaatttacctcaaaaaaagaaataatttgtcttgtcaaaataccgtttcaccactaactagacactttttcaaagtttcacttttctaaaggattagatatggatctcatcccataggataatcagaaagcttgataaatcagtgttgtttatattcaaagtatatttgagacttcagagtttatcaactgcataagagaattaaatgaataatttttcagttgatgttaacataatttgtggaaatcatcctgtgttcatatcatatgcagttttttagggggtggggttaatattaattaaactgtatatgtaaaatttgggctacatgcattatctcattcaatcccgacaacatccgcatcaaataaatatatttttcttcttttcatggatgtagaaactggaatttaaataggctaattagttaactatcttggtttattaaatacttaatttgtgccaggagctttcctaagcattttatacatgttacctaatgttatggctacaactagttagggaaatacacatacagagagagagataaacacacagggggaaaatacattttacatcagagagttacctgaccaagtactacacttcttttgcttttctctaagaccaacccaatgctaattccttgacttatctatttttatttactaatgtgaagcagagattaggtgttcaataattttgttttgaaaatatgacaaatgaataggagaatgatagagatctcaatttatttgagatatccctatgttttacaatcaaaactgagtaaagaggtttccaaattatgaactatttaatcaaaaagttatttttgaattttaatttatgtgtgagtacatatctttatctgttttggtttactcgtgtctgcttcccctgacaccatgatttatagatataagtgaaagtaagatatgagttattatatgtgcacactgagattgtgcaaattgcatgtagctatggattaatatagttagaggtacggaattttctgttctttttgtactctactgacagatggacccactgttttgctggaaagtggagccaatttgtctggctttgaagaaaacaggagaaaagaggatatactggggacactttaatgacggagaaagagcaagccattggcccagctaataaaagttattgctaatatttgtttatcatgtattagatgcaagtttatactgtttatcaccatttgatgtttaagttttgtttactggaactcaaaattgaggtggaagtaatgctttctgaaaaaaatgaatttaaaatgtttacatcgtggaaagaaaaagaactctgcggacctatcagtttgttggggctgccatttgaaagtaaaccaattcaggttgcttgaacaacagaaatttacttcctcataaatctggaggccagaagtccaagagcaaggtgccagcagggttggtttttcagagacctctcttcttggcttgtaaatggctgtcttctccttgtgcctttacatggtctttcttctgtctgtgtcttaatcttttttcttctaagaatatcagtcctattggattaggcccacatcagtgacctcattttactttaatcaccttttaaaaaatcttgtctttaaatgaggagctgaatgttagaaactcaatatatgaatttggggaaggggacaattcagcttataataggagatggtgtaaaggtaaagaatcacctggctaagtcatctgcattgtagtactcatcttttgatgtagacaggtacctcagtcttagtactgtggagggcatgggagaggtaatttcatagcatcctgtctctgcaaatccctcttgagaaaactgtagagaaatatattcaatttagggagaaaattgacaatacattatattattattaattctaataaaataggacatagaaatgcataaaatatttagtgaagtattttaaatatataaaaagtaatttatattgtgttttaatctaatctggctaaaattattactaaaaatattgaaaaaatcagtttgaaggaaatgtatacagtcaacattttgtgacaaaaatgttcatatctatgtatttttggacaatgacagctgcaatattatcataaatgtttagcaattccaagcttgaggcaaactccacagatagagtaactgtaatttattaggtgatggaaaaggagaacatgatagattgacttaatctttcattctacacttttctatgtttaagctcaagaagaatgcatcataaataccatatgttttcctaacaccttatactactagtagctttatttttttttagtctaatctttactctagagactattttcagttgagaatctaataaatataagtttgagaggtatgttagctaattgttcacttttaactaaaacactagagggcaccctttccttctgttagaacatgtcctcctcttctaaattacatgccgtggagacacaaaggattgccaggtaaaaacaatattcattttattttgtatttttatggacttgcttttatatttaaccggtaataattttgcagatcccaaaagtcacagcatattattttaaatgatattaagatgatttttaacggaaatgaattctaagccggaaatgtcagtgtcacagagctaaagagtcagatgtctccctagtgtcacgacagtgaacaaaaataagtctgtgtttggcatgacttgtggtgtttatgtagtataatttatcttacatttctgtgtttaggattaggaattattcgtactgaatgtgtattcctattttctacgttctcaaatgaatagcacactactgctaggttaacccagtttgaaacaaaatgcaaacaagactgacctagaggaaagaacaaaagttgaaaattcagtgaggacccaccaaataacaattgccaatatttatttagtgtctgtttttgtcaatcacttgtgtaagcattttaattacaatatttaattgatactacattgagtcattatttactattttcattcttattcaatatagaataaaatatagtattataagaacagataaaataacatgaaacatgtctttgaattgtgctttcccacatcagaaacctagggcaaaagggagctgctacagctgcaattttgcctgggcaagacttgccaccagggtcagcttgtgctgacctggtctgcatgtgctattactgggtttaccagcctgctcccctgaaatagtggtgcatcaagatcctctctgctctaacctcaggctgaaattcaggcatttggagcatcatttgcctagaccatcagcctgaggtgccccactcttcctggacataaatcaaggtatagtggggccctctctgctccatgcttagacagatctccaggcatttgaagcaaccactcagctgtattagcagcccaactcgccccacccttcctagatgtagatcgtggtgagtgggattctctctgttccatgtccaggcatacctccagccatctagagcacttgcttgcctggatgacagccttaccttctccactcttcctagacatagatcatggtgcagggaggaactttctgcttcatgcccaggcagatctccaggtatttggagtaatcattcaactggttcatcagtctcatataccccattcttcctgggcttacatcatggtgcagtgaggttctttctgctctaagcccaggcagagatccaggcattcagaacatctgctcactgggattggcag

SEQ ID NO: 1885253 - DNA, 4001 bp, Homo sapiens
caaccatacagtgcttagtattacaaagtgtaacatcccactattttctaaactgaaaatagatcagttgagtgactacaatctttgaaatcagtaaattttaaacattgttctggtcctgatttgctctattctaacctccaagtcatttgtcatgttaggatttctcacactctaacaacaaaaaaatcaaagcactttaattctacctacttcatgggaaggcaataataattgtaaagttctttgaaatggcaagtacaagaaaaaaaatatctgattcagtgttctcttcctatttcaatatcaaagcccagtgctgcaagttaaggatagaatgaaatcacttgaaatcaaatggttgataaaatttcccaaagctcagctgtatctcattatatcagatcctttagttactagggtatgcaactattacacaaaaagtttacactgtctgttcagaagtaggttgacattcttcccttcactctgcattacctcatacatttaatttttaatattgttctaaaccttcttagatttcatggtgtgtgtgtgtgtgtgcgtgtgtgtgtgtatgtgtgtatgcaatgcccaaagtgagagctcacagaatgtgaaaaactcactcttctttacatagagagaattctgtttccttggtcttttgtaaatgtactttttccaaaagttcttttttgcttcacttaaacaaaaataaaaatctgacatcaggattgtgggtaataatgggaggtaagtgatacaagcatattaaagcaaagtccttcatttgaaagactgatccatccaattcttaagtgtttgttgcttttcactgcagaatctggaggacttacacagtacttctctaagtaccaaccacaaagcttccatgaatttataggaattttatcttctaccctggccctaatgaaacagcacccagccatcaaatgtagaaatatagaagccaacaccatcaatctcaggtttcaagagctccacatttttctttgatttatgtctaattcatctctgaaatacaggatcaataatcgaattaatccattatttcaaacatatccagaataaggtgggaggaaactgacactacagcagagaacagtttaggactcacataaaagctcttgaatttgacaaacagacacaccttgcttttcatacttcaaataattcagagctgtgggagcacacaaaatagaagttggaagtttataaaaagagatgctgaacaggaggctgtgcacactgtaagagtaaaatcttgaaaaatgtgaacgcatataaataactttaaactttaatctgctgaatattttgagcaagagatcaacataataaggtatgtgttttaggagcagattatgcattggagtcagaaagattagtcaggaaactaatatatgaatttgggagaagttaatgaagcctgagtcagatcaatgacagtgaccagaaaggattaattcaagagacagtcaagaggtatatttgagagagtgagagttagagggcagatgaaagaatctaaaattcccagaaatttggtttcgatttactatcagaccagacaattttctggagacacattattcagagagagaataattgcatgataagaataaagaaggaaaattgggtccttctttccagatggtggattagaggtttttagcatgcctctaccacttggaaatagcaaaatagtgcataaaatcaaatctgtgagctttaatttaataaggaaaatgggaatctaccacaatcatgaaggacatcttagatcctgcagcggagaatggcaaatagcccctgtgatggcaactagctgataagagtgaagctccagtatgcaagggaagcagagagcctccctcggtgacttacctttccactgaggatctgagcagcccaggctgagggacagcactttgtttctcccaagcccttgagctaacttggggagacacttggagatgctgtaagggaaagacaccaggaatagctgcaggcattttcccagacacgcaacactgcattaaaaatgtaggttgccatttttaatctgggcatatacaaagacctccattgtttggtaacctggcagtgtggctgcaggggcattttagtcttgggccagagattggagcatctgctctggagcaaggtagggacctccacagtcagaactgtggaaagtgcctgagcagtagctacaccagaactgtgttctcaaccactgtaggcctggagcaggaggagagctgctacagcggcagtttcccctggatgacaagacttacagccaggaccagcttagcaaactggaactgatcttcacgtgtcatttctgggtgccccagcctgctcctctgagattattgtgtagcggggtcatctcttctccaccctcaggcagaaaaccaggtgttcagaggacctgcttgcccagaccagcagcctgagccacaccacccatcatggacatagaccaaggtgcagcagggctcttctgctccataaccaggcagatctccaggtcaaagcaccccctcacctggatcagcaacctgagccacccaacccttcctgtgcatagatcacggtgcactgggaccctctctgctccacacggaggcagatcaccaggcatgtggacaaccactcacatggaatagtggcctgaatcaccctatctttcctgtacagagattctttacagggggcacctctccatttcatgccaggcagatagatctccaggcattcaaagcacccacccacctggatcagcaagctgtgctgccccaccctttctgggcatagattgtagtgcagatatccctctctgctccacaccaggggagatctccaagcattcaaagtacctgcttgcccagattggcagcctgagccaccccatcattcctgtgcagagatctgggtgcagggggggccttctctgctccatgctcaggcagatttccagacatttggagcaaccactcacctggaacagcagcctcagctgtcccacctttcttgtgcagagatcctggtgccagggggcacctctccactacatggcctggcagattttcaggcatctggagcacccactctcctagattaggagtttaggccatcccccatccccatgcaaagaacttaaagctgaggaagtttcccagctccacacctaggcatacctctgggtgcttggtggctgcccactggattctccctcagtgctggggctggtgcttgccatcagggaacctgcaacaaacctgcccagactagatctgctcatctgccccactataccccaggactgaggatggagttcagacaactgtgcacttcatgaatcagcccattgcctgaggcaacacagagcttctcccagtaaataaggatcaagtatatacccagccacattggccatggccagctgttacccataagcaccatgcatccactggtttataggtcaaacttcataccccaataaaaacctactgacagaagtgcatagggctatggaagcaaagccaaaagaccctactcaacattaaagtcacacacactaggtagggagggagaaaggaaagaaaataacaattttatagggaaagaaagaaaaacaaaaatcctacctgcacaaaaatctttttttttttaatcttacctgcaaaaaataaatctttttttttttttttttaaatcagaagtgccagcatctccagatgagaaagaaccagtgcaagaattctggcactatgaaaaatatgaatgtaacgataccaaaggatcacactagctttccagcaatggtccctaaccaaaatggaaactcagaaatgacagataaagaatgaaaatcatggattgcaaggaatctcaatgagatccaagagaaaactgaaaatcatcacaaaaaaactttgaaagcaatccaggaaatgaaggaagag

SEQ ID NO: 1885254 - DNA, 4001 bp, Homo sapiens
aatatatatcatgaaatacctgcattagagaagtagaaatgctcaacattaataagtttagtgtgcaacccagaaatttagaaaaagaacagaaaatcaaaaacaaaggaaataagaggaaagaaatatttaaaataaaatcataacaatgagaagcaaaaacataccatagagagaatcaacaaagccaaaaattaagcctttggacagattaataatacagaaagacttctagctagatcaactgaaagacagatagaagacacaaaataaaaaatatttgtaataaaaaagagacattacatgctacagagatttaaaaaggtgacaagtttttaggggcaacagtaatgtcaaatatcttgaaaatgtcgacaaaatagataaatcctttaaaaatacaaattccaaactttactcaaagagcaagtaaaagtttaatagtcttagagccattaaagaaattaaatcagcagttaaaaatcttctccaaaagagaacaccaggtccaaatggctttgtagcaggtaattccaatcctacacaagttttcagagaatagaaaaaagtgatagtctcctcaatacattttgaatgtagttctcaagcttgagatggagcactcaagctgtgataccaaggaaaaacaaggaaaacattacttatcaatcttacttatgagcataaattcaacaaattgagcacagcattgtttaaaagtgtatatatgtcatgacccagctggaattatttcagaaacataggattgaattaataacaataaagtattaaaattagttactactctaaaagaataaaaaaggaaaattatgttattacctcaatggattcaaaaaaaggggggtggtgaaattcagtgtcactcataaaaaatccaagcaaggagactaacaagaaaatgacaagaaagaaatttcctaacctgaaaaagaacatgtataaaaatagcagtaaaataaatgccacacttaatggcaaaacattgagagtatttgctttaagataaagcagcttaatgacaaagatattcattattatcacttctatggcaaaaaagtaaaacaaagtaaaattgcatccatgctttgtatcatacatagacattaactttaaatggattcaagactaaaacttagttgttgaagacagtttatcttcatgacttcagaattgggaaagatttcttaagaccctgaaaattccaattacaaagaaaaatattaataaacagttcattaaaacttcaagcttttgctcatcaaaagatattgtaaaagcaataaagtaagagccatatagtagaaaaatattagctacatgcataactgcccaaggattagtattcatatatataaagaacttctacatgttaatatgaaaaataaaatccactaaaaacatggacaaaagacctcttctgaagtttcaaacaccatggaaggaatcacactttattgtgtaatcatgatgtcacctggtctcctcactacttaaaatctaaataagactaattcaaacatccaattgcatggattgtggaaattcaaaatcttccctaattatattcaaattcctgggaatggagaaggtggaggtatgccttaaattctcatattctcttatgatatgattttcttcctcaggttgaattttttacccctgccctgtgtctcatgcctatttttatatgttcatcctggggtcatcccaaatatggagcaaaggtccctcttctaacccatctcccaaaagctacaacgaaatcaagcctattaactataacaaaacttctactggagacttcggggtcccaaagaggttccagcatattcccctaagaaactttcactgacagatttatgccatgtagcactccagcctttaacctttctggcatctctgacacccacctcacttccaacactacttctctggtcctaccgtctcttctccacctggctcacagaagcagaactgttccttctttactttcattcctgccaatacccattccctcagggtctccctgtcctagtgaatgttgcataaacaaaacagtactgcccggaaaggagttcaggaggcagctgttaagataacatgttttcaccctgctgcattttaaagaaacagaactatgccaggatttgtagtaagtaatgattcttgtaaaggtatctcatacattgagaattttgagatcactcacatctattgaaaattgatttgaaagttaagatttattagactgtacctctgcatgcttaacttttgaccatattctaacaaattatcatttgtccagacatacgtttttaatgtgtttaatgtcctatctaattcttctataactttcaatcaaccaatccgcctatcagcatatcataaaacaaaggtggtttattttagattagaaatctgctttacttttcaacagagtttaacactctttgttttatgcagactttatcaagaatattatttccattaaagaacatctacattttagggtcagctgattactagaatattttacaagtaatttttaaagttgattttttaaaataaaacgtcctccatggacatatgtcttaaatccatctccttcatccccaccgcaagcaattgtcatgaatgtgacatctagcttgggtgccaccaactgttctccaaataacagctagttaagatcggaagcagtgaccaaagtggttccctagtcatgactgtgattgacaagtttcctaaaccacttcctcttcaggtaataatgtctctcggttttgtgacttttttatctcacgtggggttgaaaattattctcaaaattaattgacatttcattgataaaaagaagagccaactaccaaatttttaataacaattaaaaagcattaacattattaacacatggaacaaagcttaacacactctttttgttccttcagtatccctcctcttctttaaatattatcactttcttgtcttaggtttccatatgtaagaattgacagctagcaaaactcacacataagtgtttctttccacagttctctaggacttctcaagcagttttcactacaccataatgacgtttacaaattgtgacatggaaacttggttggcagttcaaaggaaaattgatttttttactatgagattttaaaacttcactttatggggagactttaacaccatcgatgtagagggacgaaatcgccatagcctaacaaggtccataacagttacttctgacaaaacaaaaacaagacctccttgtcaccttgtttcacagctgccagggtaatcataaacacaaactactcggggtttagtttggaggaacaagacggctaacctaaaatagtaattaaaaattaagcctccagcaatccattttgaaaatttcaagtcttctaaattctagtcaggcaggaaatatgttaagaagttatgaccctggtagaagtcaggatttccttttttgatggaaaagtagatgaaaacagaaaaactgaatcttaaagtgaaaaaggcaaatctctctttatcaagtattttagccttagttgtctttttttctcagcaggtatcttatctaagaatacaaaagaaggagacttggaaattacatatgaatacagtcaagacaatagtttgcctctttcaggatctgaaaatggtccctgacattggatgcagtgatcatgcaaagaatacatacatatttttattttatatgaaacacatacatttatatcttatattaaaataactatatttacaattgttactaattttttcatcttaaaaatagccatggatttagaaatgaatcctatgatttgcaactaaatactttcggttttccaaaagtataattgttctgaaaaggctagctactatataatttcagctacatggcattctggaaaaggcaaaagtatgaagacagtaagatgagcagtagttggcagggg

SEQ ID NO: 1885255 - DNA, 4001 bp, Homo sapiens
gcttctcttcacacagcatttttatgcttcttctccttaccccttccaatctaagcatggacattcagcccaccaccagttctgcactgatccctcatgggttcctaaccctctgccctcaccttactaaatagccctttgattaaagtctcctcaaattacccagtgtgtaactaaaagagtataactggattgtttgtaacacaaaggattaatgcttgaggggatgaataccccattctctatgatgcgattattatgcattacatgcctgtatcaaaacatctcaagtaccccataaatatatacacctactatgtacccacaaaaattaaaaattaaaaaaatttttaaataatataaagttacccagtgtggtggaccatctgcttcctgcaatgccctcatcaatacagatattaatctgtaaaacagatgaacaggatctactgccctgttctttgtacaaaataacttcattaaataatatttcatcagcttcatgattgctcgtggaatgtaaatagaacagacctgcagcggaccttgtcagtattctgcctgtaactctcacatctctttgcttatgtctttcatttttattctctgaggcagcacgtgctctctttgttggaggcctacctccatctgccagaaccctctgactacacacaggaaaaagcaaacatgcctagaaacgtacatatccccatcatgactgatggtgcagttgtaaatacttcagcaccctcatccctgatgggaacaaatctaagaagtgacaggccttatctccacatcctctttactggattgagccacagatgttttccatgaagtctaactatataatgcaagcttgtttggatttcttccctttccttcacttcctttcccatctctgtttcaggtccccgcccatctatgtgtttttcctggatatatttcctaataaaccaaccatgttcacccaaatcctcgtctcagggtctgcttcagagcagccccaatcgaagtcaggaatcatatgacatacatttgaaaatagtttttttaacataaaatgatagcaaaaataaaaaatctcttataaccgttgcaaaagactagacatgtctaaaagtaatccatgtcagataaatttagttttttgatcaattgtgatttaatataattaattttgggcctggtatcaattttctaaaaagcactgctctgggaaaaagtgaaagcaaatccctttctctgacatatttttaatgttgagatattagattctaagacacagactctatggactctaatgagatcacattacccattgctagtgggtgtggcactgacagggataaggaggtagcatcctgctggcctttcagagacctgtgaagaaagtagtaggtgctcagtgaactagttacactttgagaggtcttctgataatcatttgtccacttccagggggctttcaaacctgattcatcttcaacctcaccaggggaatacaggcctctttgtaaaatcagagtaatggatggaaaagagaccaaaaagacacggttcattatcttcctatttcagcctttactttgacaaatgaggtgaccaagcccaagcgtgtaggaggtttacacaaaaccattcagctggttagtggaagggcagggacttagatccatgggtccaacgttctagctaagtgagtttcttcggctgatactactgattccgcttttgaattattcaaatatccttcaagattctgagagaaatgcaaatttaatctttcaccacttttttttctcagataattattgccattatatcagaaagttaagtgatgattttatcaattaccaaagttgattgaggttggttatttgtgaagtcattagaaagcttaccttatccgttatgaacctgactttaagatgagggatgggggatgtggatcacccttgtttttctcgcagaagggctgaggtgtcaccatcctacttctagaaagggagccacgtgtcaccaacaaatcaacagtattaaggagaacgtttgacataaaaagtcatgttttataacaaaaatgtagaacatttattcaagtcaacaaaagaaacaaaatattgaaacagttaatgtcttctctaatcatttctttttgttcatttacagagtagtaacgattattttctctgtcttaatttctaagcaatttctcaatttagaatgaattaactggaagaatagttcgttttttctacacatacagaagacagtacagatgtaaataacgttttcaacaagatatcctgataaatccgtggacctaaattatttccactggtacatcattactatatttttcaacatctaataagcaaacataagatctgaaaacgagttctccctgcgtacttgcatctattacaatgaatattgtgtgtggtttgggttttggctgagataattgtgaaatatttacaaaattcattctaaaacgtttacatgcacgctagtggcttttaattaaaagtaggaatacaaagcacatgatggtctcttcacagagaaatgtcaataagaaagtttaaagatatttcataaatacatttaaagggtatcaaattatgtttgcacttttgatcagtttaaatagcatacatatcttaaatataggtttttaagtcttttgtaaagcttcttttctaggagaggagaggcccctatcaatagaagatttttaatcatctataaattaaaaagcagaaatgttacactgtcctgtaaaaacctacacgttctatttctgtaaaatttgcttctacttacatgcaaaactagcattatttgtcagaagagattatggaagaaataattaattttgagaaaaaactattagtgtgaacaaaataatgctacttaaaaagcaattgcttcataattagaatcattctgcacaaatctaattcacatttgttgtttttattacatgtatacacaaaattatctttgaaatggaccacttatcatctcttccaacattaagccaaccagcagacttgagcctaatgtgagaattcaaaccaaattcacctctcaccagctgtgtgacctggggcaggttacataacccctcagtttttctcatctgtagaatggatacgttaatgagagtaattacatcatagcattgctgtgagggttaaaatgaatcaatataaagaaatattaggaagaatgcctagcacagagtgacattatatatgtttttactactattgttattcccagtccataggaggcactcagtaaatatctgttaaattaaatgcctctgccaaataaaacaacacaaagcagcctcgataagataatgtgatacaaattattctcacatttattaaatacataatttctaagacagaaattcagaaactctgttccagaaactggtatttacaaggccaggaaccgtttgtgcagtgttatctgtaggtctctgagaacaccatatccctcccacaaactgttctagggcccgaagcccaaccaatactcccttggctaaatctttgaaagtccttttaaaaggcaatttttaaaaagcagaagaggtggtgttacatattaaaacatagccatttaggggcgggcacagtggctcacgcctgtaatcccagcactttgggaggcctaggcgggcggatcaggaggtcaggaaatcgagaccatcctggctaacacagtgaaaccccttctctactaaaaatacaaaaattagctgggcgtggtggtgcacacctgtagtcccagctgcttgggaggctgaggcaggagaatcacttgtacccggggccgggcgcggtggctcatgcctgtaatcccagcactttgggaggccgaggcgggcagatcacgaggtcaggagatcaagaccatcctggctaacacggtgaaaccccgtttctactataaatgcaaaaaattagcctggcgtggtg

SEQ ID NO: 1885256 - DNA, 4001 bp, Homo sapiens
atgtgctgccaagtattctataaaagcaatttcacttcagcacctatgtcaaaaaatgtcctatgtcctcacaatatttttacacattgtaataagaaatttttcacatcatcatcaataacctagaaaattaatattgataaaggcattttatgcttattgggaaaacagttctccattgggccataaaatgaaattctaggtcagtttcaaggttttgttcattctttaataagagtattaaaggtataaatcttctgcaaaatgttaaaatgagatttcattttgttcatagttgtttctgacactaagaagccaagcagtaggatgattcatcagggcaatttacttcgtgtatgagaatgtcctctatgacagcaatggggctcagggcaggggagaaacttgtgtgtttacctatcgaaaccattgtgttcccagccaccattctctctctctctctctctcacacacacacacacactctctcgctctctctctttctctctcattaatcagcttggatgacctaacaacagtaataccaaacacccctttgttataccaccttttctccccctttcccactatcctgcttgactgaaagagacatcttcgtgtgtgtgcagtgaaagaaagagagacactgtcccttttccagaatacagtcacaattgagagtcatgttctgagtataaagacatgactaaaattctcctagtacaatcagcacacactttttttttggctttaaagccaattctatacttctggaacctatcagggatcatatttattaaaataagacatatccattgttaaaatgtgttatgtataacacaatatatacaaaaaagtaaatagcatgatcttacaaccaaaaggaaaaaactgaaaattttcttgatctataaatggtgagtacaaatattcacagtacaaaatatatgctatatatttttaaaatattatttcttatgtcaaaataatcatttcatctgtacacaagaacttaatcttattcaattcaatgtaaactcattctaatcacaatttatggagtccctgcagtattttctagataaattaaaattttgcagtcaattaggttctccccctctagaattgtacccaggttttggttcagctcaagtggcaccacattggggaggatatgggtcctttcccagatcatctgttcacactgcactttgtttgcatttattcttgttaatctttaatgagacattccatatgccatctggactcccttagatcgtggcttctacacccacctctttccaacaacaagatttttgattctctagatctcttttagctacatccataccctgtaattgaagaacaggaaagacaaatggctactctcctgaaattgtagagctgccttgaaatccacctgcccaggtaacttgtgtggtcattgctactcaatatcgtagaaattatacagaacacaggctgggtgccatgactcatgcctgtaatcccagcactttgggaggccaaggcaggcagattcctagcccaggagtttgagaccagcctgagcaacatgatgaaaccccatctctacaaaaaatacaaaaacagccaggtgtggtggcacgtgcctgtagtcccagctatgtgcgaggctgaggtgggaggatcgcttgagcccagtaggtaaggcttcagtgagctgagatcgtgccactgtactccagcctgggtgacagagggaaaccatgggaaggaaggaaggaaggaagaaaggaaggaaggaaggaagggagggagggagggagggagggagggaaaaaagaaggaaggaaggaaggagggaaggaaggaaggaaggaaggaaggaaggaaggaaggaaggaaggaaaggaaacagaatacaggacttctctacaaggcttcccaaatctccactcaccatctgaaacacaagacacaggtcccctcggtgtcctgcactttcctccctcaagtgtagttggaggttctagaactctattcacttatatctcagtttcaggttacggaactgagctttgaactttctttgttttagaaaattgcattgatatagtgttactctcttgtgatattgtgttgatatgacattactctcttaggagacagtaattttctaaaacaaagtcatattctctcaagttttcctcccctaacttggacaatccctacctaatctccagggatagactcctatcatatttccaaactattaattatagcagaaactagatgtcttttgggattagccttttaaaaatagagcattccaacccttacaggtcaaaagccctggatttcaagaatctgtctctgctatgagtctcaagagcctattttgtaactcagaagccaaggtatttatcctctacattcgatataatctctcccctgagacagtgcatattaatgaattaataggggaaaggtcacagcaaagaaagaaatagattggattgtggagagaagaatttcagttaaattatagatttctatgtatgtaacctatctatctatccatctatcttatctatgtatctatctaatccatctagctagctacctatctacctacctacttatctatctttccagttagcttttttttttggtctagaaagttcaagtatatccgtttcttttatttcttagaattctataattttccccacttcttttgaagctctacttcagtaaacatttggaacatgtcttctaccctcactattagaattattccatttaccagttgactgggtactttgtttatttccaaaatcaaatcgtagagtttccaaatcatatggaaggtgtacaatgtttcaaaggcaaaaatttattgtttcctaacagatttgaacatcagaataggttctttgttcttgccactagtttgggagtgcctgtagctcacactgacaaaattattccaaaagtcaaatgtaatatctgaagtgtatttggacataaaacctcttaggcatttgtcaaaaaattacaataaaattcttcagtgcccctcattaatacttttttcaatcttcttgctaacctcttcctcgataatcatcaggcagactgactgggttctgcaaactttttctgtgcagagccagataataatttttgaggggctttgcatactgtacgatctctgtcacaactagtcaactcttcttggtatcacaaaagttgccatagaaaatacattaatgaacgaatgtgactatgtcccaattaaactttatttacaaaaaaatgtgggccaaatttgacttacaattcacagtttgctgtgaattgttttagactatctggtccccatcttaatatgtcctcccttttcaattcattccatattatcttcttaataatctttaaggggcacagcctcccctgctgacatgacacaaattaactaaaaacctatttctcaatctggcatttaagattctctaccatgtgactattagagagggaaaggaagctgggaccaaacagaaggaagtgtcaagaaatctaatctaaccatgcattctggctctggtgaggacaagcaaacagcctgaggaacattttcaaaagatacagacactttgggcataaaacggagcagtatcagtgcccactcacatttctgctaataccagacaccagacgggcagatccagagggttgggaaacactagctggccaggcgacattattcacagtttgtttctgttaaaggccctcagccaagagtataaggggatgggacaggctattgcacagtccatgagccaggcacttggcaggtctattaccagattcggtcaaaccaaagctttgtttctggacatccagatatcatccaagtagctagagggatggcagaataagggacggggtatgtgcataataagccaaggaactataccaactggggagctgggagcaaagagaatcgcagttct

SEQ ID NO: 1885257 - DNA, 4001 bp, Homo sapiens
tcaacaacacatcgggtggtgccatctgcctgggtaggcggcactatcacaaacaggcctgtgaaagtcaccctgtcatttgctatgatgatgccactaaaaacattatttttcccatcaaattatctccatttgtgagtcttggacacaattttttctgattctggaattaagatgatttctgcttttcttaaatgattagtttgcttattctttatgtattgtcagaaggacaatttggtttttaaaaggaaataaagccttaaatcacaagaataaggttaggaatttggaaattcacttaactagtcagtggggagaaaaaataattcaggagactctcttatctctgacataaatctagctctgtcacacagaactctacacatcagaaaagtgatatgccacgaacataacatagaatccccccaaaataacttagccacattgcacaaagtgagatagctaatagaagtacaactatgacttttaaaattatcttcaaaattttcttcaaaaatcaaagaaatataatggatctatggagttaaaatattctagtctgacttcgttcacactccgtgaagccagcactcaatagcaacacactcacaccaacctaggaagagtaaatggaaatctaaattattaacttgtccttaaaaaagacatactactgcatacaattttaatagagtggtattctggtaatagcagcaagattcataccttagagtaatttacaaatatatatgaagagatatgtacagaaatattcatagcagcattgcttgcaaaaagaaaaaaatcctgaaagtaacccaaatgcccaggaaactgaatgattctattgtgattattccaacaaatggaataccgtacaacagtaaaaatggatgagttacaactacacaagtcaacatgaatgaatttcagaattataaagatgagtgaaaaactcaccaaagaatacattcaatagacaccatttgtataaagactgaaaataacaaaaaatgttaacctatgggcataaatatatctgtcataagatgataaccaaaaaactgataaaatagtgtttgctcctgagcaacacagaaggagatgcaagcagaggcgaagaggcatatgtaatagaagacatcaactgcattggtaatatattatttctcaaactgagtactcatgttactattcttgtaacttccaggtctgcatgtattatatcacagaaatgttccataatataaaaattggtttaactaactatcttgctttggcagtaactagttgttcaccagccatttcctttgtctttctgagcacgttactggcctccatttcccagccttgcttgcagttaggtgctgccctgtgatgagttctgtaccacggaccatgggcagaagaggtacatgctctgtccagtgcggcctacaaagctggccctgcacctggcatactgtcttcttcctgcatctgctaatcacatgcaaaaagtccattgcaggactctgtggactgagagggtgtcagaggctctggatagtggcagaactgccatcctcattttcacccaactgtgctaaaagcaaaaaacaaaagtcagcgtgataagccactgagggtagggggttacggtagcagccagcttcccctgccaatacacttactataaagtgataatcattcagcctacagcttccaaatgaaattaaaacttcagaatataaaccaaaatctgttccagagaaataaactcaatctctcttcagtgattaaaaacaccaagcaagattcaaacctatctaaggaaactgaggccagaagtttcctctcttagaaaacaaacaaatattatttggaataaaatcaatcccactttaccaagaaaataagataattcacagatcttaattcaagcatttctcatatccagttccaggcaaggagagagccataatgtacatgcttgtaaccaagaggccaaccatccaaacagaaatgaataatggggtcacaatagacattccacagaaagattccagggaggggataagtaactacctcttgcacccataaaccatagctgcagaataacatatagaagagaataatcggcacagctacattttgtcagcccttactttatgacaagcattattatcattggctgacaaacacagttaattcttcataaataagatagtcctattattagtattttacagatgaggaaattgaggcatagagaatgaagttcaaggctgtcccaacatgctatcttagactgcgttaaagagctaacatgttattcttccaaaatatgggatagttatttttttttaaatataggtgttgcaaagaggtcgaggccttcttgaattctctttttaaaaaatcagtaggcccatctgtaaattactaacaccgtcaactgagagtagaagcagtaataaagccaagagagaggattcagaagagaagggggttagaaacagcttctcatcctccacctttcctcttgctgctgcttttaaaaatcatcaatcttacttggaacgtgtttcagaatcctttattttaagacaagaaaaaccattaacaaacatgtcctaaatgagttcctactaggtgaataatgttccattatacacaaacaaggccttacttataaaactgggtccccacttccaagtttctgcaatgcagaataaaacataaacatgtcaactactccactggatcaaacaaaaaaaaatcaatatcctgttttcctggaccacagaactactaattgcctttaagtgggcaatatatttccttgaagtaagatgagctaattactttccttctcttatcagaagcctatgataataaaagaatgggaaaatgattctccttgaattaagattgatttaggtagaatataaaatgtataacctggaggtaaaataaagaagtgaggaaaacaaacaatgatcaacaaagataaaaaatattataaagtaggaaaagatctagcaacattggaaataagttgaaaattatcagaaaaagtatctatggatctctgagaatctttccttccccagtaattaagctaacactaggtgacattttgttttttgccagacactgctataaacattatccatgtattaactaatttaaacagccaagctaggtgagtactatttatgtccctgtgttttagaatgcggacctgtgttttagaacgaggacctgtgttttagaatgacctggtgccaggtcatacagcttttaagagacacaatcaatatttaaaactgaatctccccttgcccaagctgaaaaaccgaacatctctaagaaagtatcctctcgtctcttttggttcttttgcgtaagtcttcacatcttctagtggtcttaatgaataatgaaggtgaaaagcccaggtaaacctttagaggtaaatctgaatatgcagcttttgaagatgctgtctagggagaattcccccaagtatatatgaggagaattatagcaatagagaagtgagtgggatggaaatcctaccagatggcataatattgttcagacagcgttgactggtttcctttgtatcatatggtgagacaacatgtgagtaagaaagggaggatgctggtgtgtggagatgataaagggaacaggaatgagaaaagaaaaaaagatataatgattgttttacagtttctagaagtttatgcgccatattgcaaataggaaatgattatatgaattcaatataattcttacaaaataataaaattacaaaggactaaaggtattaaccatttcaacacgtgattgatggagttaagaaatgtaaaactagagtaggttaggccagttgtctgagttatccagctagttaatgccagagtcaacaagagaaatccaatttcccaacttggtttcttcctgctttttttttttataaccctgtgctacaatatctaataaacaat

SEQ ID NO: 1885258 - DNA, 4001 bp, Homo sapiens
gtactgcagaagaatataagtcgtttctttcttgacatctgagggtcaaattggttctaattctccagaatacatcttaggggcgcttttgccttggggggaacgtttcccatctgaagaaagaacataaggatgccagcacccctagtcattttccgatgagcattagtcctagagcatcctctaagggcctaatgcttattcttttccagcgtgcataaccactcatggacctctgcttattggattagttacgctcaccaatgtagcagttctgcactccttttcctgcctttcttgaccacaaagaaaggggcctgggctgctggattctagtggtcctttaccagcgtgcccaacattgcctttgcgctcagcggtgagtcctagagctgggctgggttcctgagtatttcataacaacccagctgccccatcaagatgcattcccataaacaacagttcttctgcaaattcatttcagagactgtgtagctaaccttttgagtcaggattgagatagtcttttgattctgtaagtactttaaggcttggctgagtgcaaacagctcgcacatttgaggagaccaattattaggcaaatttttaactctgcttccacaagagtctccataccaattactgaatacccattgtagttttttcctcagtcacctgggaggaaccatctatcgtcctgtgctgaagggagttcctcctaggtctggtcggaccttcgtgtggtaattaagatttaaatcccctgttaggaaatctgctgggttaagggagttatcagtggttggagttacattacccttttctagcatagtagccccatactttaagattattgagttagtaagctacctttttgcttttttttttttttttttttttacttagaataactctgaactggtgaggtgtgctcacaatgaggtttcctctaaaagttacttttctacttttagcaaagctgttgccgctaccgactgaatgcatttggcctatccgcgggttactgggttaaggatttgctacgcccttatttacactgacaacaaagtggcaattatcaattacaggttttaaatttaccctggcttttaaaggaatagggcacacttttttttttttttaactatttctatctttttctttctttttctctttgactccctctttgtctctttctccgtctctctctctctccgtctctctttcttagccattacaaacttggggccctcacaagggtggtggggaacaggtcccacataactgcccatgtcaagagctgtatacctaaatcgggagggataccagggataagactccctgggttatagcctaggtgcctaaggacacagcatagagcctccttagatccctttggagacacaacttgctagaggaaatgaaagtctgaactattagtacctaggaggcaggaggcagggatcaaaggaagtagattcagaggtaaggagaattttggggctaaactctcaagaaagtcggagtcgggaccccggaggtataattcagaaggaaaggtaagggcgcacgcatgggcgactgccgagtagagacttctggctgcgccatgatctcaaccggctactgccgggagttcgggacaacagctttctgcctccagtcagcccttggcttccccaagaaaattgaaagtggaagctggctccaggcagaccaaagttcccaacagaaggcttgggggttgttagaaagccctttcccagatagcctcacacctgagtcttaagtccggcggccatgctaatcatttttaactggcgacaggtgcccagtattttcctccagttctaaggatagaacagaatagcaagcgaaagtggtccaatattactcacagctttggatgtcccttcgtggtcgccaaaatgttaccaggggtccttgttcacagaactcccaagacggtggtgagccacttccaagatggtggcaggctgcttccaagatggtggcaagcctcgtgttctctgacctggggttcttggcctcacggattccaaggaatggaatattgggccatgtggtgagtgttatagctctattagaagccgcgggtcatggaagagaaccgtggaacccagtgactagtgttcagctggattaggacgaacccaggcacttagccatgcaggaacaatggcaagcctttagcactatcgggagtggcaatgggagtcttgctggatcaggagcacagcggacaccctgccggatccggagggatgggagtcagcagcgggatgggagtcagcggcgggtctgtgacagcagcaaacagtagtggtggacggcaagtgaaagctcagctcaagccgtgacaaatatggaccagaagagtgcaattgcaagatttaatagagtgaaacacagtgaaaacagagctcctatacaaagggaggggactcaaaggaggttgccgttgctggctcaaatgcctgggtttatatcctggtccttgtccctcccactgtgctctcaggcaatagatgacttgctatttctttacctcctgtttttgcctaattagcattttagtgagctctctgattggttgggtgtgagctaagttgcaagccctgtgtttaaaggtggatgcggtcaccttcccagctaggcttagggattcttagtcggcctaggaaatccagctgtctctcactcccacatgtccccattccaagttttagggttccattcttttccaattaatgccctcactttaacagtagacacctgaggagagtgagcatgcatctttcattgcaggccagccactcacatgataagagcttgtgtctgattttccccaattacataattctttagcatgcatcatgtttgagaaaacattgcttctgaccaaggatatcaattcacagcaaagtgtggcaataggcctaggatcctggtatttattgatctcattttgttacccaacatactgaaacagctggcttgagagaatgatagaatattctttggaagactcaccagttgccatttaggtggtaatactgtatagtgctgtaataatgtcctccaggaacctttatatgctataaatcaacttcccatacatggcgctgttactcctaaagcccagattcataggcataaaaattaacatgtggagattaaacaccattaccattggtgattattgaaaaatgttgcttcctttctccaggatcttatgccctgcttagtttcaaagggagcaatgattccatcaggaaataaaatgataattccactaatttctaagttaggacttccattcatttactttggcctccttatttctttgaatcttagtaattttcctggacttcatatatttcttgctatgtatttaactcaatgttatcttatgaaattctgaatctgactgttacttccccaatctaactagaaatttagaacactttaactttcctctggtgtctcctttcttcttgttcacatacttgaaatctcaggttttagctatatcttattttctacccattcaattttaatactaattccaattttctttgcctacaaagtgttgtcagttactacgtccatctttgagtcttgtgttcagtttttttccttctgaatttaacatttttctttcctgaatttcctattaaaatagttatataataaggtctttagtaagaacagctaggtaaagtattctaaacaatatttcactcttagttcttgggcatttccctctattgctactgattagccttttgtaggtctattttctattattccattaaaaatatatgctttgtaattctattctgtggatacttttttctttgtaatattctgcatttttgtattttttggtcttgtttgcttactcttttcaatctgaatgtcttttcaatcctagaatattcttcagcactatgtatatatacacacacacgtgtgta

SEQ ID NO: 1885259 - DNA, 4001 bp, Homo sapiens
aggagggaaaaaataaaacttgcagactctcctctgctgtagggagaggcgagaactactttgatttctctccccaacacattttgtttggagatgaggtccaaacaaccttagtaaaggccaggttttagcatgtaaatgaatagagcaaactccttgtgagagaagttcaaaatagagaaactgtgcatgaaatagaaatacctcttttaactctgccttgtcataggttcatcaactttacagaccctttgatctttttcatatgctcatgaccatttctgacccttagctctctcctcctcaccctgccactatcaagctaagactagagaagcaggaatatctagccttctctgtcaaggaactcagagcaacttcctattacattacatatctttttctcaattccagtttccatatcaccttttcccccacatcaggaaaaatctataacccatttcagcacctaacagagtacttggctaatgatatgtgcacaataggtattaaatgaataaatgaataatttctgatctaggaaactgagctgtaatgactgtgtggcagcagctaccattgattgaatacctacttattgtactgaggcagctttcccatattttctaggtcttcacatattttatctctttaatcttcccaccaattctatgaggttggtattactgtctctattttaagatcaggggctttaagaaacttccctaggattacacagctaataagagagccaggacttaaagtgagatctgtctcacacctaagtccactgttcttcctgactctgtgctgctcccttcctccttaccatcttggtccagtgagaaactcagataagcattagctaacaaacctccagtcttagcttgatagtggcagggtggggaggagagagctaagggtcagaaatagtcctgagcatcattatgagcacgaaatacttttaactgtgctgtaatgattatgtgtggtattcaatatgggttagatgaatacttatggctgttttgattgctctctttatagagttattatttttgcctatgtgtatgattactcaaaaggtgtaaaaactttagccaagaatcaagcaaattgccaaactttataactaaatcctgcctgggttggtcttttagagaccctatatcatcacctagtgaggcttcctcaaaccctgctatctataattcagaatttaaaaaaatttctaaactataagagaaaaaggtgactaagaggattttgatttctggggtgcctattttaaaattctttttgaaatatcactttttaacaaataatttttgtgtttctgatttgccggtgctgccaacatgggttaacagtgtccaccgggtaatctggcactgggcttcgctattaagttgctaagtctttgggtttctagaggaaaactgggagaaagctgggtggccaagtgaactgtgaaacccaaagacctcttgaggtcacttgagtttacttcagtacgttttttttttttcctcctcataccatttgttcatactctttcttagaaaagctaggtttgtattctatgtcgcaatggatgattttccctacgttttaaactcccatatctgttttaaactccggggaaaactgttccttgttaggatcgatgcacatttttcttccttgggttttgcatcggtaaatttctaaagatcccttttccgtagagctttcaagatgaatagccagttcataaaaactgtcaagtgccttgcaaataccaagaaataattcagtcatgttaatcttttacatgcaaattttgtttcttgttatagaagtgtaaaatatgtagtcatatgaaacccctttggttatgtatttagggatcccaggaggatacattggatgaaaaccaatattcactctaacaagcacttactgaaattccattaggtgcgaagaaccatggtaggtactaaggacacaaagatgaaaatgattctccaaattgatcagcctggacgttgtttccctctgaaatcaatagattaatcattttttaaatttcttgaggctcacgtaagtaattctgattttcataagcacatatgaatattcagttatttgtgtaatagtcttattgataaagtaacttggatatagagctccagtgagagtttctggattcatggctaagccaatatttaactataagacaataaaaaacacagcagtaaaaactgaattgggctaattcatgataaataatctctggggtattatccaaaatgttttctgcctacacaaaaaaagaaaataaagaaacacatttgccaagagaagaggaggcttggaggtaaatggggcacagactcttcatctggataatgtttctgttctattaacatgcatctgccacactgggaatgttgctatttctttttgttagagtgatggcctacatgttgccatgagatgatcaatagaaaagttttagaagaatgaatattagaagactatggaatagagtcagagagagggagaacctagggaaattggtggaggcaggggaatacacccagaaactggggtatatggggtgggcgaggaagtagagaaaaagagtacataaggataagaaggagagagaagtgagaaaaaaagaaaataataaaatagagtgaaaatgacaggaaagagactacacagatgagaatgaggggaaaagggaagttaacggaggaagaaaaggacaaaaaatgtttagaagtagaagacagaggcttcaatgagacagagtaaaatgctcacaacactctctagtgttggattctaagatcccaagtctgttgttgccacagccaattaacagcactagttatgggcctatctaacaaggagacaagttccaattctgtgcaagagtactgcttctcagctatgtctatgtgccaagcagaaaagctcgattccagcagtcaaggaaacctgcctatgccttgttgtcatcttagccttgagccatggctttctttgtgaagcttcgggaatgggtcagggttctctagactaatggagttgaggctaagatggaccatgcttggctagcacctcttctgctccttaccaggtagaaatccagcctcatgtagaggagtgaataatctttagtgactttagtgaataagctttattcactttattcattttagtgaataaactttagtgactatgcaacatagcaaaataaaacgtgttttttctgcctcactgagagcagaggcacagtgagcactcaacaaacagattagagtaggagaatgagtgaaaggaaagaatgctttataatgctatttgaacaataatactcttccctgcctcaaaaaaaaaatcccccaatgaaaacttcctaaaaatattgcatattatcttcaggctatacatcatattgtcaatgtttgtgaaatgatgtcactagcagcatcaattagtgaggaaaaaaaggccctcaattttttggtaactaaaaacaaacacaacttaacttggctattatttatattattttaaatataaaatagaacaatgtctaagtgtttggtgcactgtaatgtaatgaatcatatcacgggtcatgctttgcataatgttgtgcctgcattatgagagaattgacatcattttattattgattcctcttacctctggatacagtaatgtctttccatgtagtcagagcctctttaatatctgtcaatattttaatatttctttctaaaaagttcttgcgcactgttagatttattctcaagtatgttatattttttgctgtagttaatattacatttttaaaattacattttctctttttggatagtgtagaggcaaattattgctttttgaataattatcagttatcacacaacctctctgagggcccttattttttctagttttctgcagattctcttgcattctctatgtttataatcatcatc

SEQ ID NO: 1885260 - DNA, 4001 bp, Homo sapiens
aatttctgaacatttaaatatatttaccttgaagaaaatatgcaaatttttgacatagtattgaggggaaagtaagtttccttgtcatgaacagatgtatctgtgaatagcctgtggtgaaatcatgtggcaaaaggggaatatgttctgactgatgggatatgcagcagcacaagacaattctttttccagtcccctctactagatgcctctactctctcatggttttgcctctgagagagatagatctgaaataataatagtagtttagagtgaaattaactaatacctaactacaactgcaactaataccccagatagagcttcctgaatggaaaaagtcaagacatcccctaacacttggagataacaatttataaaatgattttctctaccctaatagagaaaccttacaacttaccacaacattaatcagacttctgtctaataacaggggatctgagttggaataactgagactcagactttttaaatgtctctagagaaacttcaggacaagaaacaaaaggcactaaaaggaaatgttagcctttgacacttacagcaacaacaaacagtaaacacagcctaactcttagataaacataaaacctcacactaaagatctatttgcttcagttccttttaccaacacatcatgtttagctttcaaccacaaattacaagcacattatgaggcaaaagaaaacacataatgaagcgataaagcaagtatcagaaacagactcaaattagattttggagttatcagacaggtaatttaaaataactatgattaatatgttaaaagctctaacagaaaaagagaacaacacacaggaacagatgggtaatgaaataaagagaaatgaaaagtctaagaacggatcaaagggagatgctagaagtcaaaaacactgtatcagaaataaacaatgcctttgacagactcatcagggaacagaacatggctaaggaaaaaataattaaggtatgtctaataaaatttctcagactgataaacagagaataaaatgaaagaattaaacaaatgaacagaatatgtgagaacagcgggccagttagaaaaggtaccacaaatgcaaaattaaacatcagaaggagaagagagaggaaaaaaaaaacaaaaaacagaagaaatacttgaggtaataatgactgaaaatgttcaactgtgaatatgactcaaagccataggtccactaaactaataaaacactaagacggttaaacattttaaaacattttaaaaatcgaaacatgagcataacatactcaaacttgcagaatttcaaagggaaaaagaaaatctgaaaaaattcagaagaaaaacacctgtagttctgagtcttctctttcatgtggttactttggaatgttcacggcacataatacaatcggtatatttactgattgtgtattggtgaattggtgctggctctcagttcccgcctcgcggcggggggggcctgaccacccctgcgatgggtgtcctaagagccagggggggaagaggggctggctgtcagtccccgcctcccggggggtgcctcccgcccctacgatggtggttccaagagtctgggggggaagaggggctggctttcagtacccgcctcgcggggggtgcctcccccaggtgcgatgggggtcctaagagccagggggtgaagaggggctggctctctgtcccctcgtcgcgggggttgcatcccccccctgtgatgggggtcccaagagccagggggggaagaagggctggctctcagtccccgcctcactagcaggggagttgctgccaaggccctcaaacatgggggccatcctttagaaaccctgtctagttgtttagagacataggccaccgacctcatccagggccccacagtttgggttaaaagtccacctgccatcttttctctctctgacacatacaatggaaaaggctttgtcagatcgggtaaccccagggctgaagctgccagaagtttttcctttaactcatgaaagacttgctgttgttaggatcccccttccaaaggttcccggtccccgacccctttgtgacctcatacaaagtcttggcttatactgcaaagtttgggatccacagtctacaaaaccccacagctcctgagaattctctcgcctgccttcggcccttaggctctggtagattgcaaataacatgctttctttctgttcccgggtggcttcggacccctgtcggatcggaaatcccaagtaaggtacctgccctgggcagatttgagctttcttcttggacacctaatacccacagtcctccaggtaggtcctaaagatcttgggatccgcgatgggggtcctaaggcagggggggaagaggggctggctctcacccaccccaaaatgggcggcctttatgttcaggttttgcccaagagtcagcttatttgcttcttctactatcagggcagttgctgccatggccctcaaacaggggggccatcctttagataccctgtctaggtgtttagagacgtaggccaccggcctcatccagggccccacagtttgggttaaaagtccagctgccatgttttctctatctgacgcattgaatggaaaaggctttgtcagatccggtagcctcagggctggggcctccagaagtttttcctttaactcaagaaagacttgctgttgttgggatcccgattccataggttcccagtccccgcccactttgtgatctcatacaaaggcttggctaatacttcaaagtttgggatgcacagtctacaaaatcccacagcccctaagtattctctcacatgctttctgcccttaggctgaggtagattgcaaatgacctgctttctttctgttcctgggtgccttcggacccctgtcggatagtaaatcccaagtaaggtacctgccgtcagcagatttgagctttcttcttggacacctaatacccacagtcctccaggtgggtcctaaagttcataggatccgcgatgggggtcccaagccagggagggacgaggggctggctctcagtccccgcctcgcgggggggtgcctcccccccccctgcgatgggggtcctaagagccaggggggaagaggggatggctgtcagtccctccctcgtgggtggtacctccgccttctgcgatggtggtcctaagagccagggggagacgaggggctggctctcagtccccgcttcgcgaggggtgcctcccccccccgcgatgggggtcctaagagtctggggggaaagaggggctggctctcaatccccgcctcgcgggggtgcctcccccaggtgctatgtgggtcctaagagccaggggtgaagaggggctagctctctgtcccctcgtcacgggggttgcatcacccaccctgcgatggaggttccaagagccaagggggtaagaggggctggctctcagtccctgcctcgcgggggttcctccccccctgcgatgggggtcccaagagccagggggggaagaggggctggctctcagtccccgcctcgcggagggtgcctcccccaccactgcgatgggggtcccaagagccagggggggaagagggtctggctctccaccaccacaaaatggggggcctttatgttcaggttttgcccaagagtcagcttatttgcttcttgtactagcagggcagttgctgccaaggccctcaaacagggtgccatcctttagaaaccctgtctagttgttcagagacgtaggccaccggcctcatccagggccccacagtttgggttaaaagtccacctgccatcttttctctctctgacgcatacaatggaaaaggctttgtcagatcggatagccccagggctgaagctgccagaagtttttcctttaactcatgaaagacttgctgttgttgggatcccccttccaaaggttcccagtccccgccccctttgtgacatcatacaaagtcttggc

SEQ ID NO: 1885261 - DNA, 4001 bp, Homo sapiens
ctcactgagcagggttttcatctaaagactgccctgacccaacagagccttgaagctgtttgttgtctgctgactgtggatcaggcatcttgctgggcgctgcagagggcacaacacaagtaaggcacatagagctcacaggcaatgcttattttggtagaaacatgagcaaagggtgtttctgctttatttgttttgtttttgcaaggatgagagaggaatccaactaggtgcatttgttcagaatgcaggctaagggggattcgacagtcactatgagaccaggtaggatgggatagggatatgaagtggaaggatgacaatggagtcaaatggaaggaatcgaatctattgcttaggctcctgtggcttcacagttttcttcaactgtgttgcctacacactttataataaaattaaaattaagatgatggcaatcaaataagcaattcacaagggcagatcttgttctgcttcattatctgattcacctctgaggagcttcctgaaagcctgaaaaaaaagaagaaaaaggaaaacacagtaagtgaccaaacttttgtttccagaaagtaagaaaatactaattaggacccatttatgagacacaacagagtactggtgctgaagtatccctctccacatcaacaagtagaaactgaacagaatgcatgaagcacctgttttcagacactgaggaccacagccaagggtgggattcctggcgggtgcgtggggtgtgctctgggattgctgagatgctctctctggactgtggcatgagcgggtggagcccatgtacagcatggtggcctcatggagttgcggacagatggtagaggttggggtgtgtgaggaggtggcaaggtttgcagtgggtgtctgacaggatctgaagaaatctgcggagagtccccttgagcctcatggagaacaaagaacactttgagcagaacggagagtccagagtagcccacgcagaaggttggggagaccgcactgcacacctgcattcaacagggacacagaacggcacgcgccgtgcacgggtctctctcagctgccaggtagggctatgcggggacttctccagttaaacttacagggaagcctgcgaaagtcagccagtcccaccgataaattcactgctgaccaagcaaaactcagcagcccttacatctgactgatgtccatatgagagaaaagagaggaggacttcagagacacccacagctccaacgacagagtgcagcatttcagcaggatggcatcctataatgttaaacgcacaattaaaacaatcgctagaggtgaaaagaagcagggagatgaacaccataaccaggaggggaaaaggtcagtggagacctacctggatgtagtgggaatgtgggaatgagcagacgaggacttaaagcagctgatatttcagagacttgaagcaaaagagaaacaaaaaggtgaatggctggggattttaacaaaaattccaaactattaaaaagaataaaacacaaattctaaagctgagaaatataatatgggaaataaaaaaatttactggactggcttacaacagcttggatatgagagaagaaaagaatagtgcctttggatgcagggcaatagaaattatccaaatgaagaacagggaaaaactgacaataattctagatgtgtgtgtgcctgatagcagagcttgaaaatacacgaagaaaatggcataactggtggagaaatagacaaaatccaccaagacaattccatggcttcaacatttctctttcagtgattggtagaaccaacagaccaaaatttggtgagaataaagcatatttgaacatcatggcagaaagaaagtaagttattttcagaaatcatgctggaactggatatccatgtggaaaaaaggaacctcaacttccacttcctactcactgggttgacttgtgtcctccaaaggttcacacccacctgggacttcagagagtgactatttggaattagaggctttgcagatgtaattgaagatcttaagatgactcatcctgaatttcggatgaatcctaaatccagtgactgatgtccatatgagagaaaagagaggaggacttcagagaaacacataggaagaaacccactaaaatggctattttttaaattcttatactttaagttctgggatacatgtgcagaacgtgcaggtttgttacattaggtatacacgtgccatggtggtttgctgcacccataaacacgtcatctacattaggtatttctcctaatgctatccctctcctagccgccgacccccaacaggcccccatgtgtgatgttcccctccctgtgtccgtatgttctcattgtttaactcccacttatgagtgagaacatatggtgtttggttttctgttcctgtgttagtttgctgagaatgatggctcctagcttcatccatgtccctgcaaaggacatgaactcatccttttttatggctgcatagtgttccacggtgtgccacatttttttttattatactttaagttctagggtacatgtgcacaatgtgcaggtttgttacatgtgtatacatgcgccatgttggtgtgttgcacccattaacttgtcatttacattaggtatatctcctaatgctatccctcccccctccccccaccccacaacaggctccggtgtgtgatgttccccttcctgtgtccaagtgttctcattgttcaattcccacctatgagtgagaacacgtggtgtttggtttttttgtccttgtaatagtttgctgagaatgatggtttccagcttcatccatgtccctacaatggacatgaactcatcattttttatgaatgcatagtattccatggtgtatatgtgccacattttcttactccagtctatcattgatggacatttgggttggttccaagtctttgctattgtgaatagtgccgcaataaacatacgtgtgcatgtgtctttatagcagcatgatttataatcctttgggtatatacccagtaatgggatggctgagtcaaatggtatttctagttctagatccctgaggaatcaccacactgtcttccacaatggttgaactagtttacagtcccaccaacagtgtaaaagtgttcctatttctccacatcctctccagcacctgttatttcctgactttttaatgattgccattctaactggtgtgagatggtgtctcattgtggttttgatttgcatttctctgatggccagtgatgatgagcattttttcatgtgtcttttggctgcataaatgtcttcttttgagaagtgtccattcatatcctttgcccactttttgatggggtagtttgtttttttcttgtaaatttgtttgagttcattgtagattctggatattagctctttgtcagatgagtagattgcaaaaattttctcccattctgtaggttgcctgttcactctgatggtagtttcttttgctgtgcagaagctcttcagtttaattagatcccatttgtcaattttggcttttgttgccattgcttttggtgttttagacatgaagtccttgcccatgcctatgtcctgaatggtattgcctaggttttcttctagggttttttttgtttttttttgagatggagtctcactctgtcccccaggctggagtgcagtggtgagatctcggctcactgcaagctctgcctcccaggttcatgccattctcctgcttcagcctcccaagtagctgggactataggtgtctgccaccacgcctggctaatttttagtatttttagtagagatggggtttcaccatgttagccaggctggtcttgatctcctgacctcctgatccacccacctcggcctcccaaagtgctgggattacaggcatgagcctccatgcccggccctcttatagggtttttatggttttagatctaacatttaagtctttaatccaccttgaattaatt

SEQ ID NO: 1885262 - DNA, 4001 bp, Homo sapiens
ttatgtgtgtgtgtgtgtgtgacttatcgatgtgttgaaaatacatgttgttttccaaaattttaaattgtttaaaccatttcctaggcatagcaaactaaaaaagtaaaaatttctggtaggttttacagtttaagacccacacagaaacaaaaaggctttaacagtcttacaggaggtttgaaaaaatactttcaatcaaaactctaattctgctgctcactacttaccacaataacatatgttcaatgactaattctgaatgcaacttacgttttctgaatcctaccagggtcctttgtgtttagaatcactagataattcaaaagtgaaaaagtttattcatcccgcagctacttatacatatttgaaaaaaaaaagcaagagagaagttcaaagtatagaatttgtaatttatggtaaatagatttttggcctcaattatttttattcctttgtttactccttccatcaatccatcacagatccttgcccaattgatagaaaatgttgttttcatggtttttatttgccaaggaaagagtaatatttcacaaatacttttctgtttaagaaaatagatcttgtcattcatttcctggatacttattacctatgtactatgtgccagacactgtcctggagctagagtatgttaaaatatcaaccacaaaaaagacgcatgatctttgttctcctcaaattcaccatgtagtagatgagacaaacattaagacttacaaaaatgcatgtaatattataactaagaaaaagctttgaagaagaagtgaatattcttatgatggcataaaggtatttgaacaaatcaaggaggcaagagaaaagatttaggagacgactaaactcacttctgaatacaaaggaggagttaactaaagaaaaaagttgtgattaacttgagtgggaagatgggagatagcctacgcattagtatcctctattctccaatcatgagattcctatttatgtacgtctaatcaatacgcgagagaactttttccatcaactttgttgaaggtattctctgacacttcaagcaaaatataaaaaagagagttcagatgcttcttagatattgacatgcataaatgttagtactgatatttgtggctttcatttccaatgtggcatttctaacaaataattggcataaatctgtaaattttatttcattgttttcttggtggtctctaaactgaaaacaaaaggtaaaatttagaaaattctattagctatatttaattaaatataatatgcttaattaaaatagatgactatatacctgtgaatggcttttttctctgacggttaatggttttcttattcacaggcttcattgtcaggataaaaaaagtaacaatacatataaagtatatctagaccaggatcgataaaaaataattcctgatttatcccaacatcttcttgccaacatataatgcatattctccttatatactaaaaatgcacttgatacatgaaaaaaaatttagtactgagttccttagacatacattttccaattcataattgaaaatgtatattggttagtagagcaaataatttgaactttcagagcctctatgccttcacctaaggaatagttataataatagttaataaaacttatccaataattaaattaggtaatttattttaaaatcctatagcatatttgcttacagaaatatgcactcattgtttgtagcctatatttgtaacttaatatataaataacataatttatcattgttattataactgattaagaattgttcattacttattttataattaaagtctgggggttttgacggccggttagggcagtttaaaactccctgaagggaaacagagtctcttactcacaggaaagagagagaggtggcagagtttcagaagagaggaagaccagacagtttcgcaattcatacacactcaccttccaggatcccggtcgatgtctccagttgaaaaggcaaaggctccctcctccccctcgcggggctcgcgatgggggcatagcgggcttcttcagtgccccgctgctcagacctccaggggagcatacagacgggcaggctgtgggactcctaccccagggcagggtctaggggtgaatgtttacagctcctgaagccccagtgggcatgttacaggatactctcttagtctgccatctataggcggctcgtgttaaccagctcaattaggccctctacgttgtggcaagaacagagggctttctgtatctgggttcttgccttgttgtacctgaagaatcggatcacccataggcttggagaatgagtgcaaagttttattgagtggaagtagctctccgcccatggggcagccagaagggagatggttttcccctggagttggggtgctcggcagccccggctctcccctgactgcccaggccaacctccgcctcctcccgctggtccacggcctactggcttccgggtgcctgtcagcgtgtccttctgctggggtgctcctatggatgaccagcgcttgtgtcttcttcccctgatgtgttgttcattaggacgtccagccacttgtgtatctgcctgcaagggtcttgggtttttataggcccagaatgggggcatggagagccagggtggtcttggaaaatgcgaagtttgggcgggaaagcaggtgtgcctgtcctgacctaggttcctgaccgttggagccctagccagagaccacgccctcctctccccagcacttccctttcccttttctgtatcatttaaagggaccacgctcttcccttcccagcactcccttatgaattttataattaaaataaagtccaccataactcttcaggatgaagcgttagaaaaattcttattaatgtaagaaacattaccagtattacaactgtcattacttcagtctaatattaatttagattattcaagataatggaattagacaagctaagtaaattagtggtgaaaatatgaaatcattgaatgcaaattaacgcttttttgggtagataagataattttgtataaggatacaatatagctgatttctaaacttaaccagcacaatattgcattagacttaggtttagccagagttttctatacatttgactataattgggaattttaagccactgtgcagttcttcctgattatgtactcattacttcatatcagcagtttggaattggtcatggtgggagtatttacatcacagaaattttaaaatgtcacaaatcaaagtctacctcccactcccaaccccagaaagctggctgtcaaactttgctagcacccctctgcatcagacttatgtttagccaagcatagtgttctatatatcttactgttataatttgtttatggatgagatgtgaactgagagcctaagatgaacatatcagagaacttcttgcaatatttctttatattttagatttttgccaaggttttggggacatgtggtctctttttgattgagtttcaaaagcaggaactttggaatccttggcttctggccactcatataactatgtcatagagaggtccttgccgagagatggaaaatagagtcctggtaatactaattgtctccctagatagagttgtaccagaagtcaaactaaactcagatttgcacatacataagctaattgtttgtttgtttgtttgtttttctttttctttgattctgtatgggtaatcagcattgaatttctggaacttcagaaaataaatttttcctgaatatcacatatgtattagtaacaaactctaaaatattattgctccaagtctttagaaatagataatgatgtagatcttttcctgatacattttaagatgaaaaatgaagactgttttcacctttgctttatggtgtggagataaaaataaggaaattcttatttattttatttttggaagaaagatggagtatgggatacctctgagctcaaaggt

SEQ ID NO: 1885263 - DNA, 4001 bp, Homo sapiens
agagtaaaatgagataataataggagctagcacatgaggctgtatgtggattaaatcaattaatataagtgagtgctgaaaacagcccctggtgtgtgtgtgtgtgtgtgtgtgtgtgtgtgtgtgtgtgtgtgtgtgtgtgctgtgtgtctgctgtcgtacatcctaaatacgacttctcattcctgcacaatcttgttttgttagctccttctccacctgtcagtgaagaacatctaacacctgaaacccttgccaattattttggaaagagactttctggaggaggtcagccaatgccactttccagctgttgtatcttctttccatccagctggacattgctagatgatatctgctgcttgcaaaggtgctgggaggccttgcttccagggcttggtgggcaccatgttacccagaggagacggtgcccagccagcctctgccacatgggtgactgggcaccacccctgctgctgatgccactggcactccccaggcagaggcagctctgttctctgaagccctcattgtgccagagccatatggggccaccgccggccacctgcctgcagggcctgacatagcacttgagggaattggcttttggtttttcccacagaatccatgaactcatgggaggctgcgctgtgagtcagaaatgagaattaaccctcctctccattgccggaagccctgttattatcccccagccccatcttcctcattccccgacttcgcctcctccccacctccttcagtcagaagtcctcaacccgactccctgtgaaggcccgtgggatggccttgggggacctgcactctaacactggacatgtgcaaatcctgggaagatgcttacagttatcagcatcctctcaaaagaggttcatcacctgaaaaagtcaaggacactggcttctataggatgagccaaccagttaggttgcatcctccgggaaaggctcccagatagagttatgtgtgcagaggggctatagctgagtaactcctgtggaggggccaggggagaagtaagccagccccacagagagctctggagcacagaccacccaggagaggaatcccgtggtgggcagaaatgccaggcctttgggccactgccttgctcttatgtgggcctgggccagcccaaggagggcacagtcctttttgaaagctgaagcttagtctgacgagctgtgagtggacagctgtcagtagccacgctccttgtagctgggcctggaatccttcctggaaggggagtgcggtgcctgctgcatggccctgggcagctgctgtgcacagctgctggcggaccctcaccaaggtccatcagacctgccaaggcaaacctgaatcctatatgtgactccatctaagccaagctgggactcttccactcttaacttggaaaatgtgcattcccagctgctaggtcctgaacttgacctggggaagagaacgacaaggccatgcttgggcaggagaagctaggtgtaggcaagggaatctttaccttatgaatgggttgtatacatgttgcttgttgtttagagagtggaatacattttgtcctggaaatcctactataaatggggggatgcgtacctgggccttcttgcaaaagcctgttaaattcctaatgatgttgaaatggtgggaagggtcatccagggaggacctccacgcccgcccatctcctctgggttgcccgggcaatcctgcaggagccgaggctggacgcagctgaccccaacagacaggagaaacaagccagcaccaccggagagaaccaggctgaaagggtgacccagggcttccgtggcctagaatgagagagacatcgcatggcgcaaggttccaagtagggttcgcggcggggagggcccctgccgcaaagggactcagtgttgtgcgagggaggtgaagtcgcttcttgatcagccgtatttcttgcctacacttgacaccgtcaccagcccaggcgcctttccggtcaccctcacggaaaggctcatccacgctggaaggagggaacctcctcgttaacctctagcatgccggtgcctgccaccccagggcgcgggagcccgcaggagcaggcgtgtggacgtcctgagagctgccactagatggcgcgtctgccctgcctactcaggagccccgctcagggcaccgggtgcgggagcccggctaattgccctctaatgagaaggctgctcccaaagtgccctcctcgcagggaaagccccaggctcctatcaaagggaatggcttatttatcctctaacgtgaagaaacttccacacagcatcaattaaacacattaaatgtgaccagagtgagaaaacatctaaaggatagaatattgaattgttgccactgacaaatatcaaaccacccattctggtctcggtggcgtgtacagttgaccttgaacaacacaggtttgaactgtgtgtgtccagttagaggtggaccttcttctgcctctgccacccctgagaagcgggaccaacccctcctcttcctcctcctcctcagcctactcagaagaccacaaggctgaaggccttcatggcgatccacttccacttaatgagtagtcgatatactttctcttccttatgattttttaaataacaatttcttttctttagcttactttattgtaagaatatagtatataatacattaacatacaaaatatgtgtgaatcgactatttatgttatcaataaggcttccagtcaacagtaggctattagtagttcagtttgggggagtcaaaagttgtatatagattttaaactgtgtggggattggcacccctaaagccttcattactcaagagtcaactgtaggtgggccctgggaaggttctcaatttttttttttttttgagacagagtctgtttctgtcacacaggctggagtgcggtggtatgatttcagttcactgcaacttccgcttccaggattcaagcaattctcctgcctcagcctccgagaagctgtgactacaggtgcgtgccaccatgcccggataatttttgtatttttagtggagacggggtttcgccatgttggccaggctcgtctcaaactcctgacctcaagtgattcaccagccttggcctcccaaagtgctggaattaaaggtgtgagccactgtgcctggacggttctcaaattttctgagatcagatggagtctgcccctccacctggcaggctgaaggctggggcttgcagagatgtggtgtctgttaccccagacactgcaggtgaccttgcctcttactaacttttcttatcagtaccatttggaccctcacactcatgaggatgtgggtgataatgtggaggttaaataatatggtcactgatgatattttctatactgtctgtttgcagggcagagtcttacagatctggaccacagcagacctgaatcaaataagaatatgcccagatatggggtattcgggagcagattatgaaacaaggaaactgaagtcctaagcagatccacagttccaaattctgaaccgcttgaggccacatcagatacaggatgctattatgctattagggctgtggcttagtacattatacagatggtggggaaaggcctgcaggagaaaggcctaccattcctggattccaaaaatagtggtctcctaagcaatcgatctgcttttatgtttaatattcatctgtttccctttcccagttaactcctagagccaaactcacggcccacaggaaggaaccatatcaacctgcacggtgtgcttttaatttccctcaccttgttccagcctctattttatgttgccactcttttctttcctttcttttttgctcaggcttttagtacatatttaacttttattttatgtctcctcctcttcaaaccaccttaagtcctttttggaatagagcagaacacaaataaaataggtgtcagatacattctctctgtgaccttgca

SEQ ID NO: 1885264 - DNA, 4001 bp, Homo sapiens
ccgtccacacacaacagtttgtagattcttgaggacaaaatggctcacacctgttttctacctggaagccacttcttcctcattgcgtagccctggtctctcatcctcattcatttacctgactaatttacactcttctgtgtgctttcatccagatacgctgtctcttcatagaaactttctccagtgctcgcctgcccacagacctggttagaggccccgctttttatggccccccggacttaaccacgtcacagaaatcatcacattgtgttgagcctcctgggtttctttggactggaagctccctgagggcagggttatcttgttcgtcctttcatccccagggcctggcataagacctggcgaagagctgctgcatgctaaagctttgctaattgaatgactgtgtgttatttcttaaattcaatgagaaatcactctacaaagtccaggagaatgaaagtctcaataaccgagctttctctcccctgagcacctacacaggaaactcaattacagttgcaagaggcctcgaagacctgcaggatttagaagaatccaggcatctccgggcccctggctggggcttctgcatctgacaatagagatggctttgctcaggggaagaatactttgggctctgactcactccatgagcactgggtaagcaacgtccaccttggtggctcttgctataatttgtctgtgtgttcagacccagtccttccctcccaaactgctgacagcggttttcttcggttatgctaatatcccccactatgttcaagttgagttttgtagacatgccagctgctctgtttctttacgttgattttctcgctctgccctaatatgtgctcatttcataggtggactctctacaatcaatcttttaattttttaaatgttcaagttattgagggacaccttcctgagaggcgtccattgtaaacgacagcttatcactgatattatcatatgaaagctattgttgtaggactttctctttagggcccatgtcacatggccatgagagattagggtcacagagattttgaagggtgagaaaaatggaatttatcgggccaaaaggaaaaaaagggaaacagggactctcagcaaagcaacagtcctgctagcgggttttcccgcctcagcgattgaatctcaggtactatccaggatcaggagaggccaggctcctcccctctgcaaagcgcgtgaacttccgtggctccaccccattctcccagggcgcaggccggttggggtttccccagggaccctttatacttggctgttcattgtggtgatatggttccaagcctgaagaacttgcaatctgattaagatctgaatgcatgaattaaaaaaaaaaaattatggtaatttaacataagaaatagtcttgaagcaaggggttatcacaagggtgcttatgacagcgttagttgtattagtaaaatatagaaataaccaatactagaatttttaaattacagtgaattcttttgctgctactgaaattatgctttcaaagataattaatgtttctaaggatagttcatttagaggggaaagtacagagctcaaattccaaataaaaggtcatgatttgaaattaccgtgggagaaaatgatatagatatgggaaaagaaagtgttttcaaggcagcaaagctttgtttaaagctaatcacagataacttctacttttattatccttatcaggatttatcttgtatcatgaatagtgagcatttgcctcgcctattatatctaattctgagttctgtggcttaaggtagcgtcaagcatttggaatggattcagataagggccagcccggctggtgccagagcagggcacagagcctgtttcctaccgatcctggatcctgacagtgcgactccgcgtgcggcttctccctgccatggtcttagatttcaacctgtctcagtgtatgaagagcgagaaggattcattccaggtctgtttgtgaatcttttctaagaagtgtttcctaggcaacttctagaaggcattaaacaataatgggttttagtttttcaagaaaccttggagatctaggacatcctgtctttaccaacggagacaccaaggcacagagattccaggggatgtgacggcagaaccatttccttgttcttgtcggctcgccttctgctggctgtggcttcctttgtgtctagcatgtaaccctgcatgcctattcaggattaagggaggccaagttctgcctcctggctggtgaatgccgggaggcccaggaggaagcagtagctggtgagggaaacgcgcagcagattgacagctgggcggagcagggcaggcctcccggagcacatttctgcacagagaactaggaagcaataaaacaaacttcacggaaagtggatcttatcctaaaaatagcaggtttaatgctgacatgcctaccttttgatgacttacgtttgtttttgcataattatgattactaatttgaaagcagctaggaaataatctaataaggatgaaaataataaaaatacatttagaaacgtaaattgacataatattatcatgttttagtcaattcaaatgaatatttccaaggaattcagtttataattacatttaggaaataatagtgccctaaacttttttttttcttttcttttctttttttttttttttgagactgggtctcactttgtcacccaggctgggatggaatgacataatcatagctcactgcagcctcgaattctgggcctcaagagaaaccctcacctcagtcccctacccccagtcccctaccctcactcccctacctccagtcccctacccccaagtagccagactacaggcgcaggccatcacacccttcaatttttttttttttttttttttgagacagcgttttgccatgttcccaggctggtctaaaactcctgagatcaagcaatttgccagcctcagcctcccaaaatgctggaattacaggagtgagctaccatatctggtaccctaaacgtttttgattggctaggggagataatactgagaggtgaagccagctggacttcctgggtcgagtaggggcttggagaacttttctgtctagctaaaggattgttaacacaccaatcagcactctgtaaaatggaccaatcagcaggacgtgggtagggccaaataagggaataaaagctggccaccagagccaccaatgaccacccgcgggggtccccttccacgctgtggaagctttgttctttcgctcttcacaataaatcttgctgctctttggctctgcaccacccttaagagctttaacactcactgcgaaggtctgtggcttcactcctgaagtcagcaagaccacgaacccaccagaaggaagaaactctggacacatttgaacatctaaaggaacaaactccagacacaccatctttaagaactgtaacactcaccacgagggtctgcggcttcattcttgaagtcagcgagaccaagaacccactggaaggaaccaattcaggacacaatatgatgaatggtttttagttgttgttgttgttgtttagtgatttttaaaattattattgtagtttaaattctggtatatatgtgcagaacgtgcaggtttgatacataggtatacacatgccatggtggtttgctgcacctatcaacctgtcatctacattaggtatttctcctaatgctattcttcccctcaacaggcccaggtgtgtgatgtccccctccctgtttctatgtgttctcattgttcaactcccatttatgagtgagaacatgcagtgtttggttttctgttcctgtgttagtttgctgagaatgatggtttccagcttcatccatgtccctgcaaaagacataaactcatccgtttttatggctgcatagtattccatggtgttaaagacttaaacataagacctcaaaccaccataaaaagcctagaa

SEQ ID NO: 1885265 - DNA, 4001 bp, Homo sapiens
tgtgaaaaacatattcatctcctgaaaaaaacaaatccaagctcctgttttatggtagacaggccctttatgttatgcaagcccaacactaccagtcctcctccttctacagatttggaaacatcactcgatagtgcccatgatatcatgagacctttaggccagttaagcaactgcaacatacactcggcccacagaatgtctaactggccttagtagatattaagatgtgaccacttcatggggcaggatgtgtttgtatgtgtgcctgcctgcatgcacacataggggaaagacaatgaaagagccagagaggggaaacagagggcacatatgtctgtactctcctcctgttggaagttgaaaacagcagccttattctttacgctaagtataggttccaggcatttgtgcagtcatattcaataatatattctgggcctgacagttcagatgtgtcagcatttctattaccattgcctatgtttagagttctttatgcagtcaaaagtgctaaggccaaaaattgatatgaagataacagaggcaagatataagtaaataaaccaaggaactaggcacttttctttggtatttgcattacaacataaatataaaaatcaatttaaaagtattgttgggctgatttctattttttcccttctttattttggtatgagaggtaaaaatccaagtttcaataatggcttctgagaaaattcacatgtctatgatttgggtttctaacagttgcttttaaaagtgaaccaatcgatactgtgtcctgagggacaactgggctgagcatctcatgaggaagtaaagggaagtgtagaaaaagtgaaagactaagatagactttcaataaataaaagagttcacaatgtagatgaagttgtacaacacatgaggtgttcttcaagaattatacaacagaaaaattgagtgtaaattcaattttagcagattaggttttattttaactgcatcgggaaaaccacatagataaaactatcttattgtttatcctttacaattttaaagcaaaacaaacacaacagcattttatttatttaattgtagtgcatccgtattttcacatattggattttaaaaaatctctgcttacaagaagaaacgaaagcccaaacaagaatgtagtatgtaagcgagtacaaaatgagatagagtagaaggcaaactgattacctaagtcccaagaagtcaggaaacaaagtgtaactcagatccaagcagggttaaccaggaaaggctgcatttctgtgtgtacctgctgctttcttcagcactgcactgtacaacattctggggcagcctgagagatgcagactatacaaatatagtctcacatctcaccaccaaagcacaaacattccagaggcatggaagccaaagtgtaaacacttctgcagtcaactcttaactattcacatttacagaaggaaagagcaaaggcaccactaatccaagaatagataaatggaaagatcactgagttagctttggaatacactcttgcatataggtgtatccatgttcaaggaactcacaagtctgttatgaatattagtcataaggagttagaaactttctccaggagtcagaaaccttttcaccatttattacagctactggaaatagagaattaactggacaatctcaaagacacattcttagactggtaactaaagttccattgactccaccagacaactatagaactatacacaattttggaatttggcaaaaaaagtatggcatggacaaataaccctgttcaaaattgaaaataaacagcaggaaacaatttttaagaattctataaaagtactgaaattccctttcaattgctgcaagttacctcatttcagttgtcttgttttcattgcctctctgctcctttcaatatattcggttttcttgttttcatctttaatacactgagctctctcttcatttcttgtgccaggtctgctgcttcaccttcatgagctgtcttcagaaccttgctctggatgttctccttgaaagctcttgtccatgaacatttcagataaaatcttatcaaagcttcctccgtcatcactctgagtcaaagaaagtcactctgctaaactttacaacagaacttttgctatgtgcacttggatggacatcgtaagcttccagggaagaattaaagagattaggtactccttgcccatgatgcacaatgacactggatcctttcgtaaacctaatttcacatttataatcccaggtcacatgcatcaaaaaatgagccaaaagtcatacaagccccttcattctgattcccacatatttagaatgagtgcaatataatataaacagcatgcgattcagagtctgaatttggttcctagtgccaccacttactggctatgtaatcttggaaaagatcctaaactcctctgagcctgtttcttaacctgtaaaatggggatacataatagtacctcttaggctggctatgaaaatcaaggtaacataggtagaatgtttggcacaggtactaaacgttagctaatattattaatgcttttcttaaaatgaacttattctaattattggcttttagcattatagtttagatgtccatattgaaccaatatctctatgtgatttttatcctgtcataattgaagtttgccactgttgatcccccctgctaagttgagatactaatttgaaatttatggccaacatctagcctgagtgatcatattccacccgtgtgaaattaagctccctcttaatgctgaagattgagtatttctctacatctatgtaatatagtctgttcagacttaaaatttggagcagtgctgctagatactgttgaatcgaacagagagggaaagggttattatggcaggaagagaaatgaagattacttaatgaacttgcatttcaattgagcagggtttttaatacaaaagaaagagctttttataaattcttttgctcagcaacaataaaaagaggaaaagagcactcagctgggaacaatagctactcagctcataaaaaatcattagaaggaacattttctttgtccaccatgcccagcaattttgctggtgggcaattatccagatcacttaggttccacctataaaaatgagtccagagaaccttctcaacttttccagctaataaattatgctaacagaagtcctcatctcttaatgtgtgtaatgccaccataaataaaattttgactcataattcatggaatgtttttgacaagtagatgatactgatccagccattaataggatttgctctttgggttgcttttccattagaagggacggactatgctgacacatttactcattcccatcaaatcctccttgcagccaggagcctccatctagttgatgactgttgggcgaggtgcagggtgcccgaggacagcatggttccactgtgtgaaattggctggtgtacttggatatttaacttttcactgcagtctccgtagctcatcttaagttggttgactcaagagaaacttcatattcttgacgtaaagagcctggctgattcatcttctcccacaaatggtattaaaccatattaagctaattgtcaagtgtgttcaattaccttatcaataaaagctcttttctgtgttcaaggttccccaggacaaccaaaagatttctgcacatgaataaaatatattatttctaatgatgctgctgggtgatcaatcataagcacgcccattaatgcaactcttatatgtcttgttaattaaaaagtatgaaggaaaaagtttcctgtttaagaatgtatttttttcagtttgaacatgttgcacattttaagaatgaatttatatctttactgcctgatatagtaagtattcaatatttgctgaatgtctaaaatatatttcataaaaagtaaagtgctttgaagactaaacaatgtattccaagcccaacatt

SEQ ID NO: 1885266 - DNA, 4001 bp, Homo sapiens
aatcagacactgcacatatgttgtgatagcaactgttactctttgtttattccctctataaataaactcggagctgcatcagaccctgtgaatatttttagaaagtttcgggcatcacagcggaattcagcatcttgcccattcataagctttctgtgcttcagaaaaccaaacacgcgacagattcccactgacattctgccagtttgatctctaaataattcagcattaaaatctggtcagctctcctacctccccgaaaaactcctgcaaacactgtgccaattaagttgctgaaaacagcagatttgcactgataccatccagataaagctgaccattaaatcgcaatttaacatccccgggcagcagtggctgctgacagcctccaaagcttgcaatctcatttaaccccctcctgtcaggagcaggcccgccctctcagcataatgccgccaaattagacctgacagggcaacaagagaaagaaaaacctctttagcttaaaagtcaggccacagtgggcaaccctgaccttcagcgtcccctgctcagccccctgggttctccagggaccccggagacatttacgcagagagaggaggagagagatggacagaggggagtggggcgggggccccggccacaaggcacttggatttcccagggggcaaattacagagaattttcctagacaatggaagaaaatttcacctgggctttttcaagtctttctttggtaataaaagatgaaccctgatggttctgttcaaactactgtggctcaatatttccctgtgcctgtagtgccctctgactccgaagccaggggacgcctctgttggaacacagagccccctccatgccgcagacgcctgcattttagatgaggccatcttagctggtggctgcagccttcaaagccctccccataactggcatttaccagagctctgttttcataaggaaatcaggctgcctccgagacccctgaccacacgcgctctcgccgctgtcctttccacccgctccacctgttctgctaagagagggtgcgggaaaaggaacggaaggaggggagggtcccggcacagccgatgggagacgattttcacaacagtcaggaggatttctccaaatccagacggagctactctcagagaaacggctaccccacgtttcacacccgacaaacgaggacagaggcagttgtaactaaaatgacttccatgtatattctagttcaaatcagtcattaatctaacagagattcctttgcaaacacacactttttgttttttctcctgtacaaagaaaaatgctttaaggccaaaagttagaagggtgtcacccatcagttttgtaacacatcctggaccttaagaaaaccgaaggcaataccccactctaaaatcctgtccgtctcttcttcctcctcttcagtcctctccttgcctgaatttcataaatagattgtgattgcacaagtcaaaaacttctcaaagtcgagcttaaaagagacagagagtcagagacagagagagagagggagagagaagtcctcctcctcctggagtcactccctctttaggcagcggttcaacacctgtaagaaggcctttttaaaaaggagagaagagccaagctgcttgcaggaacagagccccaggcgtcagcgcagtctgctgcccacctctgcggtgccccaacctcctgtgacttaccgtccgggctcccagggccacaccgcaggaaggacttcctagcgctcctggaaaccgctgccctccacgccgtggtcgcgacctgctgcagaggccggctctcgggggctactgacccactcaagttccgaagtctcccccctccattttttcccctccttaagttagacgaaatggctatagcagaacccacctcaatgtttatttcgacttcccggggctgcagtggagtgaagtcctgcctgcccacgcttttctgcaatggagtggtttatttaatttgtcagaataatgggagcggctgaatgagagacagagaatgcagtgtggtataaaagaaacaaaggctaaaagtaccactattttgattccctttttaaaattacttccaaagtgtggtatctattgtgaagaataatgctgaacaaagcagtgtcttggcaagattcacagagcttattcacccacagccagttctgcctgcgcattcagaggtaggacacacttataaatgatgtattggaaggaccatagctcctattgtgttctcagtgtaaacaaaaaggcagacaggggctgaatggtgtgtaggcagtgaggccacgctgcagccagccatccccggttctggagagggaaaactgaagtcagcggaagccccagcagagtcagtttgttgaaggctcatcccccactttctcctctttgtccatcaaccctagtcaggggctggaaaggcttctagaaggttctcctgggaagcactgcctggaacatccctgccactcacgctccaggtggacggtgcgtcctgaacctgacgatttccagaatctttcagtgagaggacactagtctcccccgataacagcagcttccacgagtttcagcaaacttcatgacggcctctgtgcactgtgcgcaggagctgggggtgggttcctgcagcctcccaggccagcccctgacagctggaggaagttctgttgttaccgaggcaggcatgaggctttctctctggccctagaatctctcattctgaaggtcctgcagtggatccacctggggcagctggattctgcattcccctgcaggtgggcaatgctttctggtttaatctttcagctcagagcctaagttttttttttttttttttttttttttagacagtttcgctcttgttgcctaggctggggtacgatggcgcaatctcggcttaccacaacctctgcctcctgggttcaagccattctcctgcctcaatctcccgagtagctgggattacaggtgcataccaccacgcctggctaagtatttctttagtgaaacaacttcactgcatttgtcaaaaaagggccctgctgtttataaactgtaaacttcaacttcccttgtccatttgatgtaaaagcacattttgaatattggttttcttctggtaaaacatttttagacactcttgccaacgggcagaaacagtttagttctgcaactctgattcttgtcctgttgtgggtacacacagagactgctgtctctcacccacgtgtctgctcacattcctggggggagacctcaaaccatccccacccccgtaacagcactcccacggtggggatggaccacacctaaaatggaactgtttgcctgcttagtcaggaaatataccgaagaagggtgtggggttttttgcaatgcaagttgctgtttgactgcacggagcgttttggttacgggagggaagcggccagcatggggctgtgtctgtggcgcaggatatgactccagtgctcctggtggcttgcaaggatgcaccaaggcctcgctgtgtcccaagtggaggctcgcccaggccccgtggtgcagaaggtcccacagtagcccacgtttgaccgatgagcagaggcttcccgaggccacatggcccagcttagcagggattgtggagcacctggccccagcactgtaacagcctgtgtttactttatctagacacctggcaccacgttttcattttccattccaacttagcaaattaatatttcttaccttaagctgaaaaacccaacagcccatacctcttgcggtgtttctgccatggcagcacacggggctctaatgttttaggggtctgtgtacccttcgcccactagtgtgctccccgcctgctgccagtgagtctcggtgcgactgagtggagaatgaggccaccggagtttctgcagctcgggacgcaccttccatcacgtgcacgtctcacaggaccttcctgtgcag

SEQ ID NO: 1885267 - DNA, 4001 bp, Homo sapiens
tgactttgagaaataaaatgtcctcattctccattttctgctatagttgttgaatttctataaggagattatagtcaataaggaaattatgtccctaagctagtaaccttccagctatgtgactttccctcccatgagaagtcctgccaccaagagccaccttggtgttcagccagccttcgacactgtggagatgcaaggggattgcagtgcgtgtgtgtgtgtgtgtgtgtgtgcaagtgtgcaactgtgtcatatgtaagagtgaatgcctgtgagtctgttgcatctgtgaatcgtgtgaatctgtgaatcgcatgtaagaatgagtgtgtgacttggatgtgtatgtgggagattgattctgggaatttgtgtgagaatttgtgtgagtgtgtaggaatgtgtgtgacacgtgtgcaagagaatgcatgtgtgagaaggggaggaaggccagaacaagccaaccgtcactggctccggcgctggccagaaccactgggcaccctggagggttctttgtgcaggaaagaggtccaacctgtgcccagagcttctgtggaccatcagcttcaccccccaatgatgacctctgcatcccctcaacagacagattttgaaacccacaattagccaggcactgtccccttgcccctggggagacatcagtgacccggactggccatcagtgacccaggctggcaaaaactccctctctatgcaacttcctgggattcccctcccacagccacatctccaaaaagccggcctctagcttggagccctgtccctagcctttggcagccttgtctgcaggtggggtggcaggagctggggccagaggatgggggcaaggctgcccaggcccagccaggggctggcacacatgaagaacctcctgctgggtgtgatctgtgactttccagagccttcaggccacatcatacaatgctctaggaaggaaacaaaatggtgtcccagttcaaaattatccacatttaccaagagtcccccgcttaccccgcccaccccgtagctttttcctgggtctagatggcgccactttcaatcccgccccccaccaaaaatgacacacccaataaatagatttcctccatgtatttccctgttgttgtgtttacaaaaacattgttggttgcactaccccttcacatcctaccccctccttttgtcagaaggagggcaggcatttcgggggcctgggcgctcaaggaaggcctcgcgggtgcaggagaggccttggggtgtgcaggggagaacctgcccctctgccgtcttcgaccttaaagtttagtcctcggctctggtctggtggctttctcttgccttctcctaggaagttttcccagcctcagatgcggcagagaggggacagcagcttggagtcctgtgaggaggtggaaggacacgttagtggagatcctgggcctgaggagaactagcattgctcaggggaggaaaattgcctctgctggcgcctgcggcctcccacgaatctgagaaacactactccacccgcctctgcgtccctcaggccctaacggtggtttgcgctcctgggttctagcgcccttgggtctcgctcgctggtgcccgccctgcacccggggcatcaggagcacccctccccaccattcagattctagaggaacgagaccacttgggcaggtgcgggtaggggaccgggcgtggaaagcgggagtgcaagcaggtcctcaagtcactgagactctcctcaccttggggtggggactggaagtttgtgagctgcttgcaatcctgcagtttgaggagcgtggcctgatgttttaactgttttgctttagggcgcgcagcctctctgacatgcattgttgtgagttcaccctaaagggtatgacttcagaaacgatcactgccgcgatcattaaaacagaagatgatgtctatgaaattcactcgacttggtatctgggcctctttcagtgaatttaaactcgcaacattaaagcaactcttgggagaaaacgggaatatgtccaaatctcaggtcattcaagtcagacatccgcgctcagaaccccaaggaaggcttttaaagttgcggaatgcaccagaaggagagcagggatcccccgaggccccacttgcgaaagacccccctccctgggcccctcctcctcttcctacccctaccaacgttggagggggtctggactttgaaacttgtcacggggaaaagaaccttcgccgagaaggctgctaatgaattcagactgcatagttctcaaaatctgatgttttgcaatgatgacattagcgtggcggccgagggtccgagcccagaaagtctgcgcagctgctcggcgctttgagcgcccgggacaatgggcgcagtgttcggcctcggcctctccaggccatttgcataccccgttctgcctgagtgaccggcggagctgcggcagggagcagcattgtccacgggtcacttcaagatgagcgagatgacaagagccaggtgagcgatggggcgggacattccccaggtcacgagaagaaaacgcggggagagccttggccagagcttgggtttgttgattctcgaggtgggatttgctcgtttgctcttaaagcactcatcagatgttgtagggggaaattcgagatttaaagatttttaacaagaatttacaaagcctcattttgggagtaatttggggtcttcctttttctgaaaaatccagtgatcttatggcattttatttcattgtattctttcactcttcgaagtttaagagttccaccgccaaagggaagcagtttcattctctatagccaaaagctgtcaccagttgagtctgaatttgttattttccagaaacaccattttgaaaagttgcaactgaggccccttggccggcaaatctgagctgcagaagcgcctgaattccggacgttaaacctccaatcaccagccagggcagctccggctgggacagcgcgggcgcgcggcccctccaccgccgccaaacggagcgcgcttgacgcccccgttttgacttcagctcagaaagacaagtctttgtaatgcaagttcctcttccctagagagttgacgcaccacctgccaccatctctacccctagccctggagcggcctgcagaactgggactcttctcttgtggatttcaatcgtggggcgtgtaactgttgccaataattttcagagacctggatccttaaggaggggatcctgggggagggacctgaggtgggaacgggtgggtgggacgaaggacgaagccagaaaaaccgagacaacaggagggaggcaagggaccgagggcaacgtttctcccaagtgaaacacgctgcattccggcaccgacggctcctccggcgcctgggcccccccaggccccgccgcgatgcacccagggcctcccgaggccgcgctccacccaggctgctccgggtccgcagccccacaggccctcctcccctcacccctcctcctccctccgcctcccgcacccgcgcaccacccactcgagcgaaaagcaagtcaagcaaatcctggggaaggcgccccacagccctctcccgcgggcaccaacacctgggcacaccgcgtctcaggcggtagcggagctggcccacaccggccccgccagcgcccgggaggcgtctccaggtccctacccgcgttcgctgcggattgcagcgacgctcatctcgggaatataacgattaatccaaccgcaggtttccagataagtgattgtgatggagactgttggcgagaaaatagacaattatccgctgttagctttacataaagatcgcattaactcaaattagttatcagacaaaagagcgtcggcgcgcgcgccctgcctgccccgcgccctgcccgcggggacccccgggcacaaccaggcccagggcacggcaggcagggccgaggcctcggcagggcgcgaggagagggggcatg

SEQ ID NO: 1885268 - DNA, 4001 bp, Homo sapiens
ggatcatgaaagcatagctattcaagtaaccaaataattacgcaatcaatgtttttcctcatctctaaagcatagtaatggactgattattttaagaatacaactcggtgacaagtagtttatgtttaactcagttttggtttgttgtttgttaaggccattgcttaggataatgaaaacaagaggaggagaaacaagaatataaacaagaaacagaagcagcagcataagaaaatgaagaggaacaagaagatgatgattagaagaagaaaaaacagactgaaagaaaggaagaacaggtgcgggaattacaaagcctattatgataccttatttcccctcctgatttatgaaatttgaaaaaaattcaagacttttcacaacaaagccaagctaaaagatacaccaatagtcacccgctaaattttgctaagaataagacaatgttgccactcacacctggcccaggcaccagcaggaggagggcacttccagattctgcaggagaaggaggaggactcctccttgccatggctgggcctccactgctgccacctaggcccacagtacagcacccgcagctgcctccccacttcaggccaggctgggcccggtgggctccacagcattcccactcccacttctcggatcccagacttgctgctgccgccaccactaatgccaacaccaacatgagcaccgctgctgttgccctcaatgcaccggcccaccctacaagcctcctaccacctccaggaggcccccgcagacactctcctaccactccaccactctggtcaagctgcagtctctgtctctgccaccaactgcagcgaggtgagccacagaaccatgccatctgcaggctccagcctccagcgtgcaacagatgactcctccatctcctggctcgaagcaactgggtggtaaaagccagacgtgcctagaacaggatgcagggagtggtagtgttagaggctcaccttgtcatgctggccactgggtggcaggggctggtttcatcaaaggcacaactgggacctggggtgggtgtgactgcctttgctgaaaccggcccctggcgaggtccagctggccaggaactgctgggcccacgctggctgcactccttggtgagcaggagaagcagaaactcagacccagctagctctctccaaccaagtgccagttcctgtttctgatgcctccacccacaggaccctgttcccccgtggtgcccaatactccgtgcccaggggtcccagattgtctctgcaacacagtgagaaggggcaggcccgggaaccatggcgggtgtgggggccttaccctgctgaggattcccaaggaaacattgtgcacctgccacgctccagcatgagcaaacagaggttgccctctagaatctagagtctgggaagaggaggacggccccttccttggaggccacagctatcgcagccacccccgtagcccgttgccagaagcagcagtgcagtgcaacccccaatagtgcccccccaccggcatgccacagggcatgtaaacctgatagtgcccccaaactgccccactgcccccagcagtgcagccagggatagtgcccccaaccagcccttgctgggggtagtgacagcccagatagtgcccccaacctgcccccctgccatgacagtgcaggagctgatagcacccctaaccctccccctagctggcggtcagcccccttagtacacacaaccacccccaccaccaggcagtatagcccccaccaactccgccaacccatgcccccgataccccaccggcaatgtgaccttgatagtgctcctacccagggtagcgcatccctggatagctcacctaccctgccacctttctaccatgctggccaagctgcaacctccatcacctccaccaaccgcagtgaggtgagcctagataccacaggctcaagccgccagctcggggtatgtggctcccacttcctgttctctaagctgagctcccagcttcgattctgattggatgagagcaagtcttaggacaaccaatcacagcatgaaaataaagtccaatcagaataggcctagaggttttctctcatccaatcagaatatgtagtccaggaacctcatttgcataagctcatgtataaggcatgcagaaggggcatcaggccattccaggctcttgtgtggctgcctgcgcagctgctccgtgccaggcttagaggaccaggagaaggggtagtcacttgccacagctggaggctggagcgtgtggcaccacggctcgcctcgctgtggtgggtgctggcgacagagacggcagctcggctggagtggtaggagggggtacatagtttttgggtagatggagggataaagagggtggctagcagcaaagggaaaagaggatggcaagcaggagaaggcattgcaaaaagacggtggggaaaagatggttgaaaaaagtttttgggtatctagggggtaaaaaagggtggcatgtagaaggaggaaagacagggtggtggggggggaaaacggggacaagtaggaaggagagaaggtttgcaaaaagacggtggggagaaacacggtgaggagaacagaaagactggggaaagaaaagatgtgtaaaaagattttgggtagatggaggtgggaaagggtggcacgtgggaggaagaaagagggtgcagagagggagggggaagacagaaggtggtgagcaggagggagagaagattttgtgaaaagtcggtggggacaagatggtggggaaatacttttttttcagtagatggagaaaaaagggtggtgatcaggagaagaaaaaagggtggcgagtaggaggaaggagaaggttttgcaaaaagacggtgggaagaaaagacagtggggagaaaaaactgggggagaagcttttgggtagatggaggagagaaagggtggcaagcgggagagtggaaggaggattgggaaaacgacgatggaaaaatagttttggggtagatggagggcgacaggaaggtggcatgtaagaggaggggcaggaatgaggaaaagagggtggtgagcaggagggacaaaagagggtggcaagcagagggagacaaggttttgccaaaagaccgtgaggaaaagacagtggggagagaaaagtttttcggtacatggagggggaaaagagggtggcaagcgggagaggggaaaagaggatggcgagtgggagggagacaaggttttgtgaaaagatggtgggcagaaaagacagatggtggggaaagaaaagacagacggtgggtaaaatgtgggtagacgcagcgggaaaagagggtggcaagtggaaggagaaaagagggtggcgagagggaggagggaaaaagttggggaaaagacgatggggaaaatagttttggggtagatggagggcaaaaggaggatggtaaggatagaggaaagaagagggcgagtgggaacggggatggcttagtgaaaagacggtggggaaatttgcgggggtagatggaggaagaaagagggtggtgagcaggagtggggagaaggctttgtgaaaagacggtggggagacgtttttgcgtagatggagaagggaaagagggtggcaaggaggaggggggaaagacgatggggaaaacagtttttgggtagatggaggttggaaaagcgggtggcgagcagcaggaatggcgagaaggccttgggaaaatatgagggaaaagttgggtagatggaggagcaaaaggagaatgagagcagaagggagaaaaagagggtgtccagtgaggggggaaaagtttttgggtagatggatggcgaaaagggtggtgagcaggagagtagagaaggctttgcgaaatgacagtggggaaaaatagtgggagaaatgttttggggtagatgaagaaaaagggtggcgagagggagggggccaaaggtggttgagaaaagaaggtgggggacaaaattttt

SEQ ID NO: 1885269 - DNA, 4001 bp, Homo sapiens
aaacagatagaaaagccatgtcatttacctccaaaagtgctgtgtgcgtgtgtgtgtttgtgtccaactcaactaaggagtttttattattcaaaatacaaataatcactctccccaccccatggttctttgtattttgaaaagatggggaaggctggtggtgaaaaatcagaatgtgtgtattttgaaaaagttccctgaatgagtctaaagtccattacttcttccctttgtcctagaaatttgacatattattatttaattaattaataatatgaaaattataatatatctcctattaagaactaattgaatgcagattgtctagaagtaatccagttttcctatggattcctgtggccttggtcaacagtgtaaaccttcagtgtatactaatgtagttacatccttgacacatacattgatataatatacaaacatacactattagagtggcatgtagcatttgcagtcctcaactatcaaggtcctcatggctatacacaaggtaaacccattggagcagatatggtaaaaactcacaggagaagcacctaattattataatatgaattaaaccaaatacaaaaaagtaaaatactttgatttaaacataaaaaaatttaagaatgcaaagaaaacgacatgaccccaaagaacaatgttaaaataaaggtgatacaaactttgattcaaatatgaatgagatttttgtcatattatcccaccaatttgcatacctaaaaattcatgtttaatttcaaaactcttttcagtttttgtgactgtacaatatctgttcaagatacttatgttaacaaatcggtcagtcagtcaaataaatagtcaaaaaaacagaaaagaatttgaatatattgatgaactacaactccatagagactatgctaggtgctttgaaatgtcatgtttcatgtaatcctgccaacaagttaaacaagcccattttatagatgagaaagctctggatccggggagttgaaacacagatgcacaatttcattgacctaatagcaacagactcaaaattgaaaaccaagtatgaatgctctaaaatgtttattcttttcactattactatatatcaagggtttgaatgtatggtccataggctgaatctagactgctttaccctatgaagtaagaatggtcttatatttttaaataatttcttaaaaatgcaaaagaatactatttcctgacacattgaaattcagattttaaagtccataaataaagctttattgaaacacaaccaaaaccacttatttaagtcttgcctctggctgttcttgttttttgtttttttgagactgagtctccatctgtcacccaggctggagtgcagcagcacgatctcggctcacagcaacctccgcctcctggattcaagcgattctcctgcctcagctcctgagaagctgggactacaggcatgtgccatcatgcccagctaatttttgtatttttagtagagatggggtttagccatgttggccaggctggtctcgaactcctgacctccagtgatccacccacctcagcctcccaaagtgctgggattacaggcatgagccacagcacccagccacctctggctgttttcatgctacagcattagagttgagtatttgcaagggagattgcatggcctacaaagctgaaagtattcatgagctgactcctcacagaaaaagtttgcagaccccaggtatatatttttacctccccattaatgcatgcttgtggtcatagaagtggtctaaacacaaagtgtatccacaaaacagaaagacaattttattccaaaactactgatgagtaatgtttttaaagaacagtaatgcatcagaaggacaactcaccctgcattttcctttccatacaatttagagttcattggcttgaaagcttccttgaagtcttgcagcacttaatacatgcacgtattaaacctctcaagtttacttggcccgagtgttgtgtaaaagatcttggaagcaatttatcacagaagaatttgtcactgattaactcttttttagatgtgttgtggagtagtaaagtgaagtcaagggtgataatgctgacagggtatttaccaagtggtggagaatctgccagctggtgctaaaaggatttgtagtcttgccacatcatgtccttttctgaagcccaaccctatacacccccccaccccagtaaccagtttctgtggagtctaaagcttataaaatttgaggggccctctttaagaaaaagaagacaaaactacaaatacaaaattagacatatggtctcggaggagctcgggcaattgaggggtcctgagatttaaacttcattcgtttcaggagaataaacttttacccctgcaggaaagagagaggctggaggcaccgtagacagggagaggccatattcgtccacatgctagccatgcaaaaacgtcaatttaatagattccattgtaaagcagagcttccagatttcagtagcatcccgaattaggaaagcacatttcatgtaacttcaatgtcttcagcaagtaaagtcctgctagatttttttttttaattttctataaaaaaaaaaaaatcctgctgaggaaaaaacagctatagtagctcacaaaacacatggctgcagaagtgtaattcttcccaggttcacttcagtccactcctgctctgctttcttctagtttcttttgaggtttaaactcaaaactacaaactaaagcagctgcatgctctcctctgggctcacagcatgtccaaagcttcagagacgcaactcagtccctggacagcccgactcctttcgcccacttcagaacaagtgccagtatctccatgaacatttcctatcctcttttctctactcacttccagattttttccttcactttcttcacctttgattccagatttcttccaaacacaagaaggtttcttttttgtgggaagtagttgactagacactaagggctgaagccagaataaaataggaaagaagggaccagatggtgcggaagtaagaattagtcctaggtctagggggaagccagatctgaaaaagcaacagagttggaaggtctgaagtaaaagaccccggtgatgatcctgctgactgatatggtcactgttaccaccaggaaagaagatgaagggtttctgctgcctacctgactttgagtgaagcaaatgctttcaaatgtcaaagggaagcatgcgataaaggaaagatgcaggctgaagacttgacgagaatgcagcctgagtaccactctctctattaccagctatgtaagatctcaaaaatcagttctttttaagttgatagattattggtacttattcctcccagagataaatgttgtctataagaagtgagagaaagggtttggagggctcagtgccattcctggtataatgatatttgaggacattaggtaccacagctttcagaatgctacctttccttaggaacctcttcaaataattacctggcattcccaggctttctgatttacttcctgaacgcagtcctaaacacctgcccaagatcatgctagagacccgccctgcccctcaggattctgatctgtgctgagtatcttccatttgcactccgatttagaccttttcttgactctttccaccccgctcagcgctctgctggccgcattcccttgcttgttgagttcaccactagtcaccatcagcaggagatggggagtgagaggatatttactcccccagcaatcttactgctcagaactattcctctgtaaccacagctcctgatgggtgacgcctcttgagttgctccaggtctgtctgggctccagaagtgactctatttcctcctttagtcccttcaactgcttcaactgctattctttggacacctccctcgatacccatttttgttctctcaagcagtcccttcattactgcctacaatttttaaacatagtc

SEQ ID NO: 1885270 - DNA, 4001 bp, Homo sapiens
aaaggaagcctgtctaggtgttttgtgttgtaaaataattatactagccatctggttatctatgagataaatttttaattgtttattgtcaataactacaaaatgtgaagtcacatgagaatgctaagtgtattatttttattgtgtagatgaagcttactgagtcttctcctgattgttctaaatcaatttctgcctgactctttgtgaataggggagaaatgaatcttttggaaggtgcattaactctctcaggttattgtcattctttgcactgaaaagggacttaagcactgctttctcccttccggttagaggtgttggaaggtgaagaactagggattagaaagcttgaaaaacggagccctggtttgtccattttctagctgtgtgatcttgttcagtttgctaaactttgagactctcctcatttgcaaaatcaaaacaatagcacctgccctgcctatctcacagagtaattctgaagatctagttggatgacacatgtcttcaggttgagacctgaagctaggcatgtctaatattctgcacacaaactgtaatgaattaatgtaataaatcaacaggggcttcagtgaggcagttccctgcagtccatgctactgagaatagatgattctgtctctcttaaactttccattgatcaaggacgatggtgaaatatttggatttctaaagcttcttctaataagtaataactcttaccacctgcctattttgagaggtgtggagagagtgtagggttattcaggcagatatatagatgaagaaaattagattgtgcatgacccaatgaattacaagtcagaccttggacccaggacttctgattccaaggtgagtgttacctcctttacagcggattatctctgcagacagtatgtaaaattaatggaaatgaggagatgggctatgagggaaatgtgtgatcaattctggaattgcagagtgcagatgtcaacaaagcaggtaattcattaaagaagatcaataggctgaacagcatggttgccatgagatggaccgcagatcactattttgtgtatacaagagatttggctatattgtggatttaaaaaaaagtaaaacaggctgagtgcagtgcctcgcacctataatcccagcaacttgggaggccagggcaggtggatcacttgaagtcaggagtttgagaccagcctggccaacatggcgaaaccctgtctctacaataaaaaaattagccggatgttgtggtgtacacctgtaatcccagctacttgggaggctgaggcaggagaatctcgtgaacccaggaggtgaaggttgaagtgagccgagatcacgccactatactccatcctggacaacagagtgagactctgcctcaaaaaaataaataaataaaacatactccttttagttgcatgcaataatgattgttgatcatttgcaagtgatgcttccatacttgttcccttgataaagtaattgatcaacctatggtcccttcatgccttttctaattgatgctgatggaaaagctgacaacaataagtgatagggttattgtaatactccatcaagatctttgaggatagagatggattatagtgctttaaacatcactatagatcctgaaggcaatcaataaacgctactaaggatgggaaagcctggtggactgctgagtaagaggtagatgtgaatattttggataaagggaatgtacagaatgtaggaaatgctaatacatagttaatgcataggcaatagacacagggcttgtaatgtatagacaagcacttaccttgtagaataatggtaattttgatgaaggataaacagcaattacttttaatttattggtatctattggtcttccaatccagtgaatagtctttcagagttcaaatttgggctgcattatccatcccaaggttaaattttccactgaatagcagtgaccccaaatcaagctacttttcacatgacatagtcacgcactcggctgaacactcctgcagcacttttcacatgcctctgttaagcagttgaggccacagctctgattgagatgcctcagagaaaggttattaagtgagaagagtagatggtctaacatcaagcattaaggcaccccaacacttataggctgtgtaagtgaggatttgagaggtagagccaatgagtagctggggacaggaagacaattaggagagggtgacatcactatagaaatccaaggaagaaagtgtttcacaaagaagggcgtggccaacagggctgagttgtcggggaagatgagggctgaaaaaggtcagttggctcaagtaatatggagaccactagagaacttggcaagggctgttttagtgaaatggagtgagcagaaatcatatctctgtgggttgagaagtgagtgagggttgtgtaaagtaaacagaaagtacatacaacgatctcacttgcagttattttagaatccatgatgccatttttccatgtattcccctagagtcacagttaagacaagctgtgaaggtttccatccagaaaggcctcccatccatctggagctaatattatttccagcactcagggtagctcctgagaaccaactaatcctgttgccagcccacctggtgtaggatttccaagagcagccggcttcttccagagaggcctgagtcctccaatccatcagagacttcagagtccaggtctgtggacatttctaggtcgtttctttcccccatgactcatccatgtctttcacacaaactgaacaaggtcctctggtcactgtcctcttcacgtggccatgtgcttccttctccctggacctgatgtaattgctcttcttctaaacttttccgctgtgctctgtggaacctctattagttgcaaacaatttcatgcatgctcttcacctagttacagaaagtttcaccatttctttgctctcactgaaacctttgctctcaagtgtatgctctcatttggattggggtcctccttgctctcagagtcccttgcagatcttcgctcattcaccatgtctcctggtcacttcccttctttcagggagcccctggacctgctgccattctctttgtctcaagcgggtgtgactcaccctccaccctgggatcttaccttcttttctacctcaacagaccaggacatggcaggacccaccatcccaatctatcccccatctgaccgtttcttctgccttcctgcttccaggcccgacagtcctcaacctgggctgctgcagccttgggaatcagcctcctgtttctgcttttgccctatatggcatcttccatcttccatgacacccagaagaatgtcttaaaaatgtgtcacattggccaggcacggtggctcacgcctgtaatcccagcactttgggaggccgaggtgggcggatcacgaagccaggagatcgagacgatcctaactaacacagtaaaaccccatctctactaaaaatacaaaaaattagccgggcgtggtggcaggcacctgtagtcccagctacttgggagactgaggcaggagaatggcatgaacccgggaggcagagcttgcagtgagccgagatcatgccactgcactccagcctgggcgacagagcgagactccttctcaaaaaaaaaaaaaattgtcactttgtgtcacacccccacttaaaaccctccaggaacttttcttcataccaagactgaactccaaagccttaccattgtctggaaaagcctccagggtaggcccctctctgtccttatctcctaccacatccaccttgctcaggctactccagccacccccaaatctaccaagctcattccttccccacagcatcctcttccagagagagctcctctttcagtcatccacagagctcaccccttgctccatccagttccccactcaaatgccaactctccctggtcactttaactacaagagttccttcctctccctgtccc

SEQ ID NO: 1885271 - DNA, 4001 bp, Homo sapiens
ggcctggcacggtggctcacacctgtaatccctgcactttgggaggccgaggtgggtggatcacctgaggtcagcagtttgagaccagtctgggcaacatggtgaaaccccatctctactaaaaatacaaaaattagctgggcgcagtggcgcgtgcctgtaatcccagctacttggaaggctgaggtaagagaatcacttgagccccggaggcagaggttgcagtaagctgagactgcattgcaccattgcactccagcctgggcgacagagcaagactccatctcaaaaaaaaaaaaaaaaaagagaaaaattttaaaaggcaatataattaaaaaaccagaaataatatggtacaattatttatataacattacattgtattaggtatcatattaataaataatgtagagattatttaaactgttaggaggatgtgtgtaggttatatgcaaatactatgccattttgtatcagggacttgagcattcatgaattttggtatctgagtagttctggaagcaattcccccagatatagagagaggactgtactacagaagtgaaaatttaagcatcataggtattttaaaaatagtttgaagaaaataattggtagtaaaattgcatctatagattttgaaatctaagtacaaattaatagcattaaactaatgtctgagaaatgttcttcacattgcattttatgcttccgctacaaatcccagtactaaaacttttaaaggcatttcatattaactattatgcagaaatatttttatggcattgtggttcattatagtggttatattgtcagttttcaaaaaaataaggtctatttcaaatattcctggcatatatgaaactttagccagagtaatttttctaattgttaaaagggtttttgccttttgtcagcaagtactatagtcaaaatatttcaaccacagattcttcttattccatcagaggacagccaagtatctgaatgatacctcagaggtacagaaaggacacaatagcagtcagcagaaatattttaatctactcaccagacagaagtctaattgctcccctatttcatttgacaaccagaaacactgttttgagaaaaaattttgtgggtttctttttatacaaacataaccaagtgctagttccccacctaactttcccataaaattttacctggttgatttctgagcagtttcattagaaatctaaggacatgacagaatatcagtgaagcaaaatcagcataatcacaggataaattaaagtaaaaatccaatacttcagttcaaggcaattcagcaaagttgtaccatgacctgcccagaaacaaagcaaaatgaaaataatcccatgagcctgtgttcctggaaaacttagcagaagcaagatcaccatgagaacgtgcatattttggtctgggactcacccaaatagtgtaataatgaaaagtttgctaaaaaaggagattacttcaggaacttccagtgacaaccccggttttcctctgggagagtcaaagcaaaaccagcagcagaacagtggaatggggcagtgctcctaagctttttggtcttgggaaatctttacctgtcaaaaaattactgaggatcagtgacaacttttgcttgtgtgatttttatctatcaatatttaccatatatcagaagttaaaatgaagaatttgtatactcattaacttacataaaaataatttttaaaaccctacatgttaacataaataacattttataacaatacttcccagaaaaaatacgttaagaagtgtggcgttgtttttaatgtttagtgttttccaatgtctttacttaatgtctagcttaatcaaagataacgagatattcgtgtctgcttttgcatcaaatctattgccatatgccgtttggctgaagtacaggaatatgaagaaaatgcagcctcacacagatgttataaaaaggagaataacctttttacaatcttttttttaataaccaaaggtatttgaataacctttccagaaaactgcatctatccttatttgatcctattccagtgctcaagtgtcaggtttttttttttttttttttttggagatggagtttcactcttgttgcccaggctggagtgcagcagcatcatctcagctcactgcaacctccacctcccagcttcaagcaattctcctgcctcagcctcccgagtagctgggattacaggcatgtgccaccacacccagctaattttgtatttttagtagagccggggtttctccatgttggtcaggctggtctcaaactcccgacctcaggtgatccgcccgcctcggcttcccaaagtgctgggattacaggcgtgagccaccgcaccaggccttaagtgtcatattttttaaaaagattagtgtgaaatctgaaaccctagcaatgaagttttcctactgtgttacattaaaacctattgatctattttactcttcaaatggatgttttctcatttattattttgtaacattacgtatcagtcatttggaaaatagggttcactcagttatgcagatcatccaaatactgacacattttttatacaaagtaaaacaaaacatatttgttaatatcatcactgatctcatcagaaaagtatctaagttttggggagccctaaagctcacagttgtggatacaagttttccaaaatacgaattttcacttaaaagctcaaattttcattggcaacaaacatcatcagttgttttcactgaagtggcaatctggtttagttcatttttcaaaaatgtctgccaaatatccaagtctgaagcaccatagtttgtcaatctatcacgtaaaaactgttcaatggaataaagtggtggctaagttcagctgtcaagtcaaacaatagccaagtacttttcctccagccaaccatcatactgatcggaaagcacaatgttacagcgctgtatgcatacttcctgctttgtcacataaaatacattaacaagatatggatgctgggctctatgactcttgcctgtagttccagctactagagaggctgagacgggagggtcacatgagcccaagagtttgaggtcagcctggtcggcatagcgagaccctggctctaaaaaggaaaaagaaaaaaaaaaattttgactcaagggtaaaaaagtaaaagtatatcatgccttagcattattatgaaaacagttttgactcacagatcccttgcaagtctgtgacactcaggactgcacagaccagacttctgagtttggctgggctaggaggagagaaatggccaaggacagcaggatacactttgtatccaccagctgccaggtaccggacaaaatagaaacgatgttctacattcattgtctcatgtggtagtataaatccaaaccccttctaaacaattatttgtgcctccattttaaaggcaaagaaataggcttacagaaagctgtagaacagagctggaaactagtctgttggctccaaaactcttgcttttttcccaccatggaaaaagatatcttctttcttactagctttggtatagggacccctctcttccagagtacccccttacaagccatgtcccccatccaatctcctggactgttcccattcctgtgcaggcccttgcctctttgagtaaaattatttctactactagttatctaaatcagaggtgacaaaaatacagaatatacaggtgcttttcttcccagggagcacatcaggtattcataatctttaattttcaatgagcctgaaattaaccttagaagcttctcaactgaggtccaggtagccataatcaaccaatcaatcaaggctaacaacagaagtgaaatttgtttgtctgccttcacctaaaatcattaagaagcaattgtgtgggatcagagggtgaacctcttccttccttctttacaaatacaaaaagtaactttgccaggaaaatatgtgcatagct

SEQ ID NO: 1885272 - DNA, 4001 bp, Homo sapiens
ttggtggcttcaacagcaacatctttattgccagcaaaaccctggggaggaggaaaccagcttagtgccagcaccaattgccgctcacaggctggggtaatcatgggactgggagggagggatctgggtggtagagcttgctgcccagcaggatatggcaaggatgtccctgcagtcaggctgttgggcctttgcccaggaagatgcgataaggatgtttctgcagtcacgtggttaggaaggatgtttctcatggcccaagttcccatggaacgtttcactgtgatcagagtctgcaaaatggctggaggtttacaaaatggtacaggttagactaacagtaacatctcccaggtaaacagttctacaaagtaaacttcccttgagcatctacactgtaccagacatggtgctacgacccaggccacaggaggaacaggacagatgaggcccctgccatcctggtgctcacgtctgacgaaggaagctaacaggtcataagaccaggtcagatggtggtgataatcaaagacattaccagagtgagatgagctagaaagaaaccgaaggagctcttacaaacacagtgacaggtggagacccctccgaaaggtgacttttgagcagaaacctgagaaatgtggagggggctatggagaacgaccagcccctgaagcaaccccaggattgggagggcaaacccagcaccaggagggcaatggaatggcctgacctgtgcgtccttcgtgcttccttcttcagtgatgcacaaacagaaacatggggcaatttcgtgaagggtccatggatgaatcaagaagcagccgcactgcagagctggagtgcagataaaatctgacccaacagtaaagctagaagcaggtgctgcttaccactgaccacagtgcaggtcatgaagcataaccagaccatgaaggcacgtccagggccagaccagctggctgggctgccaacatcttagtagagatcccagatcagttgagctggttagggggagaaaaaaaaaaacaggaaagcttcagaaaattccagaggacccatgacacttaacatcaactccccccaagtgggatctgtttgtcattgctggttctaaagagttggtcccaccacccccacctgcccattgcctaaccaggggaaaactcagggtggggtccacagaaacaatccctgtggaaggggaaagggtgtttctcatccaaaaccaagggaaaacaccactcataaggagcagaggagcctgaagggagagacaggattctgctgctcatttggatatctgtttcccagcaggaaaggggaccacgcaggatacaagggctaagtggaccctgtgctgtggggctaggagggatggtgctgactcattgttggaggtgagtcactataggaggcttagaacccctccctgcagcctctccagtctaataagggaatggtagtgtggtcagtgggggcatccagaggcagtcaaagggcacagtgagtgatgtctcctctggcctcctctttcagctgcagattctccgagttactggaacagcttcttcatggccccaccagcctggagggtggtgacagctcccagatgacgctaaccccagggccctgcgccatcccccctggttccccttggccctgcccacacctttgtaaacagctttttcttaatgacccttcagccacttcgaggtccctgccagtacctgactgccacattccccaaagggaacaggttcctcagcacaggagctgaggtttctacaggcacagagaaaacactgtcccaactgttggaatggagtagggagtggaaaaaagaacgttttttctcaatgcttagactcaccaattgtttcattttatcacatgaaggctgtgtggcattttgaagtagaattaataatctacataattacaaattatattcttaaaagaaggtgctcagtgccatgcctgacacatggtggaactccacgatgagaggtgtgagaagccagggtgccatggttacagacaaggactgcaggtacagactgcttgcttcaaacctggaccagcggtgtgaattttggcaactctctgtattgctctttgccacagttttttaatctaacaactagaagcaaaaacaaggttattgtaaaaattaaatgaattaaagtaagcagagtgcctacaacacccccaggcacacggtcagcactgagcatgtttttcattatactcttaatgaggtaagagtgagaacacaggttccagccatgagcctggggtttctctggcagaagcatcagacactctacttttaacatcctccattcattcatttgaccctgataagggaggagtctcatgagataggaacaagcatccaccttggggccagacttcccatggtcaaagttgaactccaccactgttcagctgggtgactttgggcaagtgacttcccctctctgatcctcatattcccttttgataaaaacagcacaatggcaggcctacggggattgaaggagctgacagaaaaatgtgtgccttagtataaatttcctggaagtagatcctgaggcaaatattcaaatacaaaaattctatttggagataactctaggatagtaattcgactgccagttcttccttaggatgcaaatcccaggaaacaccagtagaggagtggggaactgagacaggaaaggaatgcagcagttaaagggaccttcatcaagaaagtttcccctgtgtcagccaggactcagccctgccaggtacatctgcagagacagcacagaacatgtgcctcagagtcatcccacccaaagcaagggagctggggtatttatccaccaatacccaccagtcactcctcagggatccttccaagggcatgattcctccagaatgtcctgcctgagctgcaagggtcagacccagggttgaggacagggcccctgacagtgcctccagcaataagcaggaacacagcctggtgtggagagtttcagtcagtgattccaactcatacacatacccacacaccacactccaaccccaacaatgtgtgtatgtacacacatatacatgcatacatgactgttagccactttgatcctggtgactccatgggatatacagtaaggcagaaatcagagggaaaagcagaattaaggggagtgaaaatcttaagaacaaaatgcaaatttaggcagaaaatcaagcgggaagaggagtggtctggacaccaaatgccggctggggggcacctgctctacacacactgtcactaattatccaagaagcctagtggggtagaagaaattcctctcaatttacagacgacagaaatgtagttcagaaaactgactttactaatgtctcagcaagctagtgggtggtagatatggactcccagatctttctgcccacagagcctataaattctcccttgttaggcaggctgcataccaggccctgcttctgggctctgttccttttgctgctaggcagtcatggcagaattgacagaaatgttatcccccttcaccacctggagcagagccaatgagaggagctggggaacaggccatgaggccctgtacccaccattcaatgtcttcaggattgcggtccctcagaactcttgcaccacatgatggcatcactcctgggtgtcttctgaggttgcataggattcagtagaggccagtggctgtgctgtcatatcctaagaggcagccacgcagtcttgggtctcttggctgcttcagcaccagaggttggacagcgcccatgcactgaggccctcaggagaatgggaggagggaaaggaagggcagaatggagtgatgtagtgtccatccaccatgtccctggatggagagacccacaccgggaccaccactggtactcatgaagatgtcagcctccatttatatgtcctcatctgacaactccttcccattttcatcctggag

SEQ ID NO: 1885273 - DNA, 4001 bp, Homo sapiens
gagaggtgaccagatggttagggggacagctcctgaagtcaaggatcctacaggtggcagtgctctctgatccaggagcgctatatctgtctccatcttaaggagaaaacatcgtggagacaggatgtcactcctgatgtgttacaactaagagcaaaaatctaggactctccgaaggaataacagcacgtgcataggatgggccatggggctgccaggaaatataattagcaacaaaggggattttcatgatctattgagtataaaaggtaggatataaatggcatccacagcacaaactcaattttctgagatatattttatatgcacacgcaaaaaaaccagaaggaaatgtgagcagtgggagaatgggtaagtttcattgttccctttccatttctgagtttctaattttctgtggagagaaagcccatgatacatcatggtatttgagagggaggatcctaaaatctaagccctggagctaaatctgccatcgttgctgggggaaatcactccagcactctgcctcagtttgctcatccataaaatagaaacacatccttccctacctcaaaggagaacagaatctaacagcagcccacatgcatgccctccggctggtttatgctcttcctgcgcagtagggctgtctatgtccacagccttatgccctatgccctctaaaaccctgagtcaggtctgagctggagcattctgcagccctcctcctgcagcagccctgctggtttccaggcacataggccttggcggccagcagttccccctccggccacagcctgcatgcggtgacacagtccagtgtgcccagaatgcactgccggccagcacccgcagcagcccgcagctgcgcaattacacacagctgtctgggtgtggcgccccctgctccaccacctcttggaagtcttcctggatgcaccatgaatttcctgctggccagcaatgtcctcggcctttgggtgacccaagatgaagtcctggagggtgctgaccacacaaggaggtaggggcatggcagctgaatgcagccaggttgaaggcgatgggaggctgggagtgctcaggccgagatgctggtctcttggcagaggcaggccgcgagttccttggctgacatcatgcccatggccctgataggcccatgtccagtcttcatgacacctgggggatggagagtgtggtcaatgcacaggggtcagccagtccatgcccccgtggccacccatgcccagcctcaagccacctcctgctctctcccagtgagaccccagggtcagtgtagaccccattgcatgaaaactgggggatccagccgttaaggggcgtttgtagtgctccctcagtagttggtctccatgggctgggattggggtctaccaggcccactcccagcccactgtttacctcgtgggcctcagcttcctcctctgcagaaggggacggtgaccctgcccagcttagttccctctaagaacacctgacccctgagtgcccacatgggcagggtctgagtggcctgaggggtcagagcccagcgataggacccctgccctcatcccttacccctcccagcactgggccacgcaggaaggcagaactccccaaccccaacccctgtcaatcccgggagccttctcagctggacccagggccacccctctgcccaccggctcacacctgggccatgcaaggcagggtggatgcacctgcctggcccttgagcgtgtgggggagccactgtttcccacttcggaggctcagttctgaggtcgggattccgggcactcccttctcccccattcccaaacctctgactggaagaactctctcggcacagccttttctttcggggtcccaaagtgcctgtgagcaggcagctcccgatctcctctctgtgacacccacagactcaaaaacacccatatgctcactcatgcagacaggcgctctcgcctacggctctgaggctgagcacacggagctccctcggggccaaatttgtgtcacgcgcagggacaccggaggcgcgtgcacagtccgtgtaacggctttgcttggcgcgtctccgtttctcttctgaggggctgagagtcgcggagtttcctggttggaggctgtggcggacgcgatttgcttcctcatatagggttccggaggcggcggaaagtccagcgggtctccgaagccggtagacggagccatgaagaagacctcgggcttcaggagggggaagggcgagctgccctggggctcggtcagcagccccgggaaggtgggcgcgggcgccgggagtgagagtgaggaccacgcctcctcccagcccaggcgccacgacccggacaaggggttcgacaggctccgcagagctgccggccgacaccggacagagacgatgcggcggatcctttctctgccgaagagtggcgtggatgacagagacgagaagaacaggtaataggaactggagcccggcagaggagggaggagggcgggtcggggagaggccccctttcctgctctcggctcacccctgtccccgagggcgctgggctttgttccctctgcagcccgcagcagccggtgtggcaacctcaaggtcatcaatatgagcagcgcgacaaacaaaactttagctggtccgatcctctcataattcccgttactttactgaaagttttagtgctttaaaaaaaattaagaaacatagctttttatttttattgtacacattttaaacaatgttatatatgttatggaaacaagcatcatgagaaaaataatttctatattatattaacttctgggctaaaaattctttggataaaatctaatatcccttttatatccacctacacctgagtaataagttatttcatgaatgacctcagaaggatcttttgaagtgagaggatggttccctgttcttgaataggaagactcatttttctttctttttttcttctttttttttttaaattatactttaagttctggattacatgcgcaggacgtgcagttttgttacataggtatacacgtgccgtggtggtttgctgcacccctcaacccgtcacctacattaggtatttctcctaatgttatccctcccctggccccccaccccctccccccgacaggccctggtgtgtgatgttcccctccctgtgtccatgtgttctcattgttcaactcccacttacgagtgagaacatgtggtgtttggttttctgatcttgtgatagtttgctgagaatgatggtttccagcttcatccatgtccctgcaaaggacatgaactcatccttttttatggctgcatagtattccgtggtgtatatgtgccacattttcttaatccagtctatcattatggacatttgggttggttccaagtctttgtaattgtgaataatgccgcagtcaacatacgtgtgcatgtgggaagactcatttttctcgagatgtgaactctattcattttagataaaccaaataaaagcatcaaggttttaagatttctaggttacgtatgctaccttttactcttatgatgacattaagaaaatttttataacagagtaaagacttgcccttctatatatcaaagtgtgatattaggtttcatttactaaaagatgagaagacagataaatgtgtggaacagaataaaaaatgcacacatactgaaaaatgtgtaagattttagaacctgatcctgatgacatttcatatgtgtatggaaagatgagttatttgtaaatgacatgtctgtgaactcgagaaaactagctagatttttatgttacaaaaataagttattgatagaatatgcgtaaaaacttaaatatacaaaattagaaaatgccagaagaaaacacgaatgcctatttatacagatacatttttatgttgacaaagaccttcctatgaatgcattctgcaggttgatttagaaaacaaaaattaaaactcccctt

SEQ ID NO: 1885274 - DNA, 4001 bp, Homo sapiens
acttcctttagaatctttgttcctgtctgcaattataggattttcatgtgtcagcaaaggataggttgtctctagttatttgtttctggggaaataggctcaaagggatgtattagtgaaggaaaaataatcaatgctagcaattttattaatgtttggcacttggggaaaatatgtaaaatggaaaagcagaacaaataagaataccaaagagatgtggggaggttatgtacccagatgcaagtacactaaaacagaagattttatcaggaaattatatatacattatatgctatatgtatatatttagcatacacatgaaattctttcttctataagataaagtcaacttagggttgaagcttttaaaggtggttttcctttttatagccctgcaatttaggcaggccatcacagggcaaaagacatgtgggtccttttattcaagtctcttagagtcacattcatgaatttcttatacatagtcaggaaacatgtaaccctttattaaaggaatttaacctaaaatccactataaactcgtttttttaaacgtgacttttagaaaaaattctcgtagcacattgtatacctttctcatcaatcttaaacttttccttattcattttctctgaatctaaaatcaatagtctttccaagcagtttctgtcttagcagctactatcatttgtctgttgaagccacaagaatacttcagtcttccttccgaggttagtggacttcattaaagaaatagctttagttttctttccagcatgccatgtctctattttctttatcatgcggaagtgaaaaaatgtcaaataaaagaggaaagaagtcacagagatcatagttgtgtctttatccactgctagttgacccttgaatttatttttgcagaacttcctcatcttttcctccttttaattgatttctctaaccagagctagtatgagtctgaatgaaacataggcagcttacattttctccatccgtcataatcgataaccacttccttataagctgtcgtaacttcaggcttctatggcaactttcttggtggacctacaagaatttttaacagtttgaaaaccaatcttaaaggttagaaagggtgactcacaccacttttattgtataaatgccttctttattccttgagccaggacaactcaagtaaatcaggaaataggcaagaaaacaaaaatcactcatttggagatgattactctgaaatatatgtcttaactatgccccacactgagacatctttttgaaaagtgttctagttagttctaaatgaacttacctaattctctttcctccacagccctcagataacacaagcaatggcccttctcactcaccaactcaagcaacggtgcatctccacctggtattgtggtgtggcaggtctatgtggcaagggttttgtctccgtactctgggtgaaggtgttgaagatgatcctgaggcctcagttctctggagggagtcttgcgggtagttaacttctgctgaatctcagtatagcagtgcaaggtcaaaacccaaaatgcgctcaatcttgagttgttgaagttggatgaaaagtgaagtcattattgggcatgacatctggtgtttcagtcccaaggccacaagcagaatgttacaatctctgaagcttaatgattttgcatttcatgtagcagcttaagtttttcacagcctgaactcaattaattttcacagcccactgtggaggtggagagggaagtgccatatatttttgcagtaggtgtgataacctgtcattgatcactcatttgatgaacaccaaaactttgcctgcacttctgggaggacaaagaagcctcctaactgtctggtctgtggatcaggtgccgcaggtcctctgctctagactatcaatcttttcagctggtcatttggagggcattacagggcaaaccatgcgcagttgagaccaattgcctgtgcccatgggcagaactgtctgttgatgggcagaaaggacagctctagataacaagcatgtgaacaacaccccctggtgttggtgaggatggatcagcaggcatagacataaactgctgtcagggctgtaacaggagcaggctttcctaccaacagtgctcaggcaatggagtatcagtgtggtgatatatcattattctaattggctgtttgggtttcattgtatgggtatgctataatttatttaatcaacatttaagttgtttccaatttttcaccattacaaaaatgcttaatgaccagacttgtatatctttctctgtcaccttgacccattatggcttcgggggaaaaaaaatcccacgaatggaattgttgattcaaactttaaaatactaatacatagggtcaagtgaccatctaaaaagttgtgtgctaagattataaatcaattacctaagttttatttcagtactttaataaaaatgtatatttttatgtctaggtatttgctccttctgaagcttaatttgggcatagagatttgttatttctattttttccaaatgattagtcagtttatccaacccattttgttgatagtccaccttgatcatatatcaagttctcacacacacatgagtctgtttctgaattatggattctgtgctattgggctttctgttattatataatggtttaatgtttatacttgtatgcttataatatccaataggacaaatgctctctcattaatttgcctggctatttatgcatgcttattcattcagaagaaatttgaaataaatttttttccataacaaagaaaaaagtcccaaatgatttttgatttggatttgcattaaatttagttttatttcaaagaattgttatttttacaatatatagtacatgttaaaaaagaggatgtagttttccctgcagtcaaacatcttatgtttctcaatagaattttcttattttcttcacatgtcatgcacatgacttattaaactgtattcctagcagttatatatatataaaactatatattatatttatacatatgtgttataaatgtattcctaggagttatgcatatatataaaatacagttacacacatatagctctatatagataatatttacagatagataacatatatagtaatatatagataatatttacagatagataacatatatagtaatatatgttatatatttatatatgttatagctgtattcctgtatatatgttataacaactgtacatatgttataactatattcctaggagttatatataatatataaactattatacataaaatatatatgtagctctatatatagaaatatatatatataaaactatatgtaatatatataactcctaggagtacagttataacatatatataatatttatatgtataagttatacatatattacatatattatctatttggtagagatggggttgcccaggctggtctcaaattcctgagctcaagcagttctcctactttggcctcctaaagtgttgggattacaggcatgaggcaccatgcctggcctggaattttatattttttgattttataattcaagggattcccccactcccagttataggtctctagcctgctccactggagtcggctaatctgcttggcccctggttgtgcagtcatccgggagctccactcaggactttgaactgacacctgcaagggtcggcggagtgaagaggctgggccaggccctctgccttctcctcttcctccttcagtcctcatccacctctggttccagtgtgtggagcaggctctgttgtcctagtaaataaagaagaatcaaccaacttcacaaaaccccccagaagtgaccagccataaaaatataagcttattccaaatacctgggaccctgtacctggagtcgtctgccacagggcaggtcagatgtcccatggccgagggctcaggagctgtggctggcggctggtagcag

SEQ ID NO: 1885275 - DNA, 4001 bp, Homo sapiens
caaagacggagtctcactctgtcgcccaggctggagtgcaatgatgcgacctcagctcactgcaacctctggcgctcaggttcaagtgattctcctgcctcagcctcccctgtagttgagattacaggtccccgtccctatgcctggctaacttttacatttttagtggagacggggtttcactatcttagtcaggccagtctcaaactcctgacctcaggtgatccaactgcctcagcctaccaaagtgctggtgtgtctggggttggttcctaccagtactctggctgacttcatgattctcactgacttcatcaatgaagccacggaccttcacggtgagtgttacagctcttaaagatggcacagacccaaaaagtaagaggcagcaaggttttttgggaagagcaaaaggacgaagactccacattgcgaaaaaggacccaaaccggttaccactgctggctggggtggccagcttttattcccttatttgtccctgcccatgttccctttctgtcctatcataatgccctttttccaattctccctgtgattggctacttttaggatcctgctgattggtgcattttacagagcactgattggtgcgttttacaatcctggctacagagtgttgattggtgtgttttacaatcctcttgtaagacagaaaggttctccaagtccccacttgacccagaaagtccccctggcttcacctctcactgggattacaggcatgaaccactgtgcctggcctactattattttttgagacagggtgtcactctgttgcccaggctggagtgcaatggcacaatcatagctcactgcagcctggaactcctggtcaagtgatcctcccacctcagcctcctgagtagctgggactacaagcttgcaccaccacccttagcttttttttttctttttcttttttttttacttttggtagagatgctatggagtcttgctatgttgccctagctggtctcgaattcctggcctcaagggatcctcacaccttgtcctcccaaataaaccactgtgcccggcaaagtcaacttttgagtctcagacttgggtttcattccatgtccaccacttacaagctgagcagcactgggtacaatttttaacatattcatgtttcaatgtcctcaataaaatcagggatcttaactaataagccaaaatggtagctctgatttgtgatagcattcagtagtgatgctacgagagcaaagatgagaaccttgcttgttggttaaatatttcagttaggggagcagtgatgaacattctccacacacacaaatgctttaactggacaagtaggggcatctggtagtgatagcaaatgtgagtcttagttggaattaagtagcaatgtgatacagaaaaagggaagttatttgtttaaggataaacaggagccaggggcagagtggaggatggaatccaggttctgtgacgccaggttaatgttttgaattcagacgggctgggatccgaatccccaccttcaccccttactgcttgtgtgagcttgaccaagttactgaaattctctgtgcctcgattttatcatccataaaagtgaggataataatattatcttccttgtgtgttgatgtgggaattaaatgagataataaatgttaagtacgtagccgactgtctggcaaatattaagtgctcaataaatgacaactattattatcccttagacctcattgcctcttcaacgcttaaaagctcagcaagtccctttaaaatgaaattctcaaagcagtcatttcccagtccagaaagagaacctgtcatgtgcagggagtgtgtgcacttcatgcggctgttccttaggatgaaaacgatttcttcctgacacacaggatcatcactgggcttagagagagaaactactatgtatagaaaagaatgagatgctcttaaaattgtgcaaaccacctcagatctagtaatcacggacttggctctctcatctctcaaccctgaaggagctccttggcagcactgacgcagagcagcgagctcttgtgaggtgcactggcaagcccctcctgctgtctaaaggcaacagacacggcctcatcacaatgtttcaggtgcttggaatcttttataaagcaccttttttgggggaggataaggtttgcaagaagctaaccccacggtgttagcactgttttttaccctttgagccgctagtagtgcagtgagtgtcttcctgagctgtctggcatggcggctggtgcgtatgacaatgtctaagtccccatgcacttgttacctgcacaggtggccacaccctcctctccctatgcccctcagtcacactgcgcaatggaccctcctttactcctgaacccagctggctcacaaggggtgaagtgggaccctgatggggagaaaaaaataaatttggaatttgatacatgatctcttatataaatgaaaaatgatgcaattaggggcaaaagttccagaaagtcgagcgctctttccctcctggaaaagcatgtggacaaggtcagctggccatctgcagccctgtgccggggtcagcatccagtggcaggccctctgacattgacctgccgctaggaggtgcctgctgtttgtgccccagcttcagatgcgctctggtgaatactgcggttcaacacagagcgatccctgtgttcgtgggctcatgttgtccctgcctgtcccatccgcacaggggccaggcactggaacatctggtgttggtcctgaacatttgtgatatttgccccagtgctgagagctgagctccttctggtggccatggcattagaaacaggtcaaggcatcttgtttcttttccttgcagtcaccacagtggccctactgtttgtcatggccaccaaaacactttctttcatttgtctgcgtgtgaatgataaaccatattatcatacatgtataatgactggtgtcatacaaacttcatacacagaagactgttatcagaaaacatagcccacacagaatcaagcttgttcagttagggaattcgcttcctgcatggaacccgcaaatcctggatggggctgccagcctcattcacattcctggtcttggctcctgtaaggcaaaatgctccccacttgaactcccttctcccccagtgtctggggttcctggagattcttatctctttggaaggagctgctgcagcgtcttgtggttttcaagatggcagctgagctgcagtgattggctggtgtgacttcagggaggctgtgcttgtgaccatgtgcctcttccttcaagcttgggaggtgcagccaacgacgtgtgaacgggcgtggctcctgatgctgaggatgtgcaagtgtgtggggatcctcattactggctctggtaacctagatcctttgagcaaccttgatctttactgctttacagttctcacgatttgtttgtaatgctctgtgttttaaaggaaaccgatattgctcctctgcttgtcacatattgctccttctccctgcaagtatattgagtaccacaccagcaccaggcgagaagaagtgaccaaatacccagagaagactggagatcagagatcaaagcatccacctacctgggtccatccaccaccctcttgtttatttcatctttttcctgctcccagggtgtctgaaatgaactctgcccatcaggtaaaggccaatatcttcatgtggtctaaaagggaatttcatttctcaggtgtgctctctaaagagcccttcataaatatgttctgtttattttttggagcagttttccctatcccaggcccccagctatgtctcagttaatcacggtgcaccacaattgagctgacttattctgaatattgcttattgccatgaattcgaatggattttaggaaccaactcccaagtctcatcaatttaaaggaaatctaatgagggaaaatcctcatctgaaaatccgttatc

SEQ ID NO: 1885276 - DNA, 4001 bp, Homo sapiens
cagaaaagtttacttttgctcaggctttatggtgacagccagcgtgatcaacaggaatgctgcagttgggtgacgcatgaggctcaggagcctttgcgcttgactttgaaagattataaatacaccaggctcgccaagcatagccagtcagttacaaattacgagtcatctttcggttgttgctgaacttcctttacacctcttgttttgaacacagtgagcaaacaacgtctaatcttttggctgtggagttccaagtacaccacaaggcatcgggacacacctttaccccagctgctttgtgtggttgcaggttaaccagacatgcagctaggagttcacctaaaaccttcctttccccggtacataccttggtgttgatttgacagctggatgctgagtattgatcccagtgttcagggatagttacttcattaagacttctgagatcccccatttgcttgaagataaaaacaggcaaaggtataaacagataaacagtcacacaaataagtagctgtgtgggccattacttttaaagcatagtagatgttatttgtgtttggagaagcttaatgatacactcaagaatccaatagtagaaactgtttgctttcaggaagaaaacgttatatcaggaaggtatgtttgaagaaaagaactatataacagcgatccacaatacacctgttcatttgtagcataatagttacacctgctccctggggcttttttgagatttcagtctttggtgtaagacacacatacacacatgtgcacacacaatggtaagcatgcatgctcttcagcttcaaccctcagtgcgcagtaaaataaaaaatatagttgaatcatctgtctcagccccagctagagcccacgtcttccaacatgaattttaaaatacctttttgccttttaaaatatgctgtagaggccgggcgcggtggctcacgcctgtaatcccagcactttgggaggtcaaggcaggcagatcacgaggtcaggagatggagaccatcctggctaacaaggtgaaaccccgtctctactaaaaatacaaaaaagattagctgggcgtggtggcaggtgcctgttgtcccagctactcaggaggctgaggcaggagaatggcgtgaacccgggaggcggagcttgcagtgagccgagatcgcgccactgcactccagccggggcaacagagcgagattccatctcaaaaaaaaaaaaaatgctgtagatgagttttagtttatccgggtcctttgtaattaatctctgcattcatcataattggaagaaaagctcaaagtaagaaaatagctttcctccaagtttattgcaatcagagaaaaatacaatttaaatgtttttgtttcccatttctgttccttacatgcattgtctagagtggttcctggtctataagccagtgggttgagatacctgaccagaccaccttttcaacccagttctttctcctctttgtatttctcccatacaatacagtattgaatatttcataacctatgggtgtatgtttttggcaatgtggctaagtcaggcagcattgaggactgtcctggtgacagtccggtgcagccctcacccaggctcccacattcacacccctccactctccagtgggctgtgtaagttaacggcaaataaatggcccagaatggcttcctgttagagaaaaaaagggacaaagacttctgcccttaaaactctggtaacaaaagtaatctagtggaaatcaacattactaggaatatcctatgattttggtggtgttgagttcaaagacagcatggccgaattgtgaccatccacccagtcacatgaggcaaaaacccaggccctacctgtgtcctgacctccagcttcctccccacggccagttggttagaacgtgtagggagtgtacctctcccagccgtggaatcccctcaccatcttcaccccttccccaccttcaaagactttcatggccgagtgtggtctgaccacacttgatccaaagcccttcctctgagctctcagctccacgtcacaacctcgtgaccacgtgcctctcactgtcatgtgcttagatatgtgtgtgtgtgtccacctcaccacacactgtgagatccttgagggcacgttgtctctttcatttctgtgtctccagtgcctaaaatggaaagtgctcacttactaaataaatatacaatataaaaaataatttttatcccttgtcccatttgagatggaaaatgagtaaagtttacaagtattaatatagtcagcatcccactaagaccacacagacactgagatgagcagaggatgctgaggagcaaatgcaaaataaactatgagaactgtgacagcttccagtgctcttcattataaatatcagcaattgctaatatccaataacatgtcacacactctacattaaatcatcacaagtctctaaggcaggtgttagttttctctttgtacagcccaagaagctgagacaagagtcacacaaccagccaatagagagaaaagattcaaacccggagaccttctgtctctaatcccaccctcctcccactgtctcctgctgcctctctgtttcaaagcttggctctgagactatgagcactgccaaaattttacaacagtttgcgtatgtcatggtctgcaaaagctgtggatggcactgtggtggcagcctcaatagaaggctgagactacttaccagagggaggatttcctgagctccgatcacacctgctctttgttctctctctgtctgtctctctgtgtgtgtctctctctctctctctctctctctctctctctctctctctctctctcaatacagacagggtctcactctattgctcatgctggagtgcagtggcgtgatcatagctcactgcagcctcaaagtcctgggctcaagtgatcctcctgcttcagtctcctgagtagctgggactacaggcatgcaccaccaggcctggctaatttatttatttttattttaattttgtagagacaaggtctcgtcccttccccagactgatctcgaacccctgggctcaggagatcctcccacctcggcctcccaaagtgctgggattacagatgtgagccaccactcctggcccacacctactctttatcctcaacccacacccccaggctcaaactcaaaaggaaggagcaaaccctagaagctgcgtaaaacacaccttgacctaaaatgtgctcatgaccaggcaacttgactacatattctcctcgacctacggtggagtgacatccctataaaagccattgtaaattgaaaatattgaaagtctaaaatgctttgaatacacctaacctatcgaatatcagagctcagcctcgcctcccttaaacgtgctcagaacacttacattagcttacagtgggcaacataatgtaacacaggcctatctatgttataatacagtgttgagtatctcatgtgatttattgaatactgtactgaatgtgaaacagaatggttgtccgggtactcaccattagctgacacagctgaacgcacactgcgcctgaagagcgtttgaagcattgaactaaaattaattgctgggtgatggggatgctacaacgacagggtcatcaatttctctctcttctgctgaggctggagaaccacgggtagaaggcgctggagcatcaacgcttgatggtttggcaggcgtagtgctcttccttcaggaaggcatcaggtgtccgtggtttacccttctgatggcagggctgcctgggtgctttggctcacagccatgcccagcatcaggagagtgtcatacagcatatcccttgcctgtgggataaaggccagtcttcagaatccgaagtgcactttttgttttttttttttgagacggagtctcactctgttgcccaggctggagtgcagtggcatgatcttggctcactgcaacctccacctcccaggttca

SEQ ID NO: 1885277 - DNA, 4001 bp, Homo sapiens
gggctctgggagtggctgccaggtgagtagaacagtccgattttcagtggggtcccacacagataggacacggcttaggaggaatcccaggctgcgggcattccttggcccagtggccagattcccggcacatgtagcaagctcctgtgggaggaggttctggaggaacgcctggccgctgccgttcaggcatttggaagttcttgtgtgctggagatgtggctggggtttgtctcacagtggaggcaaggaattgcaacttttttctattattgtacaccttgaaggcgaggttaactaaatcctgttgtggggtttgagggccggaatttaatttttggagttttaatgtctggagcagattgggtaataaaatgtattttgagaataagacggccttttgaccttttagggtctagggctgtaaagcgtctcggggttgctgccaaacaagtcatgaactgggctggatttttatatttgatgaaaaagagcctaaacgcttctgatttgggataaagaaaaaggagcattaaccttgactatgcctttagctccagccacctttttaagagtaaattgctgggcaggagggggagggctagtcacggaacgaaactgtaagcccgaccaggtgtgaggaggggaggcgataaaaagattatagggtggaggagcagaggctgaggaagaattgggacctagctcggcctggcgaggaacaacctggggaggaagggagaggtcagatgggtctgcagaaaaggaagattagaaagactcagcgacacttggggttggtactgaggggacaggcgggagggaaagaaggaagatttgggacgagttgcactggtcacagagactaggaagggactgatgtgtaaaagaatgcctggacgtcaggcacctcagactgtttgcctattttacgacaagaattattgaattttgcaggatggaaaaattcaaagtgccattttctggctatttggaactactgtcgagtttgtattggggtcaagcagcattgcagaagaaaataaggcatttaggttttaggtcagatgtgagttgaagaggttttaagtttttgagaacacaggctaagggagaagaaggaggaatggaaggtggaagcttacccatagtgaaggaggcaagcccagagaaaagagtagagacagggagaaggggcggagggttcttgccctccaggaaagcagagaaggggttggggcagggaaataagggattggggcacagagataagaggtcagggtgcagaaataagtgattggggcacagagataagaggttggggtgcggcggaaataagcgattggggggttcttgccccctaggaaagcgggacttgccgctaagggtgaaggagaaggggttgaggggtacttgcccctgccccaggaaagcagcacttgctgctaagggtgaaggggaaggggttgaggggtacttgcccctgccccaggaaagcgggacttgccgctaagggtgaaggaccaaggcaggcgtccctgcatggtctgacacccttgaaacgtgagtgtatactcagagaggcgtccctgcaatgatcaaacaccaagggaaggctgccttcccagtccgtgaccggcgccggagttttgggttcacggataaaacatgtctcttttgtctctaccagaaaatgaaaggaattgaaattaagagaagggagagattgaagtgtggcgccacgattgaaaggagaaagaggttgagggatagtgagggaggttggagaagagagtaaaaagaggccgcttaccggatttgaaattggtgagatgtttcttgggctggtcggtctgaggacctgaggtcgtaggtggatctttctcatggagcaaagaacaggaggacaggggattgatctcccaagggaggtcccccaatccgagtcacagcaccaaatttcatgcgcgtccgtgtgaagagaccaccaaacaggctttgtgtgagagcagtaaagctgtttatttcacctgggtgcaggtgggctgagtccgaaaagagagtcagcgaagggaaataagcgtggggccgttttataggatttgggtaggtaaaggaaaattacagtcaaagggggtttgttctctggcgggtaggagtgggggtcgcaaggtgctcagtgggggtgctttttgagccaggatgagccaggaaaaggactttcacaaggtaatgtcatcagttaaggcaaggaccagccatttacacttcttttgtggtggaatgtcatcagttacggtggggcaaggcatattcacttcttttgtgattcttcagttacttcaggccatctgggcgtatacgtgcaagtcacgggggatgcgatggcttggcttgggctcagaggcctgacagtaacacgttttaactttgcaaaaaatgttttggcattaatgggctcaaaaagtgaaaggaaatgtgtaatggaaaatcaaatactttgttcatgagaatgttaatgacaaacctataaatcccaaaatgtttatcaacacttaccatgggggctatatgacatcactcaccacatgaaaaatagaaaacacgaatctgctaaactattagtatctactctcattcgagagtacatttgagatacatactgtgcatgaacatgaggacttgacacgtgcagacaaggaaagtatcctgtgaagcatggcttttcatttggatcaaatgactgcctctctaaatctgcactctgtgtctgttgtacacatacaaaaagtgaagctgatggggttcagggcatgctgctccaaaatatggttccttggcgtattgaatattttaaacggaagaaatttgaggaaaacagcagaagcgggaaagtgtctctgactttcccccagcctccttccctgatgcagttcataaaacctaggaaagattttctgaccttcccctgaaagaggtcatagactctcatgtaagatgtgccctctctatgccaggaagaaaggaacatccttatccctgaaaacaaaaggtcacagaagggaaactgaacaaactggccttgctgagtttccccagtttataatcatcatgtcatacttttcaccctattatatttctctatgactctcctctcttcatcaaacccagcataaaaatacacaggtttaaaaaatacacaggtttaactgtttcttcaggtatttatttccttatgaaagctcccatttcatgtaaaatgcatgttaaataaacatgtaagcttttctctggttcatctgtcttttgttataggggcctcagccatgaacctaagatggagagaggaaaagctggtctcctcccctacaaagcgatagatggtaaggtgctggatccaatggcagaaaaaaaagtttcaaacaattaaatgatgccacttttatagaaatggagtcagatgcttcatattggaaaacagttattttcaacaatgattccttttattttcatccaattcatggtatcaaagtaaaacatttggaattttattttgctgacggtaaaaacatctgatattactagagtgagatgtcattgtaaatccagttaaatgaatcagtgctatcataaattgtttttaaaagttcaaactaaagttatctttgtgtcataattaagtacaaattttggcatagcacagtgtcattgtaaaagcatgttttttctaaagaattatggagcagaaatgtactgggaattagatgtgcaacatgattcatacttgtactcaaacaagtagtgataatctaccaatcaaaatagtagcagtcacgaagaatttataaatatgatatatatgtatacacttaaaatatctaaactatagtttttgcaaaaatatgattttaaatacaaggcagtatcatgtgtttttctctctttgctgtctgccataaggagaattttagaaatatttgagcattgaagaaataatttgt

SEQ ID NO: 1885278 - DNA, 4001 bp, Homo sapiens
tccacatctatagcacttatcttgtccttccttcctcttagttctgggattctttaactttgctcccccatactctttagggggcctggtaaacttggaccttggtcctccagatggaggctgggtcctttaaaatagggtttagaccctttatagtttctggctccctggaaactctgtctagaagtacctgggtttggagccatctgttggaaggtggaaaacataagttttgtcttttgtttctgtttttcttcatcccttttcacatatactttctgagcttccctgaggagctcacttagcagacggtcttcccaattgtctatcttttgcaacttttttgaagtgtctggccaacttttagtgacaaactggaatttcaacattccttgcccaaagggatcatccaaattgaggcctgcatattgcctcatttgctccctcagtctgtctaggaatctcataggcccttcatccttttcctgttgtataacaaatgctttagaaagattttgggttcagggtactgattcccaaattccttttattatcatctcccttagttcctgcatattttcccagtgacctgcatcgttattgtcccactgggggtctcgaggggcagggaatttctggtctgcggtaggaaagttttcaccaggagggtgctcacattcctaaactaccatagcagccctgtgaatcatactcctttcttcccctgaaaagaggatgcccaagatggacattaactccacccaagtgtataactgaggtcctaagaattggtcagtttggtctgccactccataagggtcatctagtagtggtttaagctcctttttaaaattccagacttctgaactggttaagggagcatttacaaagccaatggccctccccacctcgtggtacctctttcaaagggaagagggtcagggctgacctcttaggtacagagagaaatgggaaattctgaatatcttttttacattgttctacctcacactagagtccttttggagagggatatttaggttgggagggaacaggctggtgggacagtaattcccaagagtcagggttataaggaggagggacaacgtgagtagaggggaaatttggaaagggatctgaggcggcaatggctgtctgaggggaaagactgaggacactgaatgggggaagatagtctaggggatcccatgcactggagtctttaggcatgagagctggctcctctgacttttaattttgatgtgctagattgggttcttccctatctgtttttaagggaaaaagaagggcaggtccttccctccaacaaagggcatagcctagttcttcttgggacactggacttttatcattaatgtatcagattagaagctgacacattacaccctcatttgatccaaaccttggccagaagattgagggtctgaggatgggtccctgagtccaaataaaacagcaatattttatcatttgttgctttttcctatgtttaatcctttcattatcctttcattatctttccagtattttagcatgagacctagggggctatctggggggatatctttgttaccatctttatccttcttgctccctgtcttgcttggggtatttcccatcttgatggttttggggtagagttcaaggttcaatttcccttactggaaatttctcaccttttggggtgaggctcaattccccccactggaaatttcttgcctttcggggtgaggttcaatttccaccactggaacatacttgccttttctattactggaggtttgtgtgaggttcagtccctgccaatggggatgtctcacctctttttaacctctaagccaccctgaccaaggagtacttcaccaccccctgccacggctttcttaccttgctcccaaccaccaaggaaatactttaccggctcccatggtgtcttttcctcggtccatgcacacacttgtgtggcccttatggaggatgctttaagctaggttgctagccagtttctttccatgtagctgagagctcaggttattcttcacactgggtgggtcttgatttctcacccctgaggccgccacagtggggtggggtgcacctcctcacaagagagaaccagagaccacccccggaggggaatgtaatcccggatgagcccccaaattgttataagtaaagtttcggtgccacaaaagaaatagcactcgaatataaaattttctttttaattctcagcagggcaaggtacttctatagaagggtatgcccttacagatggaggactggtgagtgcacacctggacaaaggagggaaaggggttatttttccttatgcacatggtccctactgctttgtcattcccctattggctagggttagaccgtacaggctaaactaattctgattgagtaatttaaagagagtgacagggtgagttgtttggagggaaaaacggttatgaaatgagtcaaggtggagaatgagtcagggtggagcaggtaatcggaatgagtcagggtggaaaatgagtcagggtggagtaagtaatcagaatgagtcagggtggagaatgagtcaggatggagtaggtaatcagaatgagtcaaggtggagaatgagtcagggtggagtagataatcagaaaaggttgctttacaaggaagttaagtttaaaagtagaaggcaaagaattgaacatactgtcatattaattctttgaagagaaatttataactcatatttaacatcatgattacacagcattcatcattaagatgaacatcatggttcatcttaaaccgtgaggctgaagtcagaggtgacacatgaaggatatggcaaagccactccacttgacaatgaacttcaaaaaccacactgatgttataaaacccaaatattttactgcacatgcttactggctgacttgcacaatacttccattataattacgggacagacacaaaatgaaaagaatatttttaacaaagcacttgcacgatgcagccgtacccattcttaatgatcattaatgtctcatccaaagagaaccatactttgtttcatttactgaaggtcagcatactgggaagcaattgtcatcacatctcagacctttttgcatatttgtcctcattgttctgagccttcatgtgctcagactagttgattggtgtgtagattgtctgtcattaaagccatttggaaatcagctttgtcactggtttagtgttggaacttcagatcctagaagacaccactggaaagctctgtgcactaggaaagggaaggtgcatggccctgctgagcccaacctcggggctggaggaagagactgaccttgaccttgaccttgagcctaagcaatgccccaggacactgagacaccacacctccaataaagaaaaactgtgaatggcagaaggaaggaaccattgtttgggggctaacaaggagaaagaagtgctcagaatcaccattcactgtcggagtcactcagcagggtcagctgctatcagccaggcagctgaggctacaggtcaggaggccacaggtcctgtgaataacccacattccagacatcagcatttcacccacatgactccacctcttatctgcaaatggggccaccctgaaatcactttgcttacgaaggaggagaaagggggtggcccgtctctctgagtcctgcccctcctaaaacagagccatgaagccaggtcttcatgatgcagccatagcattgcaaactgtttcccatttccccagaacatgtttctaagcttccaggtcttaccggaaaggcgtcctaatccagaccccacaagagagttcttggatctcatgcaagaaagaatttgaggcaaatccgtagagtaaagtgaaagcaagtttattaggaaaataaaggaataaacaaatggctattccatagacagggcagccccaagggctcctggttgcccatttttatggttat

SEQ ID NO: 1885279 - DNA, 4001 bp, Homo sapiens
tttttatatctaatctttcatatttttttcttattatgtcaccctctactgtcttacttacctcatataacttcttgattttaaaaagtaagtagtagataatcactttaaaagtaggcagaaggcagataggcttttattaagtggttttagaagttaaggagaaatgatatatttgagaaaaagagttcaggactaacaaatagaaaataatgtagaaagaacaagcaattggtaactagaaagtcgggtttttcaagatcagtatgagtacttattccatcatgcagtatattaaaattaatgtccaaaggacgatcacctacgatgactctcattcatttatttgacacaaaacatcttaaattttcatttaaattcttttataataatatgtcaatttaccattcttgatccattcccccatgtttttctttgcatatctggctttctgccacatggtcaggttaaactaacacttcttagctgtgtatttctctttggggaacttacttaacttttctctgcctcagtattttcatctgtccaaaggtggcaatctgaaattatatttagtaagatttctgggaagtaaaatagataaaacatgtaaaattgcttacatcatcagttcacgatacatattaatcactgaaaaaatatcagttggcattattctctcacacttgatgctttttattttttggcactccatgtatgtccccttatatatctctcttattaaatttaccagtctgttcataatttgaaatattatgtagtataggatctaatttaggacctaacacattgtatatgaaggaagaaattaattaccagatttagaacgtacatacctgtgctggcagatgcgcaccatatgactccgatcttgttaaatgtatagttttaatgattatttcaaagcctgtgttaataaatttaacatgattatataatgcatgttacaaaacttatatggtatatacaataacaagataccatactaaagcaacatatagccaaaggaaaccttatttcttactttaatgcatattatccttggattatagataaaaataatttcaaaatttgccctctctggttataatatataaaaaaaactattagttgaattaggttaaatatgcttaaaaaataacgccagtaacatcaaaacatattcataattctgtgtaatagagacaaatcaaataaaaatttgagccatatccatgtgaaaatctgataaacaataaaaattatgcttaagaaaaattatgtttatttttgtgtctctgtgtttttctcttagtcaattttctgttacttataacaaaaccttcatagttgggtaatttataaagaataaaatgtatatcttacagtatggagatgagcatttcaaggttgaggatccatatctgatgagcgtctcattgctggtggtgactcgctgtagagtcgcaaggtagtgaagggcatcgcatggtgaaggggaggagtgtgctagctcaggtctctctttctctgcttttgaaaccactaatatctctcccatgacaattcattaatccattaatccattaattgataaattccctcctgagggccgtgatccaattacctcttgaaggccttacctctcgatactgccacactggggacaaagttcatgcaacatgaatttcagagggaacaaactttcacgtcatagtgttctgcccttggatctccaaaacttatgtctttctcacaactttaaatacatatacgtttttttccatcctcatagccccaaaaactcatttcagcatcagcatcagctcaaaagtccaaattccagagtcttacttgtaaacctccgaaattgaggcaagttatccactttcaagataaaatggtgttacaggtataggacagacattcccattccaaaagggagagagaatcaaaataagagtaaaaagctccaagcaagtccaaaacccagcagggcaaacatttagccttaaaggtggagaacaatctcttttgattccatgtcaaactttctagaacacactgggacaggggttcaaagcctcaggaagccctgctcctgtggttctgctgggtgcagctcatatgactaccaacatgggttggagcatggggcctgaaactttcctgggtgggtgttgcatgctgctggtgactccacagttctgtagtcctgttcccatggctccagtaggaattgccctgtgaggatgcgccgcagtagcttcaaccccatgtttctactcagcattgctttactgggggcctgctgcagtggccctgctcagctacaagcttctgactgggaccacaggcttttgaagacatcctttgaaatgtatgtggaggctgccaaacctccagctttcttgcttcctgctaggcagcaaaatccgcaccacatggacactgtcaaggcttatgactttaccttctggaactgtggcatgagccccacctggagctgcatcagccacagctggggtagccagggagcactgtgctgaggtgtggagggtagagtcctaagatggccctcagcttcaagcccaggaagagcagctgaggtctgtcccttggaatcattctgccttcctaggcctctgggcctgggattgaaggggaaaccttaaagatatctgaaatgctttcagcatctttgtttcattcccttctatccatgttaatctcattagcaaacagtccttcggctatgaccttcatttcctctccagaacatactttttcatgttttatgtgaccaggttgagagtttcctaaatctttctgttctgctttccttttaattataaattctggctttaaattatttatttgctttagaatcttagtgtgagtggccaaaagtaaccatgcatcttcttttatattttgcttagaaatttcttctgccagatatcctactttatccttcaaaagtttggccttccataaaacccctgggcggtggcacagttcagacaaattctttgccagtttataacaaggctggcttttactctagtttacaatgacttattcctcagctccatttgaaacctcatgagaatagcgtttactgtctatgttgttatcagttttctgcttatgaccacttcaccaatctctaaggatttccaaacttttcctagtcttctcgtcttctaagtcctcattagaacctaggcattttctagcctcctcctctaaattcttccagtctctgcccatgacccagttctaaagttgtttccacatttttaggtatttgttgtcatcaacaccttactcctcagcaccaattttctgtcttagtccattttttgttgcttacaagagaacacctgaaactgggtgatttataaaagaagagaaatatattccctacagtataaaggctgagttcaatgtcaaagggctacatctggtgagtgttttcttgttggtggggacttgggaattctgaggtggcacagggcatcacgtggtgagagggctgagtgtacctgcccaggtctctttttctcttcttataaaaccactaatgccactcccatgatagcccattaattcattaatccattaattcatgaatagtttaatccacttatgaaagcagagaactcttgactcaattacttcttaaaagctacctttcagtagtggcacattgaggattaattttcagcatgagttttgaagggtgaaaacattcaattcccagtactctctttctcttgctctacatacaaaaacacacagacacacatgtttacacacataaagggaactggatgaaagtaatgtgcagaatatactaaataatgacaataatttgaaatgaagaattccaaaaattgggtataatgctgttataaaaacagaatgaatattatttttactttaatgatatttttatttaaacctttattcaaagcatttttaatgatttagaatat

SEQ ID NO: 1885280 - DNA, 4001 bp, Homo sapiens
ataataataatctctaaaaatcattctatcacttcgatcaaggcagacaaaattaaaaagtcaaaaagattatagtttattgatttccttaggctatgtaaaaataaatgtggtcctgtatttttcttaccatgaaacaaaatattgaactctgcccttgaggcatactaccatacttcaaatgctgatcttatcattgcttgcaagtcaaacagagttggactttaaaaggaggaaaggaaaaccctggagccactaagaagcatcaagggtcaagctgttagtctggttctgctcagaatttacccagggtcacaatgcctggataaggccactttgcttccagatgacatttttcaatacaaacacacaaccagaatttgaaatttactataaaaagagccatattctgaaattggttttctagtttacttggcatcttatttgttttaatttggaacaggaaatagcagaatttccccccatgttccgcattttgaattctgtatgcgataataaataatcatataaattataaaataataatgacaaagcaaataggaaattggtaaagagttagatgggggattttctaatgtatttaaagtaagggccacatcccttctatgctcctggatgcccattttgtaataaattgtgaaatgtatccatcagtttctaagttgtagttaaaagctcctcaaacaatgcacagcacacagaataatcttaattaatatttaattaactaaatgttacttgtttgcgtgcttgcacacttgcttggatgagtgactcctttaaattgatctcttgcttctttttgaaagattttagaacttcctgtctatgattcctggaaacggacaccactcagtaggtttcatggaaaggaatctggcatctcccagccatacttatgtacagagtttgtgctgcagcctggaaaatagctgtaactgtgtcaagcaaggatcaaaatcctggtctggaggagctcaagctgaaaacacaaaggcttaaaaggataggcacttcttactgaaattactcccataggcaccttctagcttcaatttagactgaaatgtaaaaagacattaacaatttcttatatttccctcttttccaaattcaaaatcccttggagcaggaaaagggcaattatggctaattatgactattactccaattctatgctcctgttagcaatcagatttgcattactggagaaaaaaaatattatcctaaataaaacattctgactatgattgcttaggagccaatccgaaaatgattaagtttaaattacaagggatcttttttgagggggggaggagagttgataaaaaaaccttttagaaagggaatctacacactactaaaaccaaacaaacacaagggggcaggaagagctcaagctctgacttcaaaacctgttggctgaaatgagagctaaactattttagtgtgccctccggatatttatcaattttcgtggcatgcaaagaaatgtgatgctgacaagtagatttagtttgtgcttggtctaattactgcgaagagaacaggaacgtctctaatgacagctaccctaacagagtcggatttgggagcgcctggggccacattccctagaatttattctttggtgcaagactagcaattctgatcagactgcatttctcacgcattccaaatgccctttttcccttttactctgtgaacctcggttgcaaaggaggggcttgttaaaaactcaccaatcggaggactgtgcccattgtaattcacgaggagaaggcagcgtctgggcgcgccgaagggggctgggctggagtgcaacctgctctagctatggcttttaattccagctgtccttttgcaaatatgccccagaatttcttctcaaacgctctgggtttcgcttcaaactcaaaaagcattgcgtctaactttcccctgggtttgcaagtttccttgggaaatggccatgccctgcgcgggatttcattgactagggcggaggggtgggggtggctaaaatgggtaaccctcggtcgccggcagatgaagtgaacccagcacagcagtgtgttccggctcctctgcaggagtaccagatctattaatagcagcccagagagtagcgcaagcaggggtgggcaactcctggccacttcttccctcacttccaggacaacctgttgcgcctctatctcctcccctccccgcagtttccccgccttggcctctaagagctgattggcagaaattactacccaaccctcagctccgcacctcctcccccgaccaacgattggccacctgggaggactggagtaaggggtgcgagcggagggatttccctcaaagcccagggtccggggacctggaaagtagaagtggagggattcaattctccgcgcgattgaggcgctagcggcggagctggacggcctgggaaggcttcggctcctcggctgcggctccagcccggacggcgccgcgcaactttgccatccttctggcccagccccggctacaggaggaccccgcgggcaacgcgcggagttcctggcacttcccggcggtgtctcttgttgtctgcccggggaccgacttcgcatgctctcaggctgacctgtccaagcccgaacaccgggaccatgcactcagccgggactcccgggttatcctcgcgccggacaggcaactccaccagctttcaaccaggaccgccaccgccgccccggctgctgctgctgctgctgcttctcctgtcactggtaagccgcgtcccggcacagcccgctgccttcggcagggcgttgctgtcccctggtctcgcgggggctgcaggggtccctgctgaggaggccatagtgctggcgaaccgcggactccgggtgcctttcggccgtgaagtctggctggatcccctgcatgacctggtgttgcaggtgcagcccggggaccgctgcgcggtttcggtactagacaacgacgcactggcccagcgaccgggccgcctgagtcccaagcgcttcccgtgcgactttggccctggcgaggtgcgctactctcacctgggcgcgcgcagcccgtctcgggaccgcgtccggctgcagctgcgctatgacgcgcccggaggggcagtagtgctaccactggtactggaggtggaggtggtcttcacccagctggaggttgtgactcggaacttgcctctggtcgtggaagagctgctggggaccagcaatgccctggacgcgcggagcctggagttcgccttccagcccgagacagaggagtgccgcgtgggcatcctgtccggcttgggcgcgctgcctcgctatggagaactcctccactacccgcaggtccctggaggagccagagagggaggcgccccggagactctcctgatggactgcaaagctttccaggaactaggcgtgcgctatcgccacacagccgccagtcgctcaccaaacagggactggatacccatggtggtggagctgcgttcacgaggggctcctgtgggcagccctgctttgaaacgcgagcacttccaggttctggtgaggatccgaggaggggccgagaacactgcacccaagcccagtttcgtggccatgatgatgatggaggtggaccagtttgtactgacggccctgaccccagacatgctggcagccgaggatgctgagtctccctctgacctgttgatcttcaaccttacttctccattccagcctggccagggctacttggtgagcaccgatgatcgcagcctgcccctttcctccttcactcagagggatctgcggctcctgaagattgcctaccagcccccttctgaagactctgaccaggagcgcctctttgaactggaattggaggtagtggatctagaaggagcagcttcagacccttttgccttcatggtagtggtgaagcccatgaacacaatggctccggtggtcacccggaat

SEQ ID NO: 1885281 - DNA, 4001 bp, Homo sapiens
tgtgtgtgtaacactgtgctaggtactaaggcaatgatgatacccaagatttggtctctatcctgaagataagcacaggagaaacattatcagtcatgatgctttctgttgcaaacaagtgaaaacctcagctcagcttaggtcagctccagggctggccaaatcagaggctcatttataacactgaggatccagattcttttgaaattcctcctgcaccaatatcagcatttctaccttctctgtaggttggcttgcctcacgttacaatggctgcagcaatcagaagtgtcacatcctcagtaatacttaatattattactattatttaataatatttagaactgtgccatccctgtttcaatttatcaggctcccagcagactactccttatctttcaaatgtcaaaactgcatcctgagctcttgcctaaactaatctggggtgaggtgaatggaagtagcactttaattgtattcattctttgtagctggacctgggcctgggccctatctcctgacatttgcccacaagaaagatttctgaagttaggtaggactggctgttgagtaggccagtgcttgccaaacctttacacatcctcacatatgtcataatatgcagataaaaagataatcccttatacaacttgctgggataaactcaggaggcttacagccatgacctgcttgaaggttcttcctgccttagaccttgctcagctgctccaggatgaggggatttacatcacagcacaactgtattttattcacagcataaaccatctctttccttctcagttgacgagttcagatgggcaataacagtgtctgccaaagagaaaaaaaaatgtattcaaactagataatctattggtacaaataccgagacacagaagtgataacagctttaagccaatgtttgatggtggtagtcccagcaagctcttttctgatgtctttgtgcctttgcacatgctccttctctgtcactgttttcttcatcaaacataatataatggacaagtggaatcaaatagaattgagttcaaattctctgctacccatcggccctggtattggacaaattaactcctctgagcctgtttcctcatctgcaacgtagactagctaatactacccattggaaagcgttgtttcttagctaatgcatgcaaggcttaaaacctagatgacgggttgataggtgcagcaaacctccatggcatacgtatgcctatgtaacaaacctacacgttctgcacttgtatcccggaacttaaagtaaaaaaaaaaaaaaaaaaagaaaagaaagaaagaaaaagaaaaaaaaggctgtttctggggattaaataagacaattatgtaaggtggccagcacagttcctggtacatagtaaatgtcaggcctgcctgacagacttctattcagcagctactgctcccctgaaaatcttcctcagacgtttccacggtgcttcccgttcttacaccactacaatcctttattacactactatccgttcattccccacagctccctcccttcctttccctaaccagtgatcccaaaaggccagcaagtgtctaacattttctatcttctaagtgactggtaaagttccgcacctatcagcgctccaagtttgtttttgttttggccgactttgcaaaacggattgggcgggatgagaggtggggggcgccgcccaaggagggagagtggcgctcccgccgagggtgcactagccagatattccctgcggggcccgagagtcttccctatcagaccccgggatagggatgaggcccacagtcacccaccagactctttgtatagccccgttaagtgcaccccggcctggagggggtggttctgggtagaagcacgtccgggccgcgccggatgcctcctggaaggcgcctggacccacgccaggtttcccagtttaattcctcatgacttagcgtcccagcccgcgcaccgaccagcgccccagttccccacagacgccggcgggcccgggagcctcgcggacgtgacgccgcgggcggaagtgacgttttcccgcggttggacgcggcgctcagttgccgggcgggggagggcgcgtccggtttttctcaggggacgttgaaattatttttgtaacgggagtcgggagaggacggggcgtgccccgacgtgcgcgcgcgtcgtcctccccggcgctcctccacagctcgctggctcccgccgcggaaaggcgtcatgccgcccaaaaccccccgaaaaacggccgccaccgccgccgctgccgccgcggaacccccggcaccgccgccgccgccccctcctgaggaggacccagagcaggacagcggcccggaggacctgcctctcgtcaggtgagcgagcagagccgccgtcgcctcacgcgggaagggcgccccgggtgtgcgtagggcgggcgccaaggcggctcggcggggatccgtcctcgccaggggccgggtcccggcgggaggaggcgccctccctgccccccgccacggcggagcgtctgcagaatggtgacaggattctgggttcttgggcgaggggtctcggcttcaacttgacaggtgtcgggcgggtggggctagggtcctgagcgaagtgacaggtgcagttccctcttgtgaggctcggaggcagagggtcgttgcgagcgtccatcagacgcaaaaaatgaaaaataaaaatacaaaaatggtgtctgtgggagagtttttcaccggagaattggagtactccggtggtcgtctgactttctgttttggttcacgcgatgcaacagttgggaagtattttcttccgggcgtgcactgcatctgaagtccatttgtgggagaggccgaccagaaagccttggacaagaagcgcagggtcctgagtgtccattgcccacaggatactcggctcaggagctttgcggcgtttccttagaacaataatgcatcgaggccttggggactcaaagccatctgtagtgattgatggagcgtaactctttagaggaactgaaacatgggcaaaactttcatgagacatttaccagaagtgcttgaaagtttctaaacttttttttttcctgtttgatgaactcttcttgcgtgttagtcggcttcggcttgtctcattatttcttccattttgccttttgactttgaaccagcaaggatcttggtgtcccctctttttgcctttgtttttggcacaaaattagtggttctgtgcgcaaatggaaattttcgttttcccttattaagtggaatctaaatttaagcaagtccatacgaatgcactagatcttgaagggaagtatttattgtattacaacatcttacttttcttgatttttctactttatggttaaatagctatgattgaaagagtgtaattgtcattattgtcagcactggttctactttgagacaagttcattgcagagggaatgggacttgtttctgtttttcactattttctctcccattcttgtctatcaccaaatcctttcaccctcacccatttctttccactcggtatacactaacaattcacggcagaaaagattgaagtgggatttaggaaatggcccctggaaggctattaaaaatttatatatttaaatggactgtcttataggtcagttaaaaaccatattcgttaaaaaaccaaaataacaacaacaaaaaattaaaaaccacgtctggggcatgttctgggaaaagacatggctttagtttctgattaaattctgatgtatccaattcttgcaaatttcccttgggaaaatgcagtaatggctactctaaagaattccatgttatgcacacagctttggaagcatactctaatgtagggtaaccaggaatattgacgttgtggccactgcttggaaaaaagaggactgtttctttcattttttaactcattttatatattttaagtaatggaactataaaaaattctcttataa

SEQ ID NO: 1885282 - DNA, 4001 bp, Homo sapiens
tcatattagacctgtgttctacctaactgatttttgagtgtagtgtgaagtgggaatctcacttgatttttttttttttccaaatgagtatccaactgacccagcaccaattgcttgaaaagacagtcctgtccccactgttctgtcggctgcaggagtcttaaagaaagtgtccacatgtgtgtgagtctctttctggtctcaattctgtgccatttgtctacttgtctatgcttttaccactcctatgctatcttaattactataattttcataagttctgattatctggtagggaaaaatgtctttttaggagagtgttggctaaccttgactttttgcatttccatataaatttcagttgtcaagttctcaaaaatatagtggaattttgattgagattctagatgttgaatctagataaccgaatggaagaagggccttttttaagcatcatcagttcatgtgctgcaggcacctgagtgggatccggacgtgctcttgctttcagactctgcttccctccccattgtgaggtagcagcagctgatgaaagaggctcagcccttagtgctgtgataagagcacagtggagggccccaccccctactgcaggagacatttctcaaagacagaatgtccctaccatggttctagaatcctagggtgaatacaaataaattctgggataagccaggcagcaaaaacataaacaaaaccataactgagtttccaccggtagcgggggccttgtgccctgtgagctctcaaggagtcattgttcttgcactcacttgaacccagggcaggacttaccctccttgagaacaggttaggtgcttcccactccacactcccctctgccttctctgtcactggccctgtggtttgctttgtggctgtagaccgagttccatggagaagccaggaacaaatgtagaggctcatgcaggctggctgatgaggcaggggaggaaaggagcagactgtttagagagagaaaattgttagaggtatctctgttctctgaagaggattaacaggatgggaataaaggcaaaatacaggtgacagtagggtgaccaggacctggccatggaaaagggctcttgtgacttactgaggctgaatgctggtttgccatcgtcttgcatttcctttgtccacgaggtcagactgctgggaatccacagtcctggccatcctgaactgttccagaactgccccgggagcagggaaaccatctccaagatgagacttgtgaaccataaggtctggttggggatggcagggctgggggctggggactagagtacagggtactagaaagaagtagggctaaggaggaggggtagaggcataggtagaggagtcccaggaaacagctctgggacgacagcatttgcaagtagggctgggaggaggagtagggggacagacagggtagtcacagaaaagagttctgggaccagagcgttggcaaggagggctaggaggaggaacaggagaacggataagggaatcacagggaagagttctgggacccaagcgttgaccagtagggctagaaggagggctagggtgatcgataagggagttaccagaaagagttctgggactagagcattgacaaatggatggtttgtaatgaatagcagaagagcagtgcaggtagagtattagggtagggtagtggggagggcaggtatgagccacagtgggataacagttagggcagaaaactgaaaaatccacgtacttctggagaggaggaaggggcttggcagatggaagaagagggagggattcgcgggcacgagagtgggatggcttacgagagtgggatgtgttaggagggcaggatggattaggagggtgtggaatcataaaaccaggtactgagtggggtggaaattgagatattggagggagctttcctgtcatttcttccaatgagaattctagtgaatcacttctcccagtgagtccagatgaggaactgggaggtgcccagacctaccccagcatttataacatgcccaccccttgcatcataccatgtttgaatgcccattatgatgcctgtgtgcccctgtcttttggtctagggagagggccccaccaaccagagaaagggtcccagtttctagatgtaagagtgatcatgggaaatggcaaagagaagaaataaggcctgtaatatttgtcccttttctggggataccgtgtagttatgcccctcagtaggcaaagtttgatcaaagggccaagatggagttaggggctgggggcctaggagagtggttctgaagcaggacttgggaaaatgggaagaagtcagtgccccagtctttcacttactatgattttcaaagcactttcacatcatttatactgctgcatgaatatatgtgattagaggagcgatgctgtattcattggctcaatgaggacactgaagaccggagaggaagctgccataaacaggcagtgggtgacaaagcaagtgggactagaacttgggccaaaaggaggggcaggtgggaggcagccaaaaatagcccagaatgctgaccagtggcctcccttcctcctggctctctagacaggatcctacctgcaggcggtgcttcagagcacagctttactgttcgtagtaacctcttgatccctgtgccactgtggttttatgccttactcttagtgggaaccataaacatagttctaaggaggctgggaggtctggactgggtagaattctccccagtatggcaaagcggctgtggccagactacttctctagattcctcctcaatggacaaggcatccctgaaggaaaggccccagtcaggggcttagggataaaactcatcttcctaggacagagcacctgggggaaggagcagctgtgggcgcagcttcagtggatttaaactttcctgcctgccagctctgaagacagcagctgatcctgacaagtgggattctcccagcacagtgcaccagctctgctatgggacagactgcctcaagtgggtccctgacccccaagcgtcctgactgggagagacctcccaacaggggtcgacagacacctcatacaggagagctctggctggcatcaggccagtgcccctctgagatgaagcatccagaggaaggagcaggcagcaatctttgctgttcttcagcctccactgttgatacccaggtgggcagggtctggagtggacctccagcaaactgcagcagacctgcagaagaggggcctgttagaagaaaaactaagaaacagaaagcaacaatatcaacatcaacaacaacaacaacaacaacaacaaaaaacccacagagaaacctcatccaaagaccatcagcatcaaagatcaaaggtagataaatccatgaagatgaagataaaatagcagaaaacgctgaaaattccaaaaccagaatgcctcttctcctcaaatgatcgcagttcctttccagcaaaggcacaaaactggacagagaatgagactgactaattgacagaagtaggcttcagaaggtgggaaataacaaactcctctgtgctaaaggagcgtgtactaaccaaatgcaaggaagctaagaaccttgataaaaggttacaggaactgcaatctagaataaccagtttatagaggaacataaatgacgggatggaactgaaaaaaaccagcacaggaacttcgtgaagcatacacaagtaccaacagccgaatctgtcaagtggaagaaaggatatcagtgattgaatatcaccttactgaaataaggcatgaagacaagattagagaaaaaagaatgaaaaggaatgaacaaagcctccaagaaatacgggactatgtgaaaaggccaaacctacaattgattggtgtacctgaaagtgttggggagaatggaaccaagttggaaaacacacttcaggatattatactggagaacttccccaacctagccagacgggctaacat

SEQ ID NO: 1885283 - DNA, 4001 bp, Homo sapiens
tagcacaaataatatgtttgagctgcattttcttaccattcccaaatctatgtgttaaaattgataaagaaacaaatattaccataaaagcccaagactcatcttttgacacctgcttttcttcttccatgtcacgcctgcccctcttcaggttctgaaaactaccccagttaaacttagtttgggattggatatgtcagtttcaccataatatagatttatgtaatataatatggattcatattcttgtgctatgtctcccaggcatgtgtattttaggaataaaagacattatgtgcagttaaagcaactgcgttcctaagagaacagcaaagtgcttgtcctagccagccccactgctttgtagagcagcacatgctgagaagtccttccacaatggatgagaaccaaggtcaccctttcactttgtgtttttttttttggttgttgttgttgttgtttgttttgtttgttttgagatggagtttcactctgtcactcaggcgggagtgcagtggtgcgatctcagctcactacaacctctgcctcccaggttcaagcaattatcctgcctcagcctcccgagtagttgggattacaggcgcccaccaccaagcccagctaattttttgtactttttagtagagatgagattttaccatgttggccacgctggtcttgaactcctgacctcaagtgatctgcccacctcagcctcccaaagtgctgggattataggcgtgaaccaccgcacacagcccaccctttcactttggaagtgacggtgagcagcaaataaccaggacaaagatgtgaaagacaaaagtgtaaaataccatctctcaagtttatggcctagtgggagtgaataaaacaaacaagtaattatagtatgaagcataataataccggggtcagtagagatacaaaatcatttaagagaaagaaattcatatttattgtgtgacttctaaatactgagcattacacatgtgttttcaagagttctcaaagagaaattattatccctgctggaaaaatgggaaaactaagggtaatcaagctcatttccccaagagtatgtaacaaacaaatagcaaagtcagagactgagccatgattttctggcacgctctttccccgtacaatgtgctggaaacgcagaaggggccacatctgaccgaagcagctttgcaaagtaactggcatttgagatggtccttggcagacaggatctcaaaagctgagttgagaatcaagagggaattccaggcaaagagataggcttgaacaaacattgtcgagatggagaatgtaagacatgttcaaaagaaaacattttgtctgaattttagaaaatacaggatagtgtagatgcacttggacctggacccagaatacatgggtcctaatcaccactaggtcactgaggtgtaagccctgaaattggggttcaatattaagtgaggctttgacatctgataaaatcaggcttcaaatgaccacaagtttccctccccactctgctctgacaggtaaggtcccctagccaaaaacactaattcaccaggggaccaggcacagttcctgcttatctttgggtagtaggttttggttccctgccagcctacaaaattagtcatacacccccatgaacacagccactcacccccatgaacacagcaaaaacgggggccaagtccccttcttgttactacaaacccacctttcacaggccctggctgttcactctgttcttgaaccatcgcgtggccctgtgggctgtccgctgtcttcttccctaggctgtgagcatatgtgacaactaaactgcattctgccccacttttctgggatccagcgtcatctgtttggcgatcttcataatcctagtgtaggaatccttccctcaaaacagcgtgacaaggagacaaataaccactcttagccatgcgcctttggggaagctgcttcacctctgtgtgcgtctgtttcctcacctgtggaaacacatgtgatcataatgcctatttcataagtctcctataagtgccatagatgttcggtggctgttaatcatgggtggccctgatattttaaaatatttaattcttaccacaaaccaataatgtagatatagttattatcatcattatcattttttactaccaatgaggaatttgaagcagagagcagggacataacttgccgcagatcccacagctaagtggctgagccataattgagattcaggcagtctggttgccgagcctttattagtagagagatgactgagaggtccccaaatccacccacttagtattggcggcaaggacaccctgctttctctttgctattgcacttaccaagttgaattgtaattccttgttaattttctgctactgtcatttgaatgtgcattccctaaagtcagggacataattcgctgttgatttaatggaatctctagtccattatctaaaacagtgctcagcccactgtgcaggcctggccacctcttcctgaacaacagaatgagtgacttctccatggccagattcctggggctcttcacatttctgctgctgctgagtctctgcatgatttgactctgctgactgcacttctttggaaactagtcctgatttacaaggtcctgaattactcccttgcattctcctttgaggccttttccacccgtccctggtagaatttctctaaagctctgtcctaagccatcttctatctatttacatcctttctcaggaaacttgcagctatggtggaaaggctcccttttatgcagttgacttgaaagtctgtgtctttaaccctcatttccttctacagccctaaatgcaaagttccaacttttgtctctcatcatccaaccatccccacgaattcaacatgcctaatgttaattcctcattagccccacacacttgcgctcagattctcctccttttgcccctatacttgtaaataatgccatcatttccttcaacattcaagttgaaaacacagcatgcccccattagtagcaaaccacctggagatttgatgggcactgtgctttctacccaagctctcctaccctgaaacccttaacacagagcttcattgcctcttgcttccttagacttaatgattgccattaacaggtttccccacctccagtttttctctgcgctttcccacccccacattactgcctgcttcgccatgagccagaatctcagctctgaacattgatggaggagtttgaggatcaaattagatttacagtgtatttgaaaatggaccaggagataagaaaataaagatagaatgcagagatgacctctccaaaaaggaaaatgttgctagtgagggcagagaacatgagaaattaagggtataaagaagggatggtgaggccgggcatgatggctcatgcctgtaatcccagcactttgggaggccaaggttggcagatcacctgaggtcaggagttcaagaccagcctggccaacatggcgaaaccccatctctactaaagatacaaaaattagccagacatggtggtagtcccagctactcagaaggctgaggcaggagaatcacttgatcccaggaggcagaggttgcagtgagccgagatcacgccactgcactacatacggcctgggcaacagagcgacactctgtctcaaaaaaaaaaaaaaaaaagaaaagaaacagtgccatctggagcacaggtgagtggattcactttggccaagaaaagccatgctggttctaggtttagatttgaagcagagaggacaggagcaatgtggaggcattctgagatggagggatagctgaaagcatgttgatcagatgaccttaatttttacaatgaaatgaggtttaatttgtatgatgacatagtggaaggtgtgggtaaaatcaaggacttgagaaaagtggaaaaaaaaaaactagtgtagatagtttgaggaatctaccgagatatg

SEQ ID NO: 1885284 - DNA, 4001 bp, Homo sapiens
taagcagcatagcaaggttaacagacaatttaattaaaactccagatatatgacttctaattccagcattttttttttctaaattactttgtaacattggttaaatgggttcattgctctggtcttcagtttcttcagtttcctcacctacaatataagaaggctagactaaattattcgtgttttagggtgtctacctttgttatctatgagtgcataacaaattagccacaaaatgttgtggctaaaccaacaattattctgttatttctgaggattctgtgggttgactgtgtctcagctgtatcttctcctgctggtcttgctcatagctccttacacaattgcagtcagatgggagctccatattcaatatccaagatggaatgtccaagatggatgcactcatgtacctagcaccttggcagggatagctgggatcagctgggatcctaggaaatctgggcttccctttctctctccctacagcctcggggtgtcccctcttcatatgacctctctgtatagtatttccatgttgtctctccatgtggtctctccttcagggcaacagaacttcttatgtggaagctcaggctctcagaagttcagatatatcatcacttctgccaccttctcttgaaacagcaagtcacaggatcagcccagcttcaatatgagagggacaatgcaaaagcatggatactagaggccatctttggcaaatagctatcacatagtatctgactgcaatagggtccttagaactctaggattttaatgatttgaaaatgtgcaatccatatgtggcaagtgctatgatggtctatgtatcacattagggacagtgtagtgaatctctcttatcaaggatgtttattttactagaacactcaatttatcagctcttccgggaaagaagtgaaagtattcacagaaagaatactggaagcattctttcacttttgggaaaaaaaatagagaagatttactctacttgtgttaaaataattgcactatcctctttgtgctgacaatctctacatttacatgttagctgtctgctgcacagaaggtatacatcaattgaaccgccaacaccctaccccaagaagagtacctggtggaagatccaacagtatctgggagtaatggagttttctcgcatggagttcagaagatggtaattctgactgggttttactgacactccacatgattggggaaaccaaaacaagattaaccagaaatgagccttcggagtgatgaaaaattaatctcttctgcccaccctcacctaataaaagattctgttcctttcaatagattgattttattatgcaatagctgagtatatacactaagccccatagaactgagatttccaggctgtgataaaaccaaataaccattgttacagacagataacaaagccagactcaataacattttattaatcctcaatgccaaattataaatgcttgagaaaaatatcctttttctctcatactatgggaaaatggcagctttttattaagtctatctcttaaaagttaaacatttgctctttttgctgcctagcagtgagaactgaagcttccagagtgttttatttatttatatggcatttgccttgacattgcccaagtaataatacatagtaacagggacagatgagagttctgtatcatcccttccctcaaggcaaaccaggcacaaatagacctctaatgaaaaaatccacacagcagaacaataagtaacagggaataaaatgagaaaaacagtttctaagcacagcctttgaaaattacagaagagaaaaatctactcaaagtggagtaaggcctcttcagctttcacactatacggtgggttttagtttcattacttgattctttagcactaaccagtttacctctaaatctaatatcaccttttttggcttcaaggaatagcaatgacttcaatggtgctttattcataaaatggtacttgctcctaagtagcagctgaaatagagaattttttgtataaatttagagggtacaaatgccattttgattcatgggtatattgcacagtaatgaagtctggacttttagtgtaaccgtcatccaaagagtgtatgttgtaatttctcatccttcatccccctttctcatccttcacccccccaacacacacacaattccaagtctccattgtctatttttacacactgtgtatgcatgcatacacatgacttagttcccatgcataactgagaatatgtggaacttgactggttttgagttgaaatatagagatttttaaacaaaatataaatgtgattaccccagatgtgcttatttcctgcaaagcaactaccaagttattcaacaaataccccgtgattgccaactatgtgccagacaccatgctagatcctaggaatacatgagagaacaagatattgtttttgccctcaggaaatgttagtccagaagaagcaatagaccactaagcaggctggagcccgggaaagtgatatccagccagtctagagcttcagggaaggatacccagaactaatagcttctgagataggaaagattcaggaaaattggtcaaggaaagaggagtgaggtgagtgacctgtaggtggctgtatgggtactggccttcagggaggaagtttcaggcaaaggaacatgaagtataaaggtgctaagagccaaagatagctctgggggacctctagacttcttagattcagaagctaacacctaccagcgtgtacttcaaaatattccattctattttatgactgagaacagaaatcacacatccttaaggagccctaaatgtttcaccaatgggtacatgccattagtgtttgtatccttatgtaagtaaatcatgtttcaccagcttgtctcctcactgaggacctcttgttttccgcaaagtccactcccttgaccttgtgccattatttctgtagatcatcagagggaattaaaactgtcctcatatatcactggttctcgaccagggatgttttgcttcccaggggacattgggttatgctgatgataaaacatttctgggtagaagccggggatgctgctaaatattctttagtatgtaggacaactactacctcaaaggagtatctggcccaaaatgtcaatagacaagtgctgtgggccatcaaaagtacttctggaatgttagccaagtctaaatgcaggacctcttatctggtattccatccattgggctgtttggagctactccccagaccctggggctacaggcctcccatcatctgctcttgagttagtgtcactgatagcttatgccatgttgggtttcttgcctctgattcctccacgtgtccttagcctttgcctccagaggagttgcttgcccagtatctgcagttcccacaggtaatatggcttaagtgggcttcatgaagacatacaataataattaggctttccagggcgtgtattctttaccatattttgttctaagtgctttaaaggcacaatttcctttatccctaaagcaaaacaataatttttatttattttacaaacaaagctgtcaacactgatagaagttaagtagttttcccatcttacactgctaattttaaaaacctgaggtttttacctatcaaaccagctctgtttgactcttaacctgtgctctcaatcagttcactaaactgcatgaatcccagacaggtgtccatcctccatgattggctttggcttagccaaagtccgtaaatagactcttctcacattccctaaggctcattctaaaagagacccagcttaactaaatactagcaaataatacagtttgtggaaaaacgaaaatttttttcactgtgatatatgattaatttcctttaaactgtatttgctttttctgcaaggcccatttttaaccaagtttctgtcctccttaactgcactgatctgtccagtacacacaatctc

SEQ ID NO: 1885285 - DNA, 4001 bp, Homo sapiens
tgaaaattttatcaattgataagatgaattatagtgtcaagaaattttttttattaaagattttttcctttttttcttccctgggggctaggcctgggaattccaccatctatctgagagaatgaggtttttttttttttcttgttcaagtatgattcccttataacctacagcattttttattcatggtacaaatattagtggtagtgttgggagataagattaaattatattcactaatataatgaagtatggggaagagactagaagaatcaagtttagtgtttgaaaaatcaataagcttcccagtatctggcaaatccagagagaataatgattgaaagaaccacaagaaagtagatcgtatatgtatcagccttatttgtaaggaaaaaaatgtaggagaaagaatatcaaacataatttgatatacagttgtggaagaaaacactacatcctccaaattttactatttttattttttaagcattatataaataagctagtactttgttagaatcagactatacttcgaccttaagaaattaacagtttagaggtaattctttatgaaaatctggtaactcaggaaatcttaggcaatatttgttagcccttttgagctgagagaacaactgtcttaattgctgctgcttagaaccctgatatgactttcatgatgaaaaaagttatgaaccactctggaaaataagagttcatgagttgaaaattctgctgtaggtaatgaaacaataatggaagcagaaaggttaaatagcttttctaaagatcaacaaccagtaagtagcaaagcaaaaatcagtataaaattttacaacctcaggagcttttaaccatatcactgattttttctagagctttttgttaatgaagtaacactttctatagacatgatgttgtagctaaagggatagctcccaatattaatacttaattttttttggctatacattttaaaaattattaccttaaaacaaagtaataaaatctccttgcatgcaatggattctaaaatgggtaaagataatactaaagttgtctagttgtcctttaatgtactgtactataatttcattataaaatctgttaaaatattgaaaaacatttaatattacattctacatgaattagattttatagaattttctgaaataaatacagccatagcaatgtataataaaagaaagatatgaaaatagaaaaaaacttcaaaaaatgttaaaacttgattttttatacttttcagaatgagagaaacaagtttttaagtgaaaatgcattatcaggtaacaactacaaaaaatcaccagctcctcagcttgcaaagatctcaaggccaagtgccttttccatcatcaaggataagagcactaacctcaatactgattcacaggaaagtttttatttttttactgcatttatgagcatttatatagttttcataccttaggcaacaaaatgacaatggcagaattgaccttttgaaaaaaaatatatttttactcatttcaaaagagaaatgagttcagacatggagctacaaagttcaaaaaaacaaaaagataaaagatgctgaaaatgaatggaataggtacatatatttttaaatgtatataaaatgtaatatattaaagtaaaaaatataattagaggttaaagtctaaaaattttgagtaagttgtttggatttagaaaatgtatgctttactgaatacagatgattaatttctggcgtgtaagggaaacattatctttctcaataatatattgccctagtctgtttgggccgctataacaaacacaacatagactggcttgcttataaaaacaaaaatgtatttctcacagttctggaggctgaaagcctgagttcagggtgctagcacagctgggttctggtgaagacttgcttcctggttcatagactgccattttctccctgtatcctcacatggtggaacttgcaagggatctctctggggtctctttcataagagctctaatcccattcatgagggctccaccctcatgccattatcacctcacaaaggtttcacttactaatccaatcacattgggggtttcaattttgacatataaattttggggaggatacaagcattcagtccataacattatatatatatatatatatatatatatatatatatatatatatatatatatggctggggcagtgataaagtgttccatattatatatatatatgttatatatgtttcttatatatgttatatgttatatatgtttcatatatatgttatatattatatgtttcatatatatgttatatattatatatgtttgatatatgtcatatattatgtatgtttcatatatgttatatattatatatgtttcatatgtatatatgaaaattaagcagataaaattccattttccatccttccaagaagaaggggtgagtcttctattaaggatctacttgctaaacttaaaagcctgttgagaactcaaccctatattttttgtacaattatattttggcataacgaaaacacataatttataaaatgctcaaagatacgtcatttaaaaagcaatacaagaacaaaatacagcatttatatgcaataaagtattgtcacaagaatgaggatgaattatttggaatgtaacatgtatgcaatatgtttttataaaattgtgaaaaatgaagaagaacataggtcatgaatgaatgtagatatatactataacactgtaatgtaatgtgcttaacacttaggtttaaaaaaagagttttggaaatggtgttaaaataagttggctattaatgtgatgtattccaaaaagttttggttggaagagaaaatgaataagctgtctttcacacaaaaccagagcaaaaaataagtgtgtttactgacaataaataactccttctattacaccagaaaagaaatgactatgtacagtatagagctttttccacaaatatgcctttagtacttatctttatgtatgtgccttacaaaaactattaatataaaatatttaattaattgctataaacgtgatgattgtttatgagagtaaaagtaggtctgttaagtcgatggccctttattttgagaagtgtatatgtgtgtgtgtgtgtgtatgggtgagtgtgcgtgagagcgagagagcgagaaagggagggaaggacaggtatgtttgtacatgcgtatgtttgtttgcctgtttgttttaacatttatctaagattgtttttttcattgaggggttggggggcgggtggcttcaaatgacttagtcggctcatgtttgcaaactcaggagtaattgctggggcagtgataaagtgttccatataatcgaattaaaataatacattgaaattgagtgaggaaatatataaatccaggttaagtgcatttggaaaagaatcagagagaagaaatgcagtgatgttgaagtgcagctgagactgaagaaacaataacatgtatctaaaagggattttaaaatgtaatctcttttatcattttacataagataaaaattttcataaaacttagaaatgtgctgtcctgttttcaagttaatgaggagatttaaaaaatgcaaagacaggcacacggaagttggaagacctaggagtagcactatctcagttataaaagagactggaccagtagctgcagaggactaataaaaaccatgatggctattaaattaggctatttgtaagttttcagtgatgatatcgtctggagtacaacatttcttctcaatatgtagacagtaaacattttagcaatgctttcaactttcaactcagcatttatttgcatcattcagttagacataaacttctaaaataaaatgtaccttttcctctttttgcattcttaaatattctttaatatttatgaaattaggatagctctttcagtttttttattatttgaaataacataaatggtcctaaa
